United States Patent Application Publication US 2020/0377945 A1 - sequence listing, part 62

SEQ ID NO: 14002 - DNA, 148180 bp, Unknown
  gut microbiota DNA sequence
atcataaaaccatctaagaatttcagttccacacaagcggtatccatgttaaattcacaagaaatcaatctatccataagaaacctccattttgcgagatgttagatcatcccaaaatatttgaatgcttctcggattgctttctctttttccggcggacacatgggctgtctggaatcctcggacttcggcaaattgtaattcttgccaacttcaatcccacatttcctcttaatctgtgagatataaagattggatacctttaacccgctatgctccagcacatagtctttgatctgggtgtaggttgccccatcctgaaattcggacatatccatatcttccaaagagaactcaacccgaatctttttcgagtcgacctctcccttggaaagcaagacaaccgtctcaacatgcggcgtctgcgggaacatgtccacggccagcgcctgcgtgagcgtgtagccgtgctgtgtgagctgcttcacatcgcgcgcgagcgtgcccggatcgcaggagacatagacgatgcgcggcggctgcatggacaccatcgcgtcgatggcttccggggacatgcccttgcgcgggggatcgaccacgatgcagtccggccggacgccgcgccgggccagctccgccgctgcggcgccggcatcggcacagagaaactccgcattttcgataccgtttcgctccgcgttccggcgcgcgttctcgatcgcctccggcacgatctctgccccgatgacgtgcgcggcctttcgcgccagacacaggctgatcgtcccggcgccgcagtacagatccagcacctgatccgtcggcgcgttgacggcgtattccaccgcgcgctcatacagccgctcggcctgcacgggattgacctgataaaacgcctgcggcgagagcgtgaacgtcagcccgcagaggcggtcggtcagctccggcactccccagagcggatagaaatctcccgcgagcacaacgttgcctttctgcttgttgacatcgagcacgatgccggtcagctccgggcagtgctcgcgcaggtaggcgatcaggccgtccgtctgcgcgccgaacccacgtgcagagacgatgcacagtacggcgtctggcgtgtgcatggcgcagcgcgtgaacagatgccgcaccgtgccgcggccggtggcttcgtcatacggcgcaacgccgcgcagatccatccagtcgcagaccgcctgcgccgccttgtccgcgagcgggagctggagcaggcactgctccacaggcgtaatgtcatggctggacgcgcggtaaaagcccttgaccacgcggccgtctttcgtgccgacggcgtagatcgccttgttccggtaacagagcggatattccatgccgatgatgtcctgtaccggcatcgaaacgccgccgatgcgcgtgagcgcatcgttgacgcgctggagcttcatgcgcagctgctcgtcgtagtccatatgctgcaggctgcagccgccgcaggtgcggtaaaccgggcagggcggctgcgtgcgcgccggggcaggggacaggcactgctctgccttgccatagacggcatttgccgtcaccttcaggatacggacctgccacgtctcgccggcgagcgcgcctttcacgaacacggcgcggccggcaatgtggcacacacctgcaccgtcggacgtatagcccgtgatctcggcggtgtgcagttggtttttcgcaagctgctccatgatttattccgcttcctgacccgcgatgtgcatatactcgtcgtacgtgcagcggcggtcgatgatgccgtcgggcgtgatctcaatgatgcggttggcgaccgtctgcgtgagctggtggtcgtggctcgtgaagatgatattgtaggggaaggcggccatgccgttgttgagcgccgcgatactctccagatcgagatggttcgtcggctggtcgaacacgaggaagttggccccagagagcatcatcttcgagatcatgcagcgcactttctcgccgccggacaaaaccttgacctgcttatagacatcatcgccggaaaacagcatccggccgaggaacgtgcgcaggtagctctcgcgcttatcggtggagaactggcgcatccagtcgatgaggtcatagtcgcagttttcaaaatagctgttgtgatccttggggaagtaggcctgcgtggtcgagacgccccacttgaccgtgccctcgtccggctcttcatcgcccatgaggatcttgaagagcatcgtcacggcgagctcgttcttgccgagaatggcgatcttgtcctccttgccgacgatgaagctcacgtggttgagcagcttttcgccgtcgacggtcttgctgatatccgtcacgaacaggcgatccttgccgggctcacgctcggccttgaagccgacccacggatagcggcggctggaggcgggcatgtcctcaacggaaatcttttcgagcagcttgcggcgggatgtggcctgccgggacttggacttgttggcggagaagcgggcgataaaggtctgcagttcctggatcttctgctcggcgcgcttgttctgatccttgacgagcttctgcatgagctggctggattcataccagaagtcgtagttgccgacgtacattttgatcttgccgtagtcgatatcgacgatgtgcgtacagacgttattgaggaaatagcggtcatgcgacacgacgagcaccgtgccgtcgtaatccatcaggaaatcttccagccagacgacgctcgcaaggtcgagattgttcgtcggctcgtcgagcaggataatgtccgggtggccgaagagcgcctgcgccagcaggactttcaccttcaggcgcggatccatgtcggacatcatcgtctcgtgatgctccggcgtgacgccgagcccctgcaggatgcgggatgcatccgattccgcctcccagccgccgagatcggcaaactcctcctcgagctcggaggcgcggatgccgtcctcgtccgtcatctcgtccttggcgtagatggcgtccttctccttgccgcagtcatacaggcgctggttgcccatgatgaccgtgtccatgacggtataggcatcgtacatcgtctgatcctgcttgaggacggacattctggccttggggtcaatatagacgctgccggtgctcggctcgagctgaccggagaggatcttcaggaacgtggatttgccggcgccgttggcgccgatgatgccatagcagttgccgggggtaaactgcaggttcaccttggaaaacagcggggctccgctgtactgcagcgagaggtcatcaacagtgatcattttggaaactccttcgtaacaatagataataaattagtttatcatattttcccgcgcttgaacagcacaaataaacagagtcggcgattttccgccgactctgcgtttcgtttattctgtaagcacctttttcagccgtgcatagcggggaaggccattttccagcgggatctccggcacgccctgaatgagcggcagggcatagtcgataaagtcctgcgtgacgttgttgccctccggcacgatccattccactgggactttcttttcatagtttgcgacatcggagagcggaatgagcttcatgcggcaggcatactgaccgcctgccatgacgcgctcaaacgcgaccatcttgccggtctcgccggagagcgccgcctcgacagccatcttaccggcggcaaacgcttcgtcgatatccgtctgagaggcaagatgcgcgcccgcgcgctgcagcagcgacagttcaatgccacgcaccttggcgtgttcgtgttctttgatcacctgcgccagacgcgccgccagaccgccgagctgcgcatggccgaagccgtcggtcgcggaggccttggcctcggaaacgaatgagccgtccgcgtagtggatgccctcggaaacagcgatgagaacgttatttttctcctcgtagatgcggtgcacatccgcaaggaactgctccatgtcaaaatcgacttccggcagatagatcagatccggaccggagccgcaggccgatgccagcgcggcgctgccggccagccacccggcgtggcggcccatgatctccatgaccgtgatcgtgccggtgtcatatacacggcagtccttggacacttccatgcaggaggttgctatgtacttggcggcgctcgcaaagccggggcagtgatcggtgccgaagaggtcgttgtcgatcgtcttgggcacgcccatcacgcggcagtcccaatcgtgcgcctgcatatagcggctgatcttgttgcaggtatccatggagtcgttgccgccgttatagaagaagtagcgcacgttgtatttccggaagatctccagaatacgacggtaatccgtatcgtccgtgtccgggtctgccattttgtagcggcaggagcccagctccgacgacggcgtgtgcagcagcaggcggagctcgtccggatcctcctgagcgatatcatacaggcggtcatccagaacgccgcggatgccatgggccgcaccgtaaacgttggtaatggcatcggattccaacgcagtcttgagcactccgtaggcgctggcattgatgactgcagtcggcccgccggactgcccaaagatacacgcgccttttaattcaccggacataacgtacctccataaattcaaagaattgatagattttactgaaacattgaattccactattgatattatctaaaaacatgtgtaaaataaattgaaccgatgatttgttttgcatcatattgacattctatatattatatgaaagtgagttgacttgtcaatgtcgattgtaacttctcaggaaatgtttgcaaaagcttatgcaggcggctatgccattggcgccttcaacgtgaacaatatggagatcattcagggcatcacggaggctgccaaggagtgcaacgcgccggtgatcctgcaggtatcttccggcgcgcgcaagtatgccaaccgtacgtacctggtcaagctggtggaagccgccgtgatcgagaccggcctgccgatctgcctccatctggaccatggagactcgttcgagctgtgcaaggcctgtgtcgatgacggcttttcttctgtcatgattgacgcttcctccaagccgtttgaggaaaatgtcgcgctgacgcgccaggtcgtggaatatgcgcacgcacacggcgccgtcgtggaggcagagctcggcacgctggccggcattgaggacgatgtcaaggtcaaggccgaggattcgtcctatacgcgcccggaggatgtgcaggaattcgtcgagcgcaccggctgcgattcgcttgcgatcgccatcggcacgagccacggcgcttacaaattcaagcccggcacgaagccgcagctccgtttcgatattcttgaggaagtctccgagcggctgcccggcttcccgatcgtgctgcacggctcgtcgtccgtgccgcaggaatacgtacagatgatcaacgagttcggcggcgctatgcccggtgcgatcggtgtgccggaggatcagctgcgtcaggcagcgcgcctggccgtgtgcaagatcaatattgactctgacctgcgtctggccatgaccggcacgatccgcaagtatcttgccgagcacccggcagagtttgacccgagaaagtacctcggccccgcgcgggaaaacatcaagcagcttgtcaagcacaagatcgtcgatgtgctcggctgcgacggaaaagcctgagctgctgtctgtatacggctcagtcagaacagggggaactcccatgaattttcaggaacttctgatgcggctgtctgcaagctgttttgctgccgaccggccggattatgattggaaaacgctgcgcctgtttccggaaacgggactggatcttgtgctgatcgtgcgtcttgctgcggcgctgatactgtgcgtcatcggcgcactggtgcacaacacggtggtgcagtatatccttttggctttgtccgcgctcgccgccgggtatgactaccttgcatctgcgatcgcctgcattctggaccggcaggtgttccggcccgcggtgatcgtgatcgtgtgcgtgatcggtacgatggcggtcgggcagccggtggatgccgccgttttcctgctcgtgtaccgggtcatgtcgatactgatcgcggtcgttacggtgcatgcgcagaaaacgctggaagccgccgtcggcggggagatccattctccggctgaattcgccgccccgaagtggatcggctatcttgcaccggccggtctgtgcattgcggtgctggtggccgtgctggagatcgtgctcaaggtcgcaacggtttcccgggcaattcatgccgccatgatcgtcctctttctttccaccccgtgtgcgctgctgatttctgtgccgctggtgtggtacagtgccgtcaacggtgcataccgctgcgacgtgctgtttcgcagctgccgcagcatgcgcgcgctcaacgccgtgcgtgcggttgcagtcgatgaagggaaaggggacagccagcttccgaaggtgatcagcgtgaaatccagtcagctgacgccggaggccctgctgcaactggcggccaatgcggagtcctgctcgaacagccgcacggcgcgcgcgatctgcgctgcctacagcggccccattctcacgcagtatctctcccgcgcggtggatattcccgagagcggcgtggaggtttacattgaatcgacccgcgtttgcgtcggcacgcgtgagctgatgatcctcaagggtgtggacatcccggatgcagacctgacagacggctatgtggtctatgtatccgttggtgagcagtatgcaggcaagatcctgctgcaggaagttgtgcagtcggacacgaagcccgcgctcaaagagctgcgtgcgctgggcgtgcacacgatcacgctcttcagcaatgccagcaacgactccgttgcagagaatgcaaaagagctcaaggcggatcacctctattgcaagcgcagcggggcggaaaaggaacagatcctgtcgcagcaggtggagaacctgagcgacggggaactgctgctgtattatgaccgccgctgcacggcacatccggagcactcatcggcagatctggacgcctgcgtgatcccggaggagagcgacgagcggtttgacgccgatatcctgctcacaagccaggatccgtacctgttgccggaggcgatcgagacggccggctgggtcgagggcatctgccgcgagcatctggcgatcggcgtggtcgtgaaggtcctgctgctggtgatggcagagctcggctattgtacgctgtggttcgccgccgttttggacggcgctgccgcgctcggcacgctgctgatggcgatccgtgcgttcggcttcgataagccgcatcatcgcgtccgcgattacctgccgaaggtcaaatccaaataagcaagcaaaatctccgatccctgttttcaggaatcggagatttttttcgccgttttctcgtcaggagagaattctcccagcggatttgccgctgcagccgtgcgcagctgatcgttgtctacgtgggtgtagatctgcgtggtgttcaggtgctcatggccgagcacctcctgcagcgtgcgcacatccacgccgttttgcagcatcagtgtagcggcggtatgccgcagtttatgcgtggaatactggctggcgtccagtcccgcacgggtcaggtttttcttaaccatgacctgtacggaatcgcagctgatgcgcgtgcgccggttggagagaaacatggccgtcgtgcgcggcggcgcgatttcgctgcgcacagccagatagcggtcgagcgcctcgcggcaggcgttgttgaggtagacaacacgctctttgctgcccttgccaaggatgcgcaggctgtcgccgtggtcatcctgcaggttcaagccgaccagctccgagatacgcagaccgcagttgagaaaaatacacagaatgcaataatcgcgctccttgtttttcccatccacaacggacagcagccgcttgctttcttccagtgtgagatagtgggggagggtttttggtatcttcggggagtcgagatcctgcaccgggttttcctccagcagcttcgctttcacggtcaggtatttgaagaagctgcggatcgcggcgatcttgcgcgcacgcgagctggcgctcaagccgtattccggctcgtgcgcattcggctgcctgacgcggtcgcgcgacagataggccagaaaactgtaaacctccgtgagcgttacggcacgcaggaaggaaagatccacatccgcaatggagatctcgtccaattccgccgtgcgcggcgcgagcccgcggtcgagcttcaaaaatcgcagaaacatccgcaggtcgagataatactggtcgaccgtcgccttggaatgcccgcagatcgtttcgtgataaatcaaaaagtcgcgcagcacctgcggcgcatctgaataatccatagccaacacctcaaattctaataagagcataccagaagtaaggggcagtgtctattgacgaaatccacaaataattcggcaaaataaaaattttgccgaattcagaggaggagaaaacagccgaaaagcacgataagcgtctttcggctgttttctgcgctattttctcattttttcatcgtgcgctttctcgcagctgaaatcgaaagatctacgcaccgaacacagccttgagcgcttcccggatgtttttgaccgggatcgtctgcaggccgttttgcttctgcacatcatcgcgcacgtgcgccgggatgatgcagcgccggaatcccagccgtgcgatctccgacaggcgctgattcaaatggctcacggagcggatctcgccggacaggccgacctcaccgacggcggccagatcgctgccgaccggcagatccttatagctcgatgcgattgccagaatgaccgccagatccgtggccggctcgtccagccgcagaccgccgacgacgttgatgtacgcatcgcagctcgacagcgaaaaaccggcacgcttttccagcacggccagcagcagcatggcgcggttatagtcgatgccgttggcgttccggcgcgcgccgctgtagcccgacggcgtgactagagcctgcacctcggccagcaccgtgcgtgacccctccatgacgccgacgacgcaagtgcccggcgtgttggtcggacgtccggacagtaacatttccgatgggtttgttacctctcgaagcccggaatcttccatttcgaagacgccgatctcgttggttgacccgaatctgttttttgccgcgcgcaaaatgcggtacgacatactctgatcgccctcgaagtacagcacgcagtcgaccatgtgctcgagcaccttcgggccggcgatgctgccctccttgttgatgtggccgacaacgaatgccgtatagccgctgtccttggccgagcgcatgatgcgcatcgtgcactcgcgcacctgactgatgctgccgggcgtcgaggccgtctcggcgtcgtacatagtctgaatggaatctacgatcaggacggtcggctgcaggtcgtcgatcgtggcgagaacggtgttcaggtccgtttccgccagcacatagatgctgccgtgatcaacgccgaggcgctgcgcgcgcattttcagctggcgctggctctcttcgccggagacgtaaaggatcgtttcctgctcgctgatgcggccgcagagctgcagcagcagcgtggatttgccaatgccgggcgcgccgccgaccagaaccagcgagccgcgcacggcgccgccgccgagcacgcggtcaaattccccgatcccggtggaaaatcgcagttcttcctcggcgtccagttccgagatcagttttggctgtgcgatacgttttgcgcgcgtgccgagagacattttgggttctttcggcgcctcgaccagcgtgttccatgcgccgcatgccgggcactgccccatccattttgccgtctcattgccgcattcggagcaataaaaaacggtttttgtactcgattttgctttcatgtaaccattcctgtttgcggcagagactgccggtattgtaagtaggacgcgatgatcacggccgccagtttggtctggtagccgccgtccttgagctttgtacactcggattcattggataaaaagccgcactcgaccagcactgcgggacatttcacttcccgcatcaggtagatcttctccgagatcggcgccgcgacgcgccggttttgcgggtcaagatatgcaacgagattgtcatggatctgtgtgccgagcgcttcgctgccgtcgctcgccgcatacagtacctgcgcgcctgacggtttgcgatccggatagcagttctggtggatgctgatgagcacggcgttatccgtttttcggatcagttctgcgcgctggtgctggtcggctttctttcgctcggcgatcgtggtggcattgtccggatatgcaatatccgggctgtcgcgtgtcatgacgacttcaatgccggtcagctccgcgatcgcgcgtgcgcgcagcgcgatctgcaggttaatatccgcctcgaccgtcccatttggtgccactgccccgccgtcctccccgccatgaccggcgtcaaggatcaggacccgctttggatcggtccagtttgcggctgcttccgcgcgccggagctgccagtcggcggcaaaccagccgccgaacaccacgatcaacgccagcagcacgaccaggatccgctgatagagtaactttgtcacggcgctcccccctcttgctatggtatgcggcgggaacggacgcttatgacatgctctcaggataccattttgtgcccggcgcgtcaaccaaagcacagaaaaagaagcgcgcggtcgaaccgcgcgcctctcaatattgtgagttactgaagctgcttcaggaagccttccagacgatccatgccggtctcgatgttttccgtcgagatcgcatagctcaggcgcacaaaattcggtgcgccgaagccgctgcccggcacgaccgcgaccaggctcttttccagcagcagctttgcaaaatcatcaccgctgccgatgacctgaccgtcgatctgcttgccgaggatctgctcgagattcatcatgacgtagaacgcgccgctcggcttcaggcagctgacaccgggcatggcgttgatgcggcgcacgatcaggtcgcggcgctgctcaaacaccttacgcatctgctccgcctcgtcctgcgggccggagagcgcctcgatggccgcacactggcacatcgtgcccggtgcaccggtcgagtggctgaggtaattggtcatagccttggccaccagcgccggagacagagaatagccgatacgccagccggtcatggcataggtcttggagacgccgttgatgaggatcgtgtgtgccttgatctcgtcactgagcgcggcgacgctggtgaacggcacgccgtcatagacgagcttatcatagatctcatccgagatgatatacaggtcgtgcttgacgcagacatcggcgacagccttgagcgcctctttcggatagacagcgccggtcgggttggaggggttattgagaatgatggccttcgtcttgtctgtgatggcgtgctcgagctgctccggcgtgagctggaagccctgctcctcactgacattgacgaccacaggcacaccgccgaacaggcgcaccatctcataatagctgacccagtacggggccgggacgatgacttcgtcgcccgggtcgaccagagcggccagcgcaatgtagaccatatgcttggcgccgctggcgacaactgcctgcgtgggctcgtattccagaccgtaatccgccttggcgcggtcacagatcgcctgacgcagctcgatcatgccggccgccggggtgtagcgcgtttttccgtcgcagatcgcgcgcacaccggcataactgatgcggtcgggcgtggcaaaatcgggctcaccggcgccgaagccgataacgtccttcccttctgctttcatcttcttggccagagcgctgacggccagcgttgcggacgggctcacgccggcagcaattttggaaagtgccttcataaacatccctcgttttctttagaattcttgcccatagtttaccacagcattgtgaagaaaacaacgcaaaccttacacaaaacaccagccggaatccgcgtcatttttgccggtttgagaaaaaatctactgcaccgtccgccgatatacacaaagacgcagcgtgatacagcagacaacgataatgatctgtggttgtgtgctgacggttgtacgcatcataatgaccacttatccatctttctggattactcgtgcatgctttgaatgcggaagatattcaatttgtatgtattctcctgcgtctatctcaccatggaaaaggtacactctaaactccgtttcatcttctacattttgtactctcaccaaaggaggtaaaacagcctcattctctttactgtagtcatacccgcttacaataataactgtcgcacgctcttccgttcccgtcagtagacgtggaatatccagcgtaaatggaagcgtgtaagtgatgaccaagaaagccaaccccgcagttataatcaccttcgctatcaaatcgtaagtcttccaatgctttggcctgtctttaatcttccacgcgaaaatactgctttctttttttagaacaaattgcatacccttaatcgccattattacaattaaggcttgaatcaagagtaaataaaaaatccatgctggtttgcttctgataattgaatcaatattatattgcatcacgttcaccatgggcgaatcccgcgccatgcactcatgtgcacaccgcctacgacgagagagaaaaagcctttccgcattacacgactagacatacgtttagcctgatgccttttgatctttgtaaggccagccctgaagactgcattaagaggtcgagccgtcgttgtagatcatggcgaacggctggttgccgtcgtcatacacgaactcgagagacttccatgaccacagtttaccattgcatcagtgcaaattcaagaatcatcatgattcttgatttcaagacacaaatcctgaaatcaaggacagggacaacataaacaggcatccggcaaaacgccggatgcctgttataacgatttgctattctcaaaaaaagcgtctgcaagccggttcccggacaccagacagagctcctgtcacaaaataatacagatcagtgttccgctgccctcattgaccacgcgctgcaaagtttcctggagctttccgaccgctttcgtcggcaggcagctgagcttttcctccacgccctcctgtgcgatcgtgtagatcggcttgccgaaaatattggactgccagagctgctcgacatccccgtcaaagccctgcagcaggaagccgaggatctcgctcgatgcgttctctccgccgatctccggcgagacctctgtctcgatcgtagtctggaacatgtgaatggcttttgcgctggccttgagccggacgccgtagcgcccgcctttgcggacgatctccggctctgcaagctgcagatcaccggccgacggcatgacgaccccgtagcccttgctgcgcacgtcctccagtgcgccgcggatgtgctgatagtcagcctggatacgccccatttccgccagaaacgagatgagctccccatcactgcgcagggaaacgcccgcctgttcgctgatgatgctgtagtacagcgcgcgcggaaatgtgagcacgtaacaaacggccccggtgtccacagagacgttttccacgtccgccgcttccaatagttcgctgtctgcgagcacttgcgccgcgcgccgtgcgtcacgcaggcggtgcagtgacggcatctgttcgcgcagcagtgcatagagctgctgctttgtctcattttcgggtgccaggacgtccatccactccggcatacggaagcaagcctctgtgaccgggaattcatacaataccgagcgcaggatctccagaatatcctgctccgtcagctccagacagttgaccggcaggcaggcggcatcgtactgctcgcgcagctgagccgccaatgtctgtgcggcctcccccgccggatcggccgtgttgagcaggatgagaaacggcttgccgatgtcctgcagctctgcaacgatgcgcgcttctgccgcggcatagtcctcccgcgcgagctcggtcacgctgccgtcggtcgtgacgacaatgccgatcgtcgagtgctcgcggataactttgcgcgttccctcttccgccgccacgcgcatggggatctcgtgatcgtaccacggcgttgtgaccagacgctcttccccgttttcgtactgaccgtttgcgccggggatcatatatccaacgctgtcgatcagccgcacggaggcgcgcacggaagcatccagctcgatcgagacggcatcctccgggacaaacttcggctcagctgtcatgatcgtccggccggatccgctttgcggcagctcgtcgcgcgcacgctcccgcacgtaatcatcggaaatattcggaagcacgagcgtttccatgaagcgtttgatgaaggtcgatttcccggtgcgtaccgggccgacaacgccgatgtaaatattcccgccggtacgggcggcaatgtctgcgtaaattgaagaattgtccattctgtcgtcctctcctcatcagtcttaccaaaactgtatgaggtccgggacgagaatatgccgccggcagcgtgccggcggcatacgttatggacaatatgtctgtgcggtctgatggagcacctgactgacggtgaatgtaacatccgggaactgccgctgaagtttctcctgcaggaccgggatgaccacattttccgtgcagaagtgatcggcgtcgatcaggttgatgccaagctcctttgccgcgaggaagcggttgtacttcacgtctgccgtcacgaaggtgtcgcagcccttcgcagccgccagatccagcatattcccgccggagccgccgcaaaccgcgattctttccactggcaggccaccgtccacataccgcagcccgttgacgtgcaaacgtccggcaacatagggcagaaattccgccatggtcatggggttcggaagcttccctacacgtccgcaggtaagcgtgcgcccgtcggccgccgtaccggccggctccaggccgcccgtgacctccgcgcccagcgccgccatgagcgcatcattgacgccgccgtcggcaatgtccagattcgtgtgcatacagatggctgaaatgccgtgccgcgccatggtcagcaccttgcgtccggcgagatcatccgtcgtcgcgtgccgcagcggcgtaaagatgagcgggtggtgcgaaacaatgagctgcgcgcgcagctcgatcgcttctgcaatcacggcgtctgtgatgtccagcgccagcagcgcattttttaccgcagttccgccgtcaccgaccagaaaaccggcgttatcaaaatccatctgataccgcaccggcgcgatctcatttaagaaagcgtagatgtcattgataattaccatgtctgtacctccttcaggcaggtttgcagctgcgagagccgcgcgtcgatcgctgccagttccgccgccggcgtttgctttgcaagcgccatgccggcgcgtgcgcgcgtttgccgccggatctcttctgtgaggtgctccggcagcagcggatcgcggcggcgaagcagcagccgctccaccgtgtatgtctgcccggccggctgtccaagcacgcgcagggcaagatagcgcttgccggcatcgcggcagagggctgcgtcctcgatcgtaaaaccgttgtgccagagccagtccgtcagttcctgcactttgctctgcggctgcaaaacgagccgttttccctgccgcagccacggtgtggccgtcaggatcgcacagatcgtttccccgcccatgccggcaatggtgatgacatccgctgcctgcgcgtccggaaattgcagaccgtccgcctgcacgaaccgaacgcgctcctccaagtcgtaagcggcggcggacttccgcgcattggcaagcggaccgacatggatgtcggccgcgatggccgtttgaacgactccattttgcagcagccagaccggcaaatatccgtgatctgtaccgatatccgcagcgcaggcgcacggcggcacgaagtccgcgaccatttgcagccgcggtgatagacgaatggaatccatacatactccttcggaaacgccaaaagccggcgtaccgccggcttttgatccatgtctgtatcttacaggctctccagataggtgcgcagctgctcgaggaactcgtccggatccacgtcgtgtgcaaggcaagcctgctccagcgtctcgccactggccatggcgcagccgaggcagtgcatgccgatgttctggaacacgggcatggcctccggcgcattggacaggatctccgaaatcatcgtatctctggaaatttcaaacataatctttttacctccggtagtttgcttgtgagaaaatgattgggtcgcacgaagcgccccaatcattttaaccagtttatctgctgattagtgctgctctctcatcttcgcgaagcactcgctgcagtagacaggacggtcagacttcggctcaaacggaactctggcctcgccgccgcaggcagcgcaggtagcagtgaagaactcgcggggaccgcgggcggcgttcttgcgcgcgtcacggcaggccttgcagcgctggggctcattctggaagcccttttccgcatagaattcctgctcaccggcggtgaaaacgaactctgcgccgcactctttgcacttcaacgttttgtcttcgaacatgataaatcctctcttttgaaaaacttgcctctcggctatattgcgttcagctcttgctgaagtcgctgaaattggggagccgcgccagtttgcggcggatccgctgcacggcattgtcaatggatttttcgggtttgttcgtctcggccgccatctcggcataggaaaggccggacagatacagccgaagcacccgcgcttcaaacgctgacaaataccgggtaaatgcggacaatagctcttgttcactctctctggccagaacctgctcctcagtaacacgacaatttgcttccggatagctggacgcctgggtctgtgattcttctgagaggatgctgtctagggaaatgccgctgttgagcggagaatgcttctgtctggaagcggacttgatggcactgtaaatgcggttgctgatacaaacctctgcaaacgctttgaaaggcacattggatgccgggtcatactgccggatggcagagagcaggccaagcattccttcctgaatgagatcctcgctgtcaccgccgatgagaaaaagcggccgcgcgcaaatgcgcaccaggcggctgtagcgctctgcgagggcttcctccgcgtcggcattcccggcactcaccagtgccagcagctctgcatcagacagtttggaatcatccatcataaccttcaaaactccaataccactcaaaacaaattataactaaaaacgttgaaaagtcaatacatttttgtacaaaatgcacgtttcgatgacattcagcgcttttttcagagatctatctcctgctggccgatgtattccaggccaagatgctcataagcacggcgtgtgacgcagcggccgcggggcgtgcgcgtcaaaaagccctgctgcagcagatacggctcatagacgtcctcgagcgtcacggcctcttcgccaatcgtcgccgcgagcgtttccaggccgaccggcccgccgtgatagaattcgatgatactgcgcagcatccgccggtccgtcgcatcgaggcccatctcgtccacttccaggcgcagcagcgcggcgttggcgacctctttggtgatgacgccgtcggcgcgcacctgcgcatagtcgcgcacgcgcttgagcagacggttggcaatgcgcggcgtgccgcgcgagcgcgaggcgatctcatacgcgccggcactgtcgatctccaccttgaggataccggcgctgcgctctacgatcttctgcagctcggccgggctgtagagctccagacgcagattgacgccgaagcggtcgcgcagcggagcggtcagctgtccggcgcgcgtggtcgctccgatgagcgtaaagcgcggcagatccagccggatcgaattggccgacggccctttgccgatgatgatgtcgatcgcgtagtcctccatggcggggtaaaggatctcctcgactgcgcggttgaggcggtgaatctcgtccacgaagagaatatcatgttcctgcaagttggtcagcagcgccgccagatcgccggccttttcgatcgccgggccagaggtgatgcgcatgttcacgcccatctcgtttgcgatgacggcggccatcgtcgtcttgccaagccccggagggccgtagagcagcacgtggtcgagcggctcgccgcgcaggcgcgccgcgtcgatgcagacctgcaggttctctttcgctttttcctgaccggtataatccttcagcagccgcgggcgcagagagccctcgccggaatcctccggaagcacgcaggaagaggtgacgacctcctgctgggcgtcctcggaaaaactgatactcatatacgctccctcccctgcttactgctgcatcatggcgcgcagcgcggccttgatgatctgatccgcgctcatgccctcaatggacggcagcgtgcgcagcgccgcattgatctccggcatgctgtaaccgagcacggacaggccggcgatcgcatcgctgcgcgcggccgaggccgcgtccgatgcgggcaccgccggcgtcagatccgcaaagtccacgcttgcgctctccttggccatcttgtccttgagttcgagcaggatgcgctgcgcaatgcgcttgccgatgccgggcgcactcgtgagcgccttttcatcgccgttgagcaccgccaatgccagtccgtccggcgtgttggatgaaaggatggacagcgctgccttcggtccaacgccggagatgccgagcagcaactcaaagcagtgcttttcgctcttgctggcaaagccgtagagatcatgtgcatcttcgcggatgcactcatacgtatagagcttggcgcgctcgcccgttctgacgctgctgatcgtgttcaggctggcgttgagcgcatagcccacgccgccgcactccagcacgaccagattcggttcgatatcggtaacgactccgtttatatggtagaacatggatcaaatctctcctgttgatggatcaaagatgtggcgctgcgcgcatggcagagcgcgatagcgacggcgtccgccgcgtcgtccggcttcggcacggcctgcagggacaggatgcgacgcaccatgtccatgacctgctttttgtccgcacggccataaccgacgaccgcctgcttgacctgcagcggcgtgtattcatagatctgcagcccggcctgatagcctgagagcaggatgatgccgcggccatgggcaacggcgatgccggtcgtgatattcgtattgaaaaacagctcctcgaccgccatcacttccgggtgaaactgcgcgatgagttcattcaggtcgcggtagatctggtcgagcctgctggacagctgcgttttggccggcgtcgtgatcacgccgcaggtcagcagtcgctggctgcgcttttccgcgtccagcaccgcgaagccgaccgtggcaatgccggggtcaacgcccaggatccgcatatgcatcactccaattaaataaatatagcatattttcgccccgtaggcaactgccgggaaaagaaaaagcgccccgagtcgtttcggagcgcttgaaaacacgtatgtcacgcacgcgggtgcgctttgttgtagacatccttgagctgcttgctgacaaggtgcgaatagatctgcgtcgaggagatgtccgcatggccgagcatttcctgaatggcgtggatatccgcgccgttttccagcagatgcgcagcgaaggaatggcgcagcgtgtgcggtgtgatcgtcttttcgatgccggccttggtctgatagttcttgatgagcttccagaagccctgacgcgacatccgttccccgctgacgttgacgaacagcgcctgttcatccggcgctgcgatcatctgcgggcggatgaagttgatgtactccgtgagcgcacggacagccgccggatacatggggatcatgcgcgctttatcgcggccctggcagcggataacaccggcggacagatttacatccgtaatgttgagcgagatcagttcactgacacggataccggtcgcatacagcagctcgagcatggcgcggtcacggtagcccttggcgtccgtgcactccggctgcgccagcagcagctcgacctctttgctcgagaggatctgcggcagcttctgcttggccttgtccggtacgagcttgccggtcggattgtgctgcacatagtgattgttgagcaggaacccatagaaatttttcagcgatgcgatcgcccgggaaaccgtggcaacggacttgccgttactgcgcatccagtcgatgtattcacacagctcttcctcttccgcggagccaagatcggcatccgtgtgtgcgtgcagatattcgctgagttggcggatatcccgcagatatgaggaaatcgtattttgcgacgagcgcttgacatcgcgcaggtaggactcgaacaattccattccgtcggaatcccgcatgacgacttccccctttccaatcagatttcatccacagtgaccacaggtcacagaataagccgtgtgaaaaacggtactgcatagcacgcggcggccgcagccgccaacagcaggcagaacacaagcgccagctcccgggaatatcgctccgatgatacggggactggcaggccgcgccgctgctcgagcagacgcacagacatctgcgcgcagagcgttccgagtagaaacagcgccggcacaagaaaaatgccgggcagaccgactgcgacgcaggagagccaaaacgcatggtcgcagccggaattcaggaaggcggccgccgtacaggcggacaaaaaacctttgatcccgaaaacggccggaatcagcaaaaaaccaagatacgacgtagacagcagcaaaaacgcaaaaccgtaggcgcacgagacgcacagctctgtcagcaagccgccgtacagcgtcccacccgcgccgctgctgctcaaaaaggaaagaaccggatttgacggctccggcagcgcagcattggcgccgaagcagcagccgatcacatagcccgccgccataccgaccgcgagcagcggcggcagcggaaagcgggagacggccggtttccggcgcacacgcaatctgttatgtcgcacattcatcaccactgacagcctatgaacatgcgctcataacatgacaatttacataatgcgttgtagacataatataatacaaatcgaaaatgttatcaagtagttcgtcagaatttgttcatttttgtttattatgacaagaaattatgttaacaatattatgtaaaccacgtaactgagcagaaagagatgcccagtatttccagcggtatatgactatatttcggtaatcattgcgtatctaacgcaatatataggtaatcaaacgatgattatgtaaaccttctgcctgattaccaaccgtaatatctcttctgtttccgttttttcttctttgttctatttcgtaactttttatgaaaaatgcacgaaccgacgatcgcagcagccagcgcggtcagcagcgtcatggcggtagcggcgcagaaaacctgcgcgccaacggccgccttcaggatgagatatccgatcgcccacaccgcccatgtcatcgctccgccaagtgccctcccctgctccggccgcggcgagagcgcgccggcagcaagacacgcaagcccgcagcacaccaacgcagcaaggcgcacatctgagccgggcagcacatcgtgattcatggccagcgcagccagccagctcaagagcagcgcgagtccaagtccggccaggccggccgccgccgcgcgcgagagcatcggcagccatttttgttccgtattcaaaaaaacaccccctgcagaacgtatgcatcacagcatattcctgcagggggtgaatcattccgaaagcagcgttacacctcggggcccttcggctcctcgtgcttcggctcttcctttttcgcttcttttgctttctgcttggcagccttgcgatcctgagcttccttggcagcctgcgcctcggcgcgggcgttcgtggaaatggcccacttggcaacctggatgcgaacctgatcctcgctggtctcgaaggtcacgctgtcgtccgtgacgtggacgactttgcccatcataccgccgatcgtgacgatatcgtcaccgactttcagattggaacgcatttcattgagctttttcttcttcttgttctccggaaggatcaggaacagatagaagatgacaagcatcagaacgatcatgataatggatgaatatccgccagagcttcccatggttttacctccgtataaagataaagatattatatctgctttcctatgcaaatgcaagcattaaatgcgcatatcgagtacggatgtgtaacttttccggaacgcctcatactcccccgcctcgatcgccgcgcggatgcgctgcatgagcgtattataaaaatacaaattatgcatcacggcaaagcgcatggccagcatctcttccgccttgaacaggtgccgcagataggcgcgggaataccgccggcagaccgggcagtcgcactgcgggtcgatcggctgctcatcgcgctgatatttctcatttttaatgttgatgatgcctgaccacgtgaacagatgtccgtggcggccgttgcgcgccggcatgacgcagtcgaaaaagtccacgccgcgcgcgacggattcgatgatgttccccggtgtgccgacgcccatcaggtagcgcggcttgttggccggcatatagggctcgacggcagcaatggtatcatacatctcctgcgtcgtctcccccaccgcgaggccgccgatcgcataaccggccagatcgaggtctgcgatcttcttcatatgctcaatgcgcagatcgtgaaaaatggtgccctgattgatgccgaagagcacctggccgggattgacagcatcgtcacggccggtgtaatccgtgagcgccgccttgcagcgctgcagccagcgatacgtccggtcgcaggagtttttcacgtagtcgtacggcgacgggatcttgatgcactcgtcaaacgccattgcaatatccgagccaagattggcctgaatgcgcatgctctcttccggccccatgaaaatgtgccggccgtccacatggcagttgaaggcaacgccttcttccgtgatcttccgaagctgcgccagcgaaaagatctggaatccgccgctgtcggtcagaatcggtttttcccaggtcatgaatttgtgcaggccgcccaggtcgcggatcaattcgtcgccgggacgcacgtgcaggtggtacgtgttggacagctcgacctggcagccgatcgtctccagatcctccgccgagagcgcgcccttgatggccgcctgcgtgccgacattcataaacaccggcgtctgcaccgtaccgtgcggcgttgtgaacgcgccgcggcgcgcatggccgtctttgcaaatcagttgaaacatagtttgcttgcctttctgtttggattgcctacttattctaacagattgcagcatcaagtcaagcgttcccggaagatttgcgtattagtgggccagcgccttctgcacacgccttttcagcgcctccaggcccagcatcacggcaatgccgagcgcgaaccagaggaggtgaaaatcaggtgaaaatcagatattgtcatagcgtgctgcggcaccttcagtgtcgtcgggccgacgatgatcgcatagagagagccgagcatcatgcccaacacggcataggtgacggcgcccggcgctttgcgcatccagccgcggatgcaatgcggagcaatggcaaagcccgcgagcaggcccagcccaaccgccgccagcagccggaactggccgaactgaaattgcagcaggtctttcattgccgcgatcacgggcagacagagtccgcacgacatcagcagagacgaaccggagatgcccggcagcaccatcgccgagatcgccagcgccccggccgcaaacgcatacagcgccgtgccgatgccgaagccgaggtcgttgaccagcgcggacaaacgcagcgccgagagcccgacgaccagcacaaggccgcccagaaacggcagccagttttcccgaaacgcgccaagcacggcgccgctgaggtctacatagcagtcatagcgcatccagtcggtgtggaacgtgagctcggcaagcgtgccgtcccgttcgaaaaggcgatcccgtcggagcagaagtcggtcgatctggagcatctgtcgcactggctggataagtacgacggcaagtatgcggtcggcgcctgctcctgccgccggtcccgcagagtgcgcgatgagggctgcggccatctggaagaggacatgtgcattaccgtcggtgacatggcgacctacgccatcgagaccaataaagcgcgccctgcaacgcgcgaagaggtcatggagatcctgcagcgcgccgaggaaaacggctttgtgcaccagatcacgaatattgacggcaaggacaagatcctcagcatctgcaactgctgcgtctgctcctgctacgcgctgcgcaccagccagctgttcaacacgccgaatatgtccgcatccgcttaccgcgcgcatgtcgatccggaaaagtgcgttgcctgcggtcagtgcgccaaggtgtgcccggcgggtgccgccaagctcgggcagaagctgtgtacgaaggaggggccgatcgtctatccgaagcaggtgctgccggatgaggccaaatggggcccggaaatgtggaacgaaaattaccgagacgacaatccgtccgccaactgctatgacaccggcaccgccccctgcaagagcaactgcccggcgcatattgccgtccagggctatatccgcatggttgccgaaggccgctacatggacgcgctcaagcttatcaaaaaaagagaaccccttccccgccgtctgcggccacatctgcgacggcctcacgcttcagaccgcacagccggacatctttgttggcggcgatgtggccaccgggccgaagtttgtgatcgacgccattgccgccggcaaggaagccgccatttccctgcaccgctacgtgcacgagggccagagcctgacgatcggccgcaaccgccgcgtgtatcccgagctggacaagcgcaatgttgccctgccgacggcgtgcttcgacgcgccggtacggcaggtgcctgcggcgctctccggcgcggaagcgcgcaagacgttccgcgacccgcgctgcacgttcacggaagagcaggtcaaaaaggaggcgtcccgctgccttggctgcggcgtgagcgtcgtcgataccaaccgctgcatcggctgcggcgtgtgcgtcgtcgataccaaccgctgcatcggctgcggcgtgtgcacgaccagatgcgagtttgacgccatccacctggccgcgatcacccggaagcgaccaagatgatccgctccgaggacaagatgaaagccattctcccctacatggtcaagcgtgctgccaggatcaaggtcaaggaactgcgcagcaaacgcagctgaaaccgttgttcataacagacgtatccccgccgatgccttttcaggcatcggcggggatatccctttaaaaagcagcgcgccccggccattttggccggggcgcgcttgcattgctgcatattactcgatcgtgatggtcgtgtgcttcggaagctccttcggcgcagccttcgggacgctgatcttcagaatgccatcctcgaacttcgcggagacatctgcggattccacatcgtcaccgacatagaagctgcggctcatggagccggcgtaacgctcctggcgcaggaacttgcccttcttatcggactcgtccttgtccagacccttggcagcgctgatcgtcaggtaaccgtcctgcagatcgaccgtcacttcatccttcttgaagcccggcaggtccacgtccagctcatacgagccgtccagttcgcggacatcggtcttcatcagatttctggcgtgcttgccatacagctcactgctgacctgcggcatcatacggccgaaatcaaagaaatcggatagcgaatcatcaaacaggttttcaccaaaaatgctcggcaacataagtcattcctccattcatacctttcgtaggcgctggggaaaaactccacgcgttggcgaactctgttaccgtttgtacaacaatgcctgatctccggaggccctctggaggccctccctcatcgatcgtcttcatcatagcacgctttttagcactgtcaataggtgagtgctaacgttcacaaaaggcactatgtttgttcacaaaatatgcaacaagatacctcaactaaatttccaacgccgcttggtgctccagcagccagtcgatttcccagtcgatagagtgtatccctaccggtatctgctccagcgggcagccgacatagctcaggcgcagcaaatgctgcgcgcggccagatgctgccgcagcgcctgcgtgtcggcggatagcgcaggagcgcatccggccgctgctgcgcgagctcgtcggccagcgcgacaaattgccgcgtctcctcccgcgtcgccagcggcgtgctggtggcaaaatcatagaccggcccggtctccgactgcccggcctgaaaactgtagagcaccacgccgtcggcaaagaactcgaaattatccagcggcaggacataacacccgctgccctgacagcggcggatataaccgttggcctccagcagatcatacgccttttccaccgtggcgacgttgacctggtatttccggctcataaaccgatacgacggcagcggctgtccggccgcgatctcgtcggagaagatctgtgcgcgcagctgcgcatagatctgctgatacaggcgctttgcgccgtcgcggactacgcgcatgcgcaggatccggactgtctcgtcatcgtggacaataccttttccacgccgctgttggtgcagccgctgaagctgggcgcggatgtcgttgtgcacggcgcgaccaagtatctcaacagccacggcgacgtggtcgtgggcttctcggcggcgcgcaaggagatcatggaccagatccgcatggtcagactcaaggacattacgggcgcagtgctcgggccgcaggaggcgtttttgatcctgcgcggcctcaagacgctcaaggtgcgcatggacgccgtctgcgcaaacacgcagaaagtggtggacttccttgccggctccaagtatgtgcagaaagtgttctatcccagtctggagaaccatcccgatcacgccgtggccgtccgcgagatgacgcggttcggcggcgttgtctcgttcgagatgggcagcttcgaggaagccaagaaggtgctcaaccacgtgcatctgtgcgcgctggccgtcagcctcggcgactgcgggacgctcatcaagcatccggcttccatgacgcactccgtgtgcacgaaagaagagatcgaggccgccggcttctcggatcgcctgatccgtctggcggtcggtctggaagacaccgatatatcatcgccgatctgcagcaggcatttgaagctgcgcaaaactgaaccgatacagcaaaaaacaggctcgcggccgcgagcctgttttttcattttcttactcagcgccgccggcatcgaggccatcggcaatgaacatggcgtcgccaaacgagaagaaccgatagcggttttcgacggcgatcttgtatgcgttgaggatgtgctcccgcccggccagcgccgacacgagcatgatgagcgtgctctccggcaggtggaaattcgtgacgagcgcatccatgcacttgaatttgtagccggggtagatgaagatgtccgtccagccggactgcgcgcggagcgttccgtccgcatccgcaaagctctcgaccgtgcggcaggatgtcgtgccgatgcagacgacgcggccaccattggccttcgtctcgttgaccatgcgcgccgtttcctccgggatgatgcaaaactccgagtgcatcgggtgatcctcgatctcgtcctccttgacagggcggaacgtgccaaggccgacgtgcagcgtgacatagccgatcttcacacccatgtccgcgatccgctgcagcagctccttcgtgaagtgcaggccggctgtcggcgcggcggcgctgccaagctcgcgggaatagaccgtctggtagcgctcctgatcctgcagctctgccttgatgtacggcggcagcggcattttgcccagccgctcgagcacctccagaaagatgccgtcatagtgaaactgtacgatcttgttgccgtcggcgatcgcatcgacgaccgtagcggtgagttccccgtcgccaaacgagagcgcagtgccgggctgggtcttgcggcccggccgggtcaggcactcccacttgccgtcgccaaggtcgcgcagcagcagcacctcgaccgcgccgccggtgctgcggtggccgagcaggcgcgccggaagcacgcgcgaatcgttgagcacaaggcagtcgttcggacgcaggaactgcggcagctcgtaaaagtgatggtgtgcgacagcgccggtcgttttgtccagcgtcagcagccgggaggcatcgcggcgctcgagcggcgtctgcgcgatgagctcctccggcaggtcaaaataaaaatccgattttttcatgctacataagctccagtatagtagaaactgataatctcttcataggttttgccgtgttcctgcgccatggccttggccccccactgactcatgccgcagttgtggccatagccgccgccgacgacagaataagtgtccgaggcagcgtcatactccacggtaaagtggcggctgttatagcgcaggccgcagacgcttgtcaggaatgtgcgcacggcgtctttgctgtaggttttgccgccgaccgtcacggtcatggcattgccaatgggcgtataggtgatggagacgtccccgacggctgcacgggagatggtcgtgctccagctcttgcagtaaaattcgatgtccttctcatacggatcgacgacaccgcgcaggtacggcaccttggtcacccagacgttttcggagtcctcggtcgcgccgccgtccgccgcaaagtagaacgtttcgcacagcttgccctcatagcggacgaacttccctgccgtctcatccacggcgcggtcactgttcgctgatgcgtcaagtgtaccgtaatagacctggctggtcgttgtacctgtcacgtcaaagccgtaggccggcgagccgttcatgtgggaagcgacataggtgcgcgcgcagaccgcctgcgccttgagcgcctcgagcggccagccgctgctcatttcatacggcgtgacgcccttgacatagggctccagaccgacaaaattcaccagcgtgagcttctgcggttcctgtgtgctgaggcgggtaaactgaaaatcgccgtaatacgtgcacgaccggctgccgttgcgctccttgcactcggcaacctgcgtgatggcagcaccgctgccgttctgcggtgcaagcgagagcgagcgggtcgagccgcagtcgaagccgaacaggatctgctccgtgctggccttcacgaccagcacactgcgtgcgccgccggagacaactgtcccttgccccgccggtgcatcgtccgcgctccggtaactgccgatgcgcacgcggtagctgccgttataatacaccggatagccgccgcagctgttggccgctgcctgcgcagcgtcaaagctcgcataggtatcgccgagctggacatgataagcgccgaacgcgctgtccccaaccgtgacgttcgtatccgcaataacggtgacggcgctctccgccgtcgaaccgacggactggaacacacgatcggagtcatagtatccgaaggcgaagccggaaccggtcttgatctgcagatggaccgcatccagcgccgtcgaaccgaaggccagaccgacgcggacgataccgtttggaatgttcggctgctcatcgtcgtattcactgccgccgagcagctgcgtgccgctcgccgtggcggcatagacgccgcgctccggcagcttcgccgtgctgccgtccgcgccgatggcatacgcatccgccagcgccagcgtgttttctccgtcattgacgtaatactcctgcgcgccgaaggccggcacacaggggatcgcagccagcatgacggcggcaagcagcgccgttatcactcgtttcaggcttgatttcatagcgcacctcgctgtttcgtgagagtggtcatacgcaaaatatgacactttattataatgattttccgcgcattatgcaagtgcttttccatggtaaaacgcccccggatgctccgggggcgttgaaatgcaaattaaaaatgcaggaacattttcgcaatggaaaaatagatcagcagcgacacggcgtccgtgatcgtcgaaatgagcggacttgccatgacggccgggtcgacgccgatcttttccgcgatcatcggcagcagactgcccacgacctttgcgaacatgaccacgaacacgatcgtgcagcagacggtcgccgcgaccggcatcgtgacggcgatgttgcccagcagcagccggtcaacgagcagcatcttgataaagttggccgccgcgagcgagacgccgcacaaaaacgcaacgcgcagctccttccagatcacgcgcagcgcgtccgacggagaggtatcgcccagcgacaggctgcggatgatcgccgtggatgactggctgccggagttgccgcccgtgcccatgagcatgggcatgaacgacgcgagcgcgacctgcgtggccagtgcgtcctcaaagtgcgtgacgatcatgccggtgaacgtcgccgagagcatgaggaacatcagccacgggatgcggtttttccagatatccacgacgctcgtgcgggagtagggcttatcggacggcgtgataccggccatcttttcgatgtcttccgtcgtctcctgctccatgacgtcgatgatatcgtcgaccgtgacgataccgacgagacagccttccttatccacgaccgggatcgcgatcaggtcgtagttggagatcatctccgagacctcttcctggtcgtcggtcgtggaggcatagatgacgttcgtgtccatgatgtcttccaggatcacgtcatcgtccgacagcagcagatccttgacggtgacaacgccttcgagcttgcgcttggccgacgtgacatagcagacgtagattgtctccttatcctcgccgatcttgcggatgcgggcgaacgcctcgcgcacgctcatgtattttttcaggtccacaaactcggccgtcatgatgctgccggcagaattctcgggatatttcaggtactggttgatgaggttgcgcgtggcaggcgtcgccgtgcgcatgacacgcttgaccacattggccggcagctcctccatcatgtcgacggcgtcgtcaacatacagctcttcgatgatgccggcaagctccgtatcggtgatggagttgatgatcgtctcctgctcctcgacctcgaggttggcgaacacggccgccgcgatctccttggacaggatacggaacaccatggccatccgctgcgggttatcctcccacagctcgccgaggaactcggaaatgtcaaactcgttcatctcgccgagcttttggctcagcgccttcatccggtgctgatcgagaagtgcaaagagctcgtcgtgcagtgcctcgtaatcttcgtattcccggttctgatcgtccatctctctgcccctcctttccgtccggtctcaaagcatcaaccgttcaggtattctttctggctacagctcaggctgtcaatggaaacgcccatagccttgagcttgcggcgcgcaatgttgtcatcgatttccgcggggaccgacacgacgcccggtttcagctggccacgcgtgcgcaccagatactccgcgctcatggcctgcacggcaaagctcatgtccatgatctccgccgggtggccgtcgccggccgccagattgaccagccgcccctgcgcaatgacatagatcgtcttgccgttcggcagacggtaagcatcaatattgtgccgcgcctcatagatttcatccgcgcagcggtcgagcgcctccatgtcgatctcgacattgaagtgtccggcgttggagacgatcgcgccgtccttcatccgctcgcagtgctcgagcgtaatgacgtctttgcagcccgtgacggacacgaaaatgtcgccgatggcggcggcatccatcatcggcatgacctcgtagccgtccataacggcctcgagcgcccggatggggtcaacttctgtcacgatgactttcgcgccgaggcccttggcgcgcagggccacgcccttgccgcaccagccatagccgctcacgacgacgtacttaccggccacgacgaggttcgtcgtgcgcatgatgccgtcccacacagactgacccgtaccgtagcggttatcgaacaggtgcttgcagtcggcgtcattgaccatgatcatcgggaaacgcagcgttccggcacggtccatgatccgcaggcggtggatgccggtcgtcgtctcctcacagccgccgatgacctgcggaataagatccgtgaactccgtgtgcatcaggtgcacaagatcgccgccgtcgtcaatgatgatgttcggcccgacggagagcacgctgcgcaggtgcgcctggtattcttcgtccgtgcagccgtagaccgcgtgcacgtccatgcccttcgccgccagcgctgcggcaacgtcgtcctgcgtagacagcgggttggacccggtgacgtgcatctccgctccgcccatctcgagcacgcggcacaggtaggccgtcttggcctccagatgcacggagagtgcgatcttcaggccggcaaacggcttttcgcgcgcaaaatcgctgccgatatcgcgcaaaacaggcatatgtgcttccacccagcggatcttccgctcaccggatggcgccaggttcaggtccttgatcgtgctcataaagtaacctcccgctgtaaaaatcgtttcaggcgctttattctaacactttcgtcaagcgttgacaaccggtttttccgcagaaaacgacccggaggatgcatatccctccgggtcgcaggagattcgtaccatcaccagccgcagtacaggcagtatccgatgcccgccgccagcacgccggcgacggaacacagccagatcagcagaccggtataggatttttgccgcggccgtggcgtgggcgctgccggtacatgtccgacggcatcgcgtgcctgctgcaccagatccgccgccgtgacgccgccgctggcggcatcatcgcgcacgatgtaaatgatctgctcgaacagcgggctttcggctgcatcgactacgacgacgcggcgcgaaacgccgtgggcgaaggcgatctcgtccgcgtcagccggcagcgggagcggctgcacggcgtccggtctgcggatgggcttgttttttcgtttcatcagctgcgcacctccacttttaccgccagggcggtcatgtcgtcgctgcgtccgtattcgcggatcgccgcgcgcacgacgctgcccgccagcgttttcatatcacggtcgtccgaatcgctcagcagcctgcgcagccactcgtcgcggccgtcggagacaacgccgtcgcttgcgatcacggccacgctgccgggcttgagatgcatgtgcagctcgtccggcgctttgccgctctcctgctcgaggccgggcgcgaaggacgtgcagcgcagttttttgagcgcgccgccggacttgacatacgtcggcgcagcgccgtacttataaaaatccgcctcaccggtgaagagattcatgcacatgagatccacggtggcatagccccagttctccccgtcgcgcaggagcatggcggagttgagcagcttcatcgccagcgccgggctgacgccggagcgcaaaaattcctccagcatgccgaccgtgctgatgctgccgtcggccgccgtctcgccgcagcccatgccgtcggacaggatcacgcacagctgccccgcgtctgtcttgaaatacgtgccgcggtcgccggagactgtctcccccttcttgcgcatggacgcaatgccaacggagacggccagcggctctgcctcgagcaggagcaggctgtcgtcacgcgcggcgttttccggcatgcacaggcgcacgcccagcgttgccgagagcttgtccagatagtccggcagttccagcagcgggcgcagatagcggctgtcgatcgtcacgcgcaggcggcccgtgctctcgcggaacacagctgcgtccgcttccacaccgatggtgcgaagccagcggatcaggcgctgctccgccagtgggtcagcgccgtagctgctgtcgagctcacgggaaacatttgtgagcacctgcgcaaagtcggcatactgctcccagagcacggtgcggttttcctgcagcgtttcctgcatccgctgccggtaggcacgcaggcgcagctcgccgttgacgacctcggtatactcgtgcagatggacgcagcggtcacgaaagtacggcgggaaatcctccggcagcagccggccgcgcgcctgaatgcggcgcgtgacatcgttcatgatgttgagcgtatcaagcgcccggcgcgtccagcactcctgctgcagcttgcaccggcagcagacgcggtcggccgcgcggtcaaagactttcgccacatcggcatcattctctgccgtacttgcagcctgacacgccgtgtcatgcagttgctgatacgcatgcgccacgccgcctacgcgccccgcgacatagcggcgcagaccggactccccgctcccgccgcgcagcggctgcaaaaacgcgccgaccgctaccacgaacttcttcgggatcaccagatatgcgcccatggcaagcgccagctccacgcccgcgccgatgcgcagctccggaagcgggatgcaaaacagcgtcagcaggtacgccgccgcgaatatgagcagataaaacccacgccgatgcttgcaaaactgcccggacagcagcccggcagcggcatagacgaccgagaacaggacgcccgcaccggcggccacgtccatggcgatgccgaggatcagcccggccgatgccccacacagcgcgccgcccgtcccgctgaggatgagcagaatgagcaccgagagcgcccggccgaccgacagcgtgtcgaacagcagcagattgttcacgcccatgagcagacacgccagcagaaacacggtcgagacattgcggcagatctccgcattgaccgtgcgcggctcctgcgcgcgcagcagatcgtcaaacccataggccgatgcggcgcacagcagcaaaaacagtaccatgcgggacaccagcagcagcgacaggccgcccgtgagcagacacagcaccagccgcgtcagtatgtaagccgccgcggagacagccgacggataccagcgcgtctgcacaaacggatgactgcgcagaaaatatgccgtcagaaaaatcaggcagcagccggcggcgagctgcgtgccggtcgcaacgccgaaggccgcaaagtagccgagcgcgcagccggcaaggcacagcgcgccgccggagccataccccatcgccgccaggaacgccagaccgaacggcgccggcgacccggcgatatgcgccgttgacaggatcagcccgagcgcaaagctgacgagcataccgacccatttggcattttcacttgccggcagcagcccgattgggctcggcaaggcgccgggtgcacgcaccggccggtcgtgtcccgcgatcttgacattcataacggttcctcctgacgcaaaacagtttacataaattatagattttcattgttatgaaaactgtcattccacgctgtcgcagaaaatgtctttgcgcaggaatcgtttgcttttgggcgcaaaaaagctgccggccgcaaaccgacagcttttgatgaaattccgttttaatcgcgtgggctcagtccttattgtccgccgggtacaggaggtgctcgccgatgcggaacacgtcgccggcgcccacagtcagaataatgtcgcccgggcgggcaatgcggcgcagctcggcctcgatctccgcaaacgtcgggtaaaacttcgcgcccgggatctgcgcggccagatcggcagaagaaatgccgatggtgtttttctcgcgcgcagcatagatctccgccagatagacgatcgtcgggcggcgcagctgctccacaaaatcattgaagagctttgccgtgcggctgtaggtgtgcggctggaacacgacgatcgtgcgctgatagtcgagcgtatccaccgcgtcgagcagcgcgcgcagctcactcgggtggtgcgcataatcgtcatacagatccgcgccctggaacttgcccttataatcaaaccgccggcccgcgccttcaaagccggcaagaccgtacttgacggcattggggctgacgccgagcacaatggccgcagccgtggcagcgagcgcgttgcgcacattgtggatgccgggaacatggagcgtcacatgggcaaacagatttccccggtgataaatatcaaactcggacgaagagccgcggtgcatgatgttctccgcatacacgtccgccttcgggctgagaccgaaggtgatgaccttgcgctcgatcccgcgcagcgcatccatggtgttgacatcgtcacagtttgcgatcacggtgccggtctcggccggaacgcgctcggcaaactggcggaacgagtgcttgatgtcctcgatgtccttgaaaaagtccagatgatccgcctcgatgttcaaaatcacggcgatcgtcggattcagcgaaaggaacgagttatagtactcgcacgactccatgatgatcgtattgcccttgccgacacggtggcaggcgtgcagcagcggaagcgtgccgccgatcatgacggtcgggtctttttccgccgccatcatgatgtgcgtgcacatggacgtcgtcgtcgtcttgccgtgtgtgccggaaatacacagcgcattcgggtagccgcgcatgagcgcgccccatgcctgcgtccgctcaaagaccgggatgccgcggcggtgcgcctcgtgcacctccggattgtcgtcatgaacggcggccgtgcggatcacgaactcgatatcatccgtaacgttggcggcgctgtggccgatgtggatcggaatgccgcgctcgcgcagcgtgagcgtattgtcgctctcgctcatgtccgagccgcggatgtccagccccgcatcatgcagcacctctgccagcggcgacatggacacgccgccgataccgatcagcagcccggttttcccgggaaccagataatcctgaaaatccattcaaagcaccaaatttcattcaaaatattgtaatgtccggcgcagcgggatcgcccaacgccgcgcgaactggttacagacaggttacagttgttattttcataccggggtattataatacgtttgacgctacattacaatatattttttgccgaaccggccgcaaaaagccggttcatccaagggaaaaggagccagagcgcatgaacgaagcctggaaagaactcaagcaggagtgcgcgcagtgccggcgctgcggtctcggtgagacgcggcatcacctcgtattcggtgacggcgccgaggatgcgcgcatcatgctcatcggcgaaggccccggcgaacaggaagacctgcaggggctgccgtttgtcgggccggccggcaagctgctcgatgatatgctcgaaatgatctatctcgaccggacgaaggtctacatcgccaacatcgtcaagtgccgcccgccgcacaaccgtgacccgcagttcgtggagcagaaatgctgcggcgaatggctgcagcggcagatcgcgctcgtcgacccggcgatcatcgtctgcctcggccggatcgctgcgaccgcactcatcaaagacccgtttcgcatcacgcgcgagcatgggcagtggtttgatgtcaatggccggcgctgtatggcgatctatcacccctccgccctgctgcgcgacccgagcaagcggccggagacgttcgtcgatctcaaagcgctgcagcgggagatctatacgcgctgcccggaggtgtaccccgatgcctgacgcacgcatccgccgcgcagccgcggccgacctgccggtgctgacccagctctggcagaccgccttcggcgatccgccggagctgatcggcgcattttatcatcgctttccgccgcaagcggccgcctgggtcgttgagatgaacggaactgttgtcacggcagcgcatctgctgggcggccggctgcatacggctgacgggaccgctctcccctgcgcctatgtctatgcggtctctaccgatccggcgcagcagggacacggctatgcgtcggcactgatgcgccgctttgccgccgaagcggacgcgaacggctgcgtgctctatacgctcccggcagaagcatccctgtacgcatggtatcggtcggtcatgggtaccacacagactgcccgcggtgcgcggctgcgcatcgcacgtgcgccggatatgcagtgcccgccggtcatcgagcgggtcagcgcgcaggagtacgccgcattgcgggagcaggcactgcgcggccgcgcgcacgtggagctgtctgctgcgctgctggcatttcaggcagatctctgcgatctgtgcggcggcgcgctggtgcgcatcgccagcgggtgtgccgttgcggagcgggacggggcgcagctgctcataaaggagctgctgggtacggacgttttgccggccgttcaggcactgcttgcaggcttcggcgcacaggaggcgcagctgtgtgttcagcggcccgacggcgcacaggcgctggctgcttaccgcccgctttcctgtgcggcttcggatgtgctctggggactttatctggactgagtgaaagtttcataaattagaaatactttttgccttgcttctgtaatattgtcccggtaacattctctatcgaagcaagcaatccgatttcattttatcctcaccccctcaacaaaacaaagcgaaacagcgcagaagtgttcttctgcgctgttttgtttttgcgggaaaaaatatttcttttcggacaccacgcggaagcgtgtccggttactgaacaaattccacaaataatgtgaaaaaatcattgaaaaacagcaaaattttgaacaaaagaaatccccttcgggcggatattttgtttgacaattaacaacaaatccgctatacttcaggtgtatgagtagatatccacatcggcaaagctgtctgggaatcgcgcatatatccaagcatttttgtcgggttttcataaaccggaatgtcaaatcatacaaagtctgttgttgaatgcgaaaaattttaagggggcttgcacatgagagacttgaaacacctgatcgcatttgaaaacctgctccaggaggccaacaacgagttggtccggcaaggaaaggcagacggcaagagagcactgggttacacctgctacttcatgccggaagttctgcttgacctgcccggctgctttgcagtccgtctgagagcgccgaaatgcacttctccggacatggctacatattacatgtccagccgtacctgccattacggccgcagcctcttcgagcgtgcgctcgaaggcggctacaacttcctggacgctgatttcggcaccgagacctgcacggtcacctgccgcttccaggagcaccttggctacatggacgtcatccagaatccggacttcttcgtgacgttcaccgacgtgccgttcaagagaaaccagaacagcatcgagcattatgaaggccagctgcaggcccacgtcctcgatccgctgcacgagaaattcggcatcgacatctccgacgaggccctcatgaaggccattgacctgcacaacgagatcagcgcggtcatcaacgagatcggcgattaccgcaagctcgataacccgaccatcacgggctatgagttccaggtcatccagctctgctcgctggtctgcccgaaggaactgatcctcccgatgctcaaggaaacggccaaagagctcaagacccgcaagcccgacaagaagagtccattccgctgcaaggtcgttctggccggctccgagaacgacgaccccgagttcaccaagctgatcgaaggctgtggcgccgaagtcgtctgcgaccgtcactgctacggtgctgtggagtcccgcgctcccatcgtggtcaaggacggcgagaagccgctgaccgcgatcgcccgccactatctcgagaccagcaactgcccgcgcttcatgccgcaggatatcatgcgcgagcgcaagcagcgtctggccgacctcgccaaggaatacaaggctgacggtatcatcgttgcctccaacaagttctgcgaatactggagctacgagcgcacgatcgacaccatcgtcatgccgcgtgactttggctacccggtctgctccatcgaaaaggaatacatcaacggcgcctccggccagctgcgtacccgcttccaggccttcgtcgagagcatcgaaatcaagaagattcaggagggcaaataatgaaatacgatatgaaagcacttgcccatgatttctggtacggcaagccccatcaggagcgccgtctgggcgatctctacattgacaagaccggtctgtacaagcacagagagtggcgtggcttccccgacaccatgtactacttctataacatctggctgtacaactacgcgcacatggtcatggacgttgtccgctacggcggccttatcaactttgccaagggcgtgtggcgctaccgctgggtcggccagacctacctgccggttctgcactggttcgaccgcggcatggaaggcatgcgtggcgagggcctgaaggcctccgcgtggcactaccgcggcatggtcaacgcgaccatcttccagttccagcgcatgttctcctccgacgccaacctccgcggcggcaagaagaactacagatggcatcacaacgttgcccacaacgagaccgtctggggcggcgtgttctatccctggcacggcaagctgacgaacgtcccgatggagatgatcccgtacttcgtcacctgccacgtcaacagccacaccgttctcaactacatcgacgcggtgcagtccatcggcctgccgggcgatccgtgcccgatgtgccaggcggaagccggcctgttcgtcctcgacgacatgcccgattacgcgccgatcgttgtcacctccaacgaggcctgcgacgcttccgtcgccacctccatcctgcaggactggttcctcgacaagccgctgttcgccatgccgcagccgatgcagtttgacgatccgctgctcaagaagcattgccgcgacgagatcgagcagtgctggaagtttgtcgaagagcagaccggcatcccgtttgactggaattccctggtcaagtgcatcgagtcccagaacgagctgatgaagttcgagtgggagaagtgggatgtcgccgccaagaccaactactacccggtcaacggcgttgcgcaggctctgtaccgtatctaccagtctcagttcggcgatctgccggtctggcatgaggtcgacggccacgtccgcaagatcctcaataagtgcgtcaaaaagaagatcaacagcttcccggagacccgccacagagtgctggcatggtcctgcgcgccgctgtactactccaactggtgcacctgggcgtataactgctggggtctgaacaccgtcatgaacatggactctctgatgttcaacatgaccatccgcaccgacagctatgaccactgcctggacgacatggcacagtatcacatgtgggctccgatgcgccgtatggccgtcggcggcctgcaccacatctttgagtgctggaagtacatggaggagttcaactgcgacatggtcatgatgtacgatcagctgcagtgcaagggcatgcagggtgtgcacggcctgttcgaggacgagttccgtgatagaaacatccatgctatctggatgccgcacgcgctgcctgacagccgcaccgtgtcccgcatggagatccgtcagatcatcaacgactacatgacaaccgtcatgcacgaggaagccctcgacccgaccctgctcgagttcgacgactccatgacttggtaattagaaggaggaaacgaaatgaaagcaaaaattctgaaagctcttctcatggcgcttggcgtcaacgccgcgctgtttgccgttttcttctttgacctcgacggcaagctgctgttctacgtggtcgagcctaccctcaaaaagcattacgacaacatgccgcgccgcgacatgaccaagatgccgtatgagatgaacaagccgaactacgagtacaacgtctgatcaccttataatctaaaaacatagatataacaggaggagaagtaatactatgaaatactttggcggatgcgacgtaggttccacctacacgaaggcagttattctcgacgagaacggcaaaatgtgcgccgacacgacgatccgcagcaagatcaatgcggagcagtccgcgatcgcggcgatggaagaagtctgcggcaaggtcggcctgaaggactccaaggagctcgcttacctcatcggcaccggctacggccgcaacaaggtcccgttcgccgacgagaacatctccgagatctcctgccacgccatgggcgtgcacgtcacgaatccggaagtccgcgccatcatcgatatcggcggccaggacgtcaagggcatcagcatcgacaccgacggcacggtcaagagcttcgcgatgaacgataagtgctccgccggtaccggccgcttcttcgaggccatggcccgctccttcgagatgagcctgccggaattctcgaacctgtccctgacggcgaagaacgtcatcccgatcacggcgcagtgcaccgttttcgcggagtccgaagtcatcaccctcgtgggcgaaggcaagccgaccgacgagatcgccgccggcatcgagatggccgtcgccaagcgctgcttcgtcatggccaagaaggccggcgccaccgacagcatcacgctgacgggcggctgcgcgaagaacgccggcctgaagcaggccatcgagcacgtgctgaagttcaaagtcgttgagctgaagaccgacccgcagctgatgggcgctctgggtgctgccgagtacgctcgccagaagggtctcgccaagaagtaatcgcttctgagattaccccaaaagagggagaaccacccggttctccctcttctttttttgccagagcgcaaagtgcacggtttatgcgaaaaaaatataaaaaaattcatcgtttttgcaagaagtatttgcttttacgatcagattagtttaatatatgtacgtcatcaagacagttgaccggcgtatggaagagagcacgccggccaaagcccaaaatattaggagtgaggaaaaccatggataacctattctggatcggcttcgtcggagccgcgctcgccctgattttcgcctacctgcagaagtgcaaagttatgaagtgctctgaaggcgacgagaagatggtcaagatcgcttcttcgatccgcgccggtgccaacgcctacctgaagcagcagtattccactgttgcaaaagtgtttgcagtcgtatttgtcatcctgctgatcatcgcctttgcttccaagggccagatgctttccagagtgacgccgtttgcgttcctgaccggtggcatctggtcgatgctcgctggcctgatcggcatgaagatcgccactgccgccaatgcccgcacggccaatgccgcgcatgagagcctgaaccacggcctgaacgttgccttctcttccggcacggtcatgggcttcacggttgtcggcctcggcattctggacatcacgctctggtttatcggcctgcgctacattggcaagatcaccgatcccaccgtgcttgccaacatcatggtcatgaacggcatgggcgcttccttcatggcgctgtttgcccgtgtcggcggcggtatctacaccaaggctgctgacgtcggcgccgacctcgtcggtaaagtcgaagccggtattccggaagatgacccgcgtaaccccgcgaccatcgcggacaacgtcggcgataacgtcggcgacgttgccggtatgggcgctgacctgtacgagtcctatgtcggctccatccttgccaccttcgcgctgagcgccgccgccaactatggctggagcggcatgctgctgcccgttgcgctggctgtctgcggcattgtctgctcgctgattggctccttcctcatcaagacgaaggaagacgctacccagatgtccctgctcaagagcctgcgcaccggcacctacacggctgctgccctctccgctgtgctcgccctgcccctgtcctacctcattctcggacccgagcagcactgctggggcgtttacgtcgccatcctctgcggcctcatcggcggctgcgccatcggctacttcaccgagtactacacctctgacaactacaagcccacccagcagctggccgcggcttccgagaccggctccgctacgatcatcatcggcggtatctccctgggcctgaagtcgaccatggcttccattctgattgtctccgtcgccatcctgctcagctacttctgcgcaggcggcaccaccacgatcatcgatgccagcggtgcgttcactgctgagttcaaccagggcctgtacggcatcggcattgccgctgtcggcatgctctccaccctcggcatcacccttgcgaccgacgcttacggccccgtggccgacaacgccggcggcattgccgagatgtccggcctgccggaagaagttcgcgaccgcaccgacgccctcgattcccttggcaacaccactgctgccaccggcaagggctttgcgatcggctctgcttccctgaccgctctggcgctgctcgtgtcctacgtcaacatcgtgcagacccgcacgcccgagaccctcaacttcacgctgacgagcccgtccgttctggtcggcctgttcatcggcgcgatgcttaccttcgttttctccgcactgaccatgagcgctgtgcagaccgctgcgcagtccatcgtcgtggaagtgcgccgtcagttccgcgagatcgtcggcatcatggactacaaggcagacccggattacgcggcctgcgtcagcctgtgcaccaagggcgctctgcatgagatggtcgctccggcgctgctggctgttgtcgtcccgatcgtcaccggcctgatccttggacccaccggcgttgtcggcctgctcggcggcgtgtccgtcactggctttgcaatggccgtgttcatgtccaacgcaggcggcgcctgggataacgcaaagaagtatatcgagcgcggcaaccacggcggcaagggcagcccccagcacaaggcggctgtcgttggcgatactgtcggcgacccgttcaaggatacttccggcccgtccctgaacatcctcatcaagctctgctccacggtctccatcgtgtttgctggcctgatcattgcgttcaacctcatgaacgtgctgtaaatccagatatggaaaagcccgttggcagtttgccaacgggctttttgagcctgtcggaaaaactctccgggtttttccgacaaagggcttgcagtctgctgcgcgcataatttgtgtgccggttgcacacaaattccacacttgcagcctgagaagcattttctctcacgcacatgtctcgagaggaaatgattgcaatgctttgccgcctgcgggcggcaaactctgcgaggcttttttcgcctgtgtcatacgatctgaaacagatagaacttcaaataatccgtctccggcacgttccagaggatcggatgatccggcccctgctgccgtgcctcgatctgccgcagggagacctgcgcgtccttggcggcgtccgccagcatggcgcggaaacgatcgtccgtcatgaagtgcgagcacgagcacgtggccagatagccgccgcgcggcaggatgcgcatggctttgagattgatctccttatagccgcggatggcgttcgccacggtcgcgctgctcttggtgaaggccggcgggtcaaggatgatataatcatatgccccgcgcttttgctcggccagcttcgtgagcagatcgaacacatcggcgcagagatactccacgcgatcctgcaggccgttgagcgctgcattgtgccgcgcggtcgtgagcgcatcttccgatacatccaccgacaagacggatgccgcgcctgccgctgcgcagttgagcccgaaagccccggtgtgcgtgaagcagtcgagcacatgcttgccctgtgcgagctgcgctgctgcgcggcggttatacttctgatcgaggaaaaacccggttttctgtccatggatataatccacgtcgtacaggatgccgttttcccggatcgtcacgtgtccgtccagatccgtccgaagaccgtcgagcgtcacaaagcctgtcccctgttccatgccttctttctgccggagcttgacatcattgcgctcgtagatcgcgtcgatctgcgcaccgtctgcgtgcagcgtctgcagcaggagcgcgaatagctgctgctttcgcagctccatgcccagcgagagcacctgtgcgaccaggatctggccgaagcgatcgaccgtcagccccgggaaaccgtccgcctcgccgaaaatcaggcggcagttgtcgaaattctgcccaatgaccgtgcggcggtaatcgaccgcgtaccgaatgcgccgcgcccagaatgcctcgtcaaagcgatcattcgcgttgcgcgagagcacgcgcacgcggatcttggacgcgctgttataaaacccgacgccgagccagtggccgctgcgcgtggtcacatccacgatctgcccgtcgacgcaggcagcgtctgcctgcagcacttcgtctgcatagacccacgggtggccgctgcgcaggctgcgcgctgccttgtccgtgatctgaattttcggataatttcgttccatggcatcgtcactcccaatgtaatcgccctattgtaccccgaacacgccgcgcggacaagagcgaaatgcgatatttacattttccgaccggtcgtttataatattaacattagtctgttttgaaaaggtgacgccatgaagctctccaaatccggtatttttctgatcgttgtgctcgtaatcgccatcgggctcggcgtctgggtcgcaatcatgacctgcgacgttctggcgaaggaccccatcacaatgcctgaccgcggcagtgcagccggtacgccgcgtccagtgcaaaacgccgacaagccaaaggagccggacacgtttgtcatctccatggtcggcgactgcacgcttgcctcgatccagaccgggcgcgattttgacagctatattgataaaaacgggacgtcctggccattttccggcgtggtagactacctggatcaggacgaattcacccttgcaaacctcgagtgcacgttttcggatgaaaagctcaagtcctcttccctgttctatttccgcggcccgtcgtcctatgcggatatcctggtgcagggcagcgtggaatgcgtcacactcggcaacaaccacacggacgacttcggcgccaaaggcgtcgcggacacaaaggccgcgctcgacgctgttggcgttccgtgggcagccgccggagaatccaaggtgatcacgaccgagcatggactgaagatcggcatctactgtccggggtggaccggcctgagcaaaagcaacatcaccaccgggatccagaaactcaaggaagccggcgcggacattctgatcttcgccccgcactggggcacggagggcagctacaaggtgactgcaaatcaggaatcctttgcgcacgcggccattgacgcgggcgcgcacatcgttttcggcacgcacccgcatgtcctgcagaagatggaagcctacaacggcggctatatcttctacagtctcggcaacttcagcttcggcggcaacaccgctccgcgcgacgtggacacggcgatcgcacaggtgactgtaaaaaaagacggcgacagctgggccgtcgacggttacgatctcatcccctgccgtctgtcgagcacggacggcaagaatgactaccgcccgcgcccgtacaaagaggacgaagagggctatgcgcgtgcactcggcaagctcgacggctcctggaccggcagcgacctgagcgtggactactcgttcatgtaccgctgatacataaaagtatgcaaaacggccatccgccgatcggcggatggccgttactttttcagtcctgcggcagcgggatcttgcccttgagcagcaccttgccaaaacagcagatggtaatgccggatgaggcgctgatcgtcacatccgcatccttgcgcgcacggttgagggagaacagatacacattgccgaggtagtcctggcagtactgcttgcacttcatatcgccgtccacgaaaaacagaccgatgtccccatcgtagatcgtggcgccgcgtttgacgagcacgatggaatcgtcatggatgtacggctccatactgtcgccggtgatgcgcaccgcgaaatccgcctccgaatccgccgcgacggcataatcctcatagtcgtccccgaaggccggcgaggcatagccggctgcggccggtgtcatatacagcgggatgatcttctgctgctccggctgctgctcggaagcctgcatgcgcgcgcactcggcatccagcagctgcagcgtcacgagccggccgtgcgcatccagacggcgcagcttccagagcgtctcccactcctcgggcgtcggctggtcggtgctgccggtgccgcagaatgtctccagcgggacatgcaacgcatcgcagatacgcagcagcagttcaaaatcgatcttcatattgtcgcgccggatgatactgtagagcgtctgcgcgggcacatggatctgccgcgcaaactcgttgaccttgatctcgcgttcatccagcagttttttgagcgtggttccgatcatgctgaacacccctttgcctcatcatatcgaatttctcgttctatgtcaagaaataaaaacaaccgtgtaaattatgaaaacgaaaattttcgccggaattcgtggaaacggtttactttgctatgaaaatgtgcttaaatatgatgagaagtaatagatgattttgttcatcattacctgcaaaataaggaggaaatttagaaatggtacagttttccagcagaatgagtcagctgaagggttccgcgatccgtgagctcctcgctctggccaacaagccggaagtgctctcgtttgccggcggcatgcccgcgcccgagctcttccccgtttacaaaatcaaggccgcgaccgacgctgtcctcgatgagcagggcagagtcgcgctccagtactccagcaccaacggctttgagcacttccgtcagcagatcgccgatcgcatggaagcgaagctcaacatcaagaccagcgcggacaacattctcgtgacctccggctctcagcagggtctggattactcggcacgtgttttctgcgacaagggcgatgtcgtcatcattgagagcccgtcctacctcggcgccctgaatgctttcaaggcctgcgagccgaactttgtcgccatccccaccgacggcgacggcatgatcatggaagagcttgagaaagtgctcgccacgaccgagaacgtcaagatgatctacgtcatccccgacttccagaacccgtccggccgcacctggccgctcgagcgccgcaagcagttcatggacatcatcaataagtacgagatccccgtcgttgaggataacccctatggcgagctccgctttgaaggcgagtacctgcccgcgctcaagagcatggacaccaagggcctcgttgttttcctgggcaccttctccaagatcctggcgcccggctaccgtctgggctgggtctgcgccgacggcgagatcctccagaagtacaacttcctcgcgcaggccgcgtctctgcaggcttccaccgaggcgcagctcgttgtctccaagttcatcgacatgttcgacctcgacgagcacgttgccaccatcaaagagtgctaccgcaagcgccgtgacgtcatgatggcgaccatggagcgcgagttcccgcctgaggcgaagttcacccaccccaacggcggcctgttcacctgggtcgagctgccggagtacatcaacaccaacgagatggcaaagcagtgcctggcgcgcaacgtcgcgtacgttccgggcgacggcttcttcccggacgccggccacaataactgcatccgcctgaactactcctgcatgcccgaagagaagatcgaaaagggcatgaccattctgggcgaggtcatcaaggccaacctcaagaagtaatttcctgcatggaaaagaccgcgttcttcggaacgcggtctttttttatctcattttccgtgcagaacgtgcgcataaagaaacgccgccacgccgtcgtgatcgttggtatcggtcacgcagccgcagaccgcgcgcacctcgggcgcggcattgcccatggcaacgctcgtgccggcagcgcgcagcatgcgcagatcgttggagctgtcgccgaaggcaatggtgtctgcggccggaatgcccagatgctgcgcgagcgcgagcagcgccctgcccttgtccgcgtcggcggcgttgagttccagattgttgcggaaggacgacgtgaccaggatctccgggaacgccgccgcgatctctgcccgggccgtctcgcgctcggccatatcccgaaagcagagctgcaccttctgcaccggctggccgttttcacgcaggaacgccttcagatcatccaccggtgcgcgggtggtccgcaggagcgtgaccacttcctcatcggaattatagtagcgcacccgctccagaaacgaccgatcgacccaaccggtgtcattccaatagcagtcatacatcgcgtcataacgtccgacaaaatcgagcaggcgcaggcaggtatcgagcgcgatctccgcgcgcaggaccgcttgtccggtgcgcgtatccgacactttcgcgccattgatcgtaatggcatagtgcacgaacggaaacgccatcacctgctccgggatcgcccgcagggcgcgcccggtcgctggagcgatcacgttcccctgcgcggctgcaagcgaaagcgcagcggcatttctttctgaaacgaccttgcccgaattgagcagggtcccgtccagatccaaagcgatcagcttcataagcacctcctgaaacaagaaaatcctgtgttcaaagaacacaggattttgctggtggagactaatgggctcgaaccatcgacctcatgcgtgtgaagcatgcgctctaaccagctgagctaagcctccaaatggtgacccgtacgggactcgaacccatgttaccgccgtgaaagggcggtgtcttaaccacttgaccaacgggcctaagatgggatgctgcgggtgcagcatccccctggtagcggcacctggattcgaaccggggacacttcgggtatgaaccgaatgctctggccaactgagctatgccgccatgttgttcgcgcctcgccaactgccagacgcaaggagcattgtaccaaacaatgctcctgttgtcaataagttttgcggcgaatttttaatttttttgcggcagatagtcaagcggcgacacgctctgaccggaggccgcgaccgacagatgcaggtggctctcctgtgccgactcgcagccggcggaatcgccgaccgagccgatggtatcccctacggaaacctgatcgccgacatttaccgtcgggatcgtttccaggttggcgtacgtgcaccgcaggccgtcctcccgctcggtcacaacagtcgtgccatacagatcgtcataatacaccttcgtgaccgtgccggacgccatggccgagacaactgtgccgtatttggcctcgatgtcaatgccgtcatgcgtgcgccagtccgacatggtctcgtcgtaggtcagcgccgtcatggcatacggccgcagcacagcgccgtctaccggccagacatacttgtcctgcgccgccgtctcagcggcgtcctcggccggaatttccggctccggtgtcatctccggtgtcatctccggtgtgggttccgccgtctccggcgcagggatcgtcggcgcaggcgtcacttccagcaacgtgttctgatcgtgttcgctgtccatagtcttcgtacccgacagcagtgaccaggcggaaacgccgatcaccgctgcgcacaggacgagggctatgtagaagcccttgccttcgatgaagcgtacggatctcttctccggttttttgtccttgttcggttccatcgtgtttccctccaagaaaaaaggtgtttgcatgggtattgtcacccacgcaaacaccttttataccggttggggaaaattactttttgatgctgaagaatgcgtccttgccggggtactgcgccacgtcaaacagctcgtcttcgatgcgcaggagctggttgtacttcgccacgcggtccgtgcggctcggcgcaccggtcttgatctggccggcgttgacggcaacggagatgtccgcaatcgtggtgtcctcggtctcgccggagcggtgcgagacgacggccgtccagccggcgcggtgcgccatctggatggcgtcgagcgtctcggtcagcgtgccgatctggttgagcttgatgagcaccgcgttggctgcgccgagctcgatgccctttttgatgcgctggacgttcgtgacgaacagatcgtcgcctacgagctggatcttcttgccgaggcgatccatgagcattttccagccttcccagtcgtcctcggccatgccgtcctccagggagatgatcgggtacttctccacgaagtcggcgtacatgtcgaccatctgttcgcgggtcatgacgatgccgcgcttcggcagatgatagcagccgtcctcggcgttgaaccactcggagcaggcgctgtcgatagcgatcatgaaatcgtcatacggcttgtagccggccagctcgatggccttgacgagcgccttgagcgcgtcctcgtcgctgtcgagattcggcgcgtagccgccctcatcgcccacgccggaggccggaacgaccttcttgagcacgtggaacacttccgagcacatgcgcagcgcctcggagaagctcttggcgccgacgggcatgatcatgaactcctgaatatcgacgttgctgccggtggcgtgtgcgccgccgttgagcacgttcatcatcggcaccgggagggtcttggcgttgcagccgccgatgtagttatacaggctctggccggtcgccagcgagccggccttcgcgcacgcgagggacacgccgaggatggcgttggcgccgaggcgggtcttgttcggcgtgccgtcgagctcaatgaggagcttgtcgatcgaggtctggtcgagcacgttcatgccctgcagcgcctcggcgatctcgacgttcacgttctccacggctttgagcacgcccttgccgaggtaacggctcttatcgccgtcgcgcagctcgcaggcctcgtagatgccggtggaagcaccggacggaacggccgcacggccgacggtgccgtcgtcgagcgtgacctccacttccacggtcggattgccgcgggagtcgagaatctctctggcgctgacgtccacaatttcaaaataatccttcatgttcatactcctttatgatttttcgataaggctctcgcctgtcattgcgggtttgggctcgatgtgcataagttcgagcatcgtgggtgcgatatcggaaaggcggccgtgcgggcgcagcggcagatcgctgccgacgagcaccagcggcacgagattcgttgtgtgcgccgtgttgggcgaaccgtccggctcgaccatgcggtcggcgttgccgtggtccgcggtaacgagcagcgtgtagcccatctcctgcgccgccgcgacgacctcgccgaggcagcgatccacgcacgcgaccgcctgaatggcggccggcatcacgccggtgtggccgaccatgtcgcagttggcgaagttgcagacgatcatgtcatatgtaccggtgcggatgcgccggaccagctcatccttgatcttgaaagcgctcatctcggggatgaggtcataggtcggatactcgcgcggcgacgggatgagcacgcggtcctcgccggggtactgtgtctccgtaccgccgttgaagaagaacgtgacgtgcgcatatttctccgtctccgcgatgcgcagctggcgcaggccgtgggcgctgacgatctcgccgagcgtatcgtgcagctcctcgggcggaaacgcgaccgggaggccggtgagcttctcatcgtagcgcgtcgtgcagacatagtgcagatgctccgcaacgatcttgcgccggaagccgtcaaagtccggctgcgtgagcgcataggtcatttcgcgcgcgcggtcgggacggaaattcatgaagataacgctgtcgccggactgaatgcgcccgttcgggtcgcagacaacgggcttgacgaattcatccgtcacaccggcggcgtagctggcctccatcgcatgaacggggtcgggatcctgtatgccctcgccgcagaccatggcgttgtagctggcctcgatgcgatcccagcgcttgtcgcggtccatgccgtagaagcggccctgcagcgttgcgatcattccggtgccgagttcggcgcagtagtcacgcagctgccggacatagcccgcgccgctcgtgggcgcaacatcgcgtccgtcgaggaagcagtgcaggtacacgcgcccgatgccgcggtcgtgcgccattttcaccatggcaaagatgtgccggatgtggctgtgcacaccgccgtcagacagaaggccgaggatatgcagggccttgccgtttgctgcgttgtccagtgctgctgcatagaccggattttcaaagaatgtcccatcctcaatggctttcgtaatgcgcggcagatcctgaaacacgacgcggccggagccgatgttcgtgtggccgacttcgctgttgcccatctgcccgtccggcaggccgacgtccagccccgaagcggacagcttcgtgtgcggccagcgctgcaggaggccgtccatgaccggcgtttgggccatgtaaatggcgttgccgtcgttcggctcgccgatgccgtagccatcgagaatgatgagtgcgactttcccgttgctcattcgcaggctccctgcgccgtcgcggcgacgatcttcgagaaatcgaccggcttgagtgacgcgccgccgatcaggccgccgtcgatatccggctgggccagcagctcggccgcgttgcccgcgttcatggagccgccgtaaaggatgctgatcgtcttggccgtttcgaggtcatagagcttgccgagcgtggcgcgaatcgacgcacagacttcctgcgcctgcgcgctcgtagcggtgttgccggtgccgatggcccacaggggctcataggcgatgacgcagtgcatggcctgctcggccgtgaggccggagaaggccgctgcgacctgataggcgacatacgtctcggtcagatcatgctcgcgctgcgcaagactctcgccgacgcagatgatcggcgtgatgctgtcgtcgagcaggatcttcgtcttggcattgacctgcaggtcggtctcgccgtggtagctgcggcgctcgctgtggccgacgatgcagtactgcgcgccgaggtcgctgagctgctcggcagacacctcgccggtgaatgcgccgtgctggtgctcggacacatcctgcgcgccgacgccgaggtggcagccctgccctgccgtctccagcgcggcaatgagcggatacggcgcgcagatgaccacgtcacagcagcgctcggcgggaagattcgcctgcagctcctgcgtgaaggccgggatctcggccacgcgcttattgagcttccagttgccggcgatgattgcttttctctctttcaaattcatatccaatgattcctttctgcgacttacttatccagcaggcacgcaacgcccggcagctccttaccttccaggaactccagcgaagcgccgccgccggtggaaatgtgcgtcattttatcggcaaagccgagcttctcaaccgcagcggccgagtcaccgccgccgacgatcgtcaccgcgccggactctgccagcgccgccgcaatggcttccgtgccggcggcaaaggccgggaactcaaacacgcccatcgggccgttccagacgaccgtaccggcacccttgacggccttcgtgaacaatttgatggtttccgggccgatatccaggcccatccagtcggccgggatagcattggtcggcacaaccttgcgcgcacagtcggcggcaaactgatcgccggccatggtgtccaccgggagcagcagcttcacgccgcggtccttcgccttctggatcatctcaagcgcatagtccatcttgtctgcctcgagcagggacgtgccgatctcgccgccctgcgccttgataaacgtataggccatgccgccgccgatgatgatcgtgtcggccttttcgagcaggttgttgatgacgccgatcttatcggacacctttgcaccgccgaggatggccacaaacgggcgcttcggatcctcgagcgccttgcccatgacggacagctctttctcgatcagcagtccggcatacgcgggcagatacgccgcgacaccggcggtggaagcgtgcgcacggtgcaccgtgccgaacgcatcggagacatagagctccgccatcgaggcaagctccctagcgaattcgggatcgtttttctcctcgcggggatcgaagcgcaggttctccagcagcaggagctggcccggctgaagcgcggccgccttggccttggcgtcctcgccgatgatgtccttggcgaagatgacttccatgcccagcagctccgacaggcgcttggccacaggagcgagcgtgaggctctctttccacgtgcccttcggcttgccgaggtgcgagcaggcgatcacggcagcgccgttgtcaagcagatagcggatggtcggcagcgcggccacgatgcgcttatcgctcgtgatctcgccggtcgttttgtcctgcgggacattgaagtcgcagcgcaggagcaccttttttccggaaagcgggacgtccctgacggtcattttgttgtagttcatcttgcttcctcctgttttgtgatttcacacaggcgtgtgatatggtattcagacattcagatcgatctgcccgagcatgttctgctggcgcagcgcttcatagcacaggatcgccgcagtattggacagattcaggctgcgcgcctccgcgcgcatggggatgcgcaggcaatggtcggcatagcgctcgcgcagccactccggcaggccctgcgtctctttgccgaacatgagcgtcacgttcggggtcgagaggtcggcgtccacatagctcacgcttgccttcgtcgtgagcagccagagattctcatcgccgtttttagcaaaatactcgtcgatgttctcatagaccgagatatcgaccagatgccagtaatcaagtccggcgcgcttgaccgcgcggtcggaaatgtcaaacccgagcggtttgaccagatgcagccgcgaacccgtgcaggcacaggtgcgggcgatggcgccggtattgttcgggatctccggctcaaccaaaacgatgtctaccatagtgctttcctcttacatattttttctattttgacgtctattattttatcccgaagccgctttttttgcaatctcccttttaaataaagctaccacaggaacgcactggatttctgaacttttcatgaaacatgccgaagatggttgcgaaatggatgaaaaaactttataatatccacagaatccatagatttcgcgcaagaccccatgcgcgggaggcattatgacacaactttgctccatctgtccgcgcggctgcggcgtcgaccgcgcaggcggacaattcggcttttgcgccgtgccggacgcgccggtcgtggcgcgggccgcgccgcacttcggcgaggaaccatgcatttccggcacacgcggcagcggcgcggtgttcttctcgggctgcaacctgcggtgcgtattctgccagaaccgcaccatcagccgcggagagcacggaaaagagatcaccgtcgcgcagcttcgcggcatttttttgcgtctgcgcgatgagggcgtgcacaacatcaacctcgtcacgccgagtcactacacgcggcagatcgccgaggcgctctccgggctggagctcggcatcccggtcgtgtggaacagctccggctacgaatgcgtcgagacactgcgtatgctcgacgggctcgtgcaggtatacctgccggacctgaaatacgccctgtcggagccggccgcgcgctactccgccgcggcggactatccgcaggtcgcgcgcgccgccattctggagatgtaccgccagaccggtccgttccggctcgacgaggacggcatgctgcagcgcggcgtgctcatacggcatcttatcctgccgcagcagggggaaaacacccgccgcgtcatcgactgggtcgggcagacatttgcacccggccaagtgcttttcagcctcatgagccagtacacacccgtcggcgatctggcgcagtggccggagctgcagcatcccatctccccggagctaaacgaagaaatgtaccagtacctgatcgacagcccgatcaccgacggcttttatcaggatctcgatgccgcgaccggcgacatgatcccggcgtttgacggcaccggcgtttgaaccacgactctttcaatacagaaaaagatatacggaggtaccctcatggagtacaaagagattcttgacagcgcacgtacctgcatcgggccgtactgcaaagcctgcccggtctgcaacggcaaagcctgcggcaaccaggtccccggtcccggcgccaaagcgcccggcagcggctttatccgcaactttgacgcctggcagaagatctgcgtcaacatggacaccatctgcccgaacgaacccgtcgatacggccgtggagctgttcggcaccatgtaccgctacccgtttttcgcggctccgctcggcgcgatgaagctgcactacggcgaaaagtacaccgaccgcgagtataacagcattctcgtcaacgcctgcgccgacagcggcatcgccgccttcaccggcgacggtgtggacgccgccgtgttccagggcgcgatggaagccatccgcaccgcgggcggcgtcggcgtgccgacgatcaagccgtggaaccaggaactggtctttgaaaagctcgatctggccaggaccagcggctgcaaggccgtcgccatggacattgacggtgcgggcctccccttcctgaaaaatatgacgccgccggccggcagcaaatccgtgcaggaactggcggagatcatccgctacgcgggtatgccgttcatcgtcaagggcgtcatgaccgtgcgcggcgcgcagaaggccgcagaggcgggcgcggcggcgatcatcgtgtccaatcacggcggccgcgtgctcggccagacgccggccagcgccgaggtgctgccggagatcgccgatgccgtcggcagcagcatgaagatcttcgtcgacggcggcatccgcaccggcacggacgtgttcaaggcgctggcgctcggcgcggacgctgtgctcatcggccgcccgttcgtgccgatggtctacggcgacggcgcgcagggcgtggcaacctacattgaaaagattggcagcgagctgcgcgacacgatggccatgtgcggcgtgcacacgctcgacgagatcacgcgcgactgcgtgcgcgtgatgtgacctacatacagctaacgaaaaaaagatccggggacagccgtccccggatcttttctttttcaatcgtcccagatcatggtggcgaagtaatcctccggcgtctcggcgcggcggatcaggcgcgtagagccgtccggctgcagcagcacctccgcgcagcgaagcttgccgttgtagttatagcccatggcgaggccgtgcgcgccggcatcgtgaatgaccagcagatcgccgatgtcgatgcgcggcagcatgcggtcgacggcgaacttgtcgttgttctcgcacaggccgccgacaatgtcatacttgtggtcacagggcgcattctccttgcccatgaccgtgatgtggtggtaagacccgtacatggccgggcgcatcaggtcgcaggcacaggcgtccgtgccgatgtactccttgtaaatatgcttggcatggatcgcgcgcgtcacgagatgaccatacggcgcgagcatgaagcggccgagctccgtgcacagggctacatcgcccatgccggccgggacgaggatctcctcgtacaccttgcgcacgccctcaccgatgacggcaatgccattttccgattcctccggccgatacgggatgcccacgccgccggagaggttgatgtacgcgatatggcagccggtctcccgctgcagctcgaccgcgagctggaagagaatgcgcgccagcgcgggatagtattcattggacagggtattggatgccagaaatgcgtggatgccaaactcctccgcgcccctggccttgagcatccggaacgcctcggtgatctgctcgcgcgtcatgccgtacttggcgtcgccggggttgtccatgacctgaaagccctcgcgcgactcgccgagcgagaacgtgccgcccggattgaagcggcagccgatccgcttcgggatatagccgatcgtcttttccaaaaagtccacgtgcgtaatatcatcgaggttgatggttgcgccgagctttgccgccaagcggtaatcctcggccggggtctcgttggacgagaacatgatgttctcgccgacgctgccgatgcgctcggccatcatcagctccgtgagcgacgagcagtcgcagccgcagccctcctcctgcaggatcttgaggatggcgggggtcggcgtagccttcacggcgaaatattcccggtagccgggattccacgaaaaagcggctttcaggcggcgggcattctcgcggatgccctgcgcatcatagaggtgaaacggtgtgggatagcgcgcggcgatgtcctcaagctgctccgctgttacaaacggcttcttcattggacttcctccctgcaaaacctagtattgtgctcattttagaagccgctcggggctgtgtcaagaaggcaaagacattttcgccgttccatgcatatgcgcggcaaaatcatccacccgctccgtcattttacccggaatggaagagcctcagatgtcctcaagcgactccgtttccaccggctgggccgcatcgacgaagcgcacctgcagcaccgcctgcggccagttgaccgaaatggccgccgcccggccgcgcgcctgcgccgccgcgtcgatctgcaggcacagctccgccagtacctcgcgcgtcagatagccgccgcgccagtggaacaccagccccggctgcttcttgcgcagcgcctggtcgacccggcgcgcggcctcctccggcttcgtccacgacaggtgctgcagcttgtagtaaaactgcccgccgtccgtgcagggcggagccggatacagcagcggccggtggtcgcggaagatctttgtatcgtcgagattgaaatagtcatagcgcgtgccgtacttactgagggaattgtcaaacgtggcgtccagatgatagcactgcccgccgagctggacgatgttccaggcgtgcaggtagcgctcgccattggcgcggtcccggtcgctgacggcgatcatgcacggcagcccgagcccgtcacacagcagcttgaccgttttggccatgccctcgcacacgccgacgccgttggtcagcgggccgatgacttcgtgcgaatacggcttttcgagcttatcatagcggacgttttccacgacgaaatcatggatcgcgcgctcctgctccgccggcggaagactgcgcagcggccgcagcaggcgcgtcacgcgcgcctcgatcgcctgccggtgctcccggatgcgctttttctcaaaccggtactccggccagaactccacaaacgccgcctccggcaccgcgcggcacgaaaaaccaacggcgtagaagatctccggatgatccagccggagctggaaaaagagcgtgctgagcgtttccatcggcaggcgcgggatgcgcgccgacggcgtcagctcccgcaggcaggtcagcatgccgtgataggccgcgcgctcctgtggcggaagctgctggtaataatactgtgcgtgcagctgcatggcttacttcgctcctttcgtcagatcggcgcgcgggctgacctgaaaccgttttttgtacgcccgtgaaaaggcggaatagtcatgatagccgcactgaaagcaggcgtccgtcgtgcgcatgccctgtgcaatgaggtcgcgcgccacacgcaggcgcttatccgtgaggtagccgtgaatggtgaagccggtctcctcccgaaacatacgcatcatataatatttgctgaggtaaaaggtgtccgccagcgcatcgatgctgacgtcctcggtcaggtgcgtgttgaggtattcgagaatggccgccgtcttctcgttgcagtgctcggacggggcgtagttcacgccgtcgtcatccagcccgcggcccagcatgaccagcagctgcagcatctgcgcccgcgcgagcaggtcgtgcccgtaggccgtgctccgctcctcctcctcgagcgcatcgagcgtgcgcagcagcgctgcgcgccgccctgcctccggccgcaggacaaagctctgcccatcggccggcagacggaagcaggcgtccagctgcgaagcggccgtggactgtgcgcggagaaattccggcgatatgtagaggatcacgcgctcgtagcgctggctcgggtcgatctgcgccttgtggatcgccccctgccgcacaagcaccacgtcatacggccgcagcacgtgcgtgcgcccctcgacgatgtagttcccgcgcccggccagaaagaatactagcttgtgaaattcatgatagtggaatgccgtgtcctccgccagcgcactgctcaggtggaacagacggaaatcttcatgcaggtatcccctgcgctcataatcggtctgctgcatggctcgcctccgaaaaaagcatcttttgcaatatatgatagcatttttgtacaattattgcaacggtgaattgtatatactgtcaccaaagcgctgttacggcgcaatctacacactgggagtgttgcatttatggccaaggcaaacggttccaagtctttctttaagacttacggattcctgatcttcatgctcaccggcatcgtcgccggctgtctcgtgggcgcgttcgccccgaacttcggcaaaaagatcgaattcctgggtacactgttcatcaacatgatgttctgtgtggtggtgccgatggtgttctgctccatcgcatctgccatcgccaatatgaaaagtgtcaagcgcgccggtaagatcatgggtgtgaccatcgcaacgttcctggtcactgccgctatcgccggtgtcatcatgtacatcgtctgccgcatcttcccgctcgtggatggtcactacaccatcacggaaggcgagatcggcgatacgctgggcttcggcgacatgatcgtcaacttctttaccaagcccgacttcatggagctgctgagccgtaaggccatcctgccgctgatcgttgcggcggtgctgttcggcttcggcatccagatgaacggcggtcccgagacaaagaccgcgcaggtgctcgaggatatcacgggctgcatcatgaagaccgtgaagctcatcacctactacgccccgatcggcttcttcggcttctttgccaatctggtgtctacttacggcccggagctggtcgccgactacagccgcacgctcattatctactacgtcatgagcttcgtgtacatgttcgtgttcttccccatctacgcccagttcggcggcggcaagggcggcgcgaagatcatgttctccaagctgttccgcccggcggcggtgtcgttcggtacctgctcgtccgttgcgaccatcccgacgaacatggaagttgccgatgagaccggcatcagcaaggatgtcacggacatcgtgctgcccatgggcgccaccatgcacatggacggctcggccatgagcgccatcatcaaggtcgcgttcctgttcggcgtgttcggactggacttcacgacggaaaaggccattctggccatcatcgtggcggtgttctcctccgtggccatgagcggtatccccggcggcggcggtaccggcgagctggtagtctgcacgatcttcttccccgaccagctggctgttgcctacccgatcgcactggcgatcggcaacctcgtcgatcctccggcgaccatggtcaactccgccggcgactatgttgtgtccttcatcgtctcccgctatgtggacggcaaggattggctgcagaaggccattgccaagaagagagaaagcaaggctatcgagcagtaatctgccgatgtatcaaattccttccacccggaaacactacggtgtaccggatgggaggaattttttatgcttggaaaagtcgagatctgcggtgtcaacacggccgacctgaaagtcctgagcagcgacgcctgccgggcactgctcatccgcgcaaagcacggcgacactgacgcgcgcgagcagctcattgccggcaacctccggctggtgctgtccgtgatccagaaattcatcggccgcggcgagaacgtggacgatctgtttcaggtcggctgcatcggcctgatcaaggccatcgacaattttgacgccgaaaaccacgacgtacgtttttccacctacggcgtgcccatgatttccggggaaatccggcgctacctgcgcgacaacagccccatccgcgtcagccgctccacgcgcgacaccgcctataaggtcctgcaggcaaaagagcgcctgactgccgcctctggccgcgagccgacgcttgacgagatcgcaaaggaactggacatcccgcggcgggacgtcgtgttctcgctcgacgcgattagtgaccccatctcgctctacgagccgatctacaccgacaacggcgagagcatctgcgtcatggatcaggtcggtgacacgaaaaacacggacgagcagtggctggagcatctggcgctctcgaacgccatctccgacctcaacgagcgcgagaagaagatcctctccctgcgcttttacgccggcaagacccaaatggaggtcgccggtgagatcggcatcagccaggcgcaggtgtcccgcctggagaaaaatgcgctcggcaagatccgcaagaacatcttcccctcataaaccgccgcccgacgccatagactgataccaaaatgctgcggagggattaccatgaaatgctgtttgtccgatctgcgatacaaggaagtcatcgacctgaccaccgggcagcggctcggctatgtctgcgacgcggagatcgatctggagcagggcaagattgtgtcgctgatcgtgccgggacaaaaaaagctcggcggtctgctcagcggcgatgacgactacattctgccgtgggaatccatctccagattgggcgaggatatcattctcgccgaggtcgcggcgcagcagccgcgccgccggcgggaaaagcggcagaattatctctgacagcctgaaaaaacggcaaaaatccgggcaaatgctcttgcattgtccggatttctctggtataataccagagcattacgcacgggggtcgatgtgcgaccatgtggcttcggcctggtcgggcacaattgacgcccccggaggtagcaactaattaaaggaggaaacaaaaaactatggcagtcgtatctatgaaacagcttctcgaggccggtgtccacttcggtcatcagacccgcagatggaacccgaaaatggcggagtacatctactgcgagcgcaatggcatctacatcattgacctgcagaagaccgtcaaaaagctcgaggaggcttacaacttcgtgcgcaccctcgcagagaatggccagaccatcctcttcgtcggcaccaagaagcaggctgcggacgccgtgaaggaagaggcttcccgcgtcggcatgtactatgtcaatgcccgctggctcggcggcatgctcaccaacttcaagaccatgcgcacccgcatcgaccgtctggctcagctcaagaagatgcaggaggacggcaccttcgacatgctcccgaagaaggaagtcatgaagctgctcggcgagatggagaagctcgagaagtacctcggcggcgtcaaggaaatgaagaagctccccggcgcgctgttcgtcgttgacccccgcaaggagcacaacgccatcgctgaggcccgcaagctgcacatcccgatcgtcgccatcgtcgacaccaactgcgacccggacgagatcgactacgtcatccccgcgaacgacgacgcgatccgcgccatccgcctgatctcttccaccatggccaacgccgtgcaggaaggccgtcagggcgccgacgctgaggaagctgcttccgaggaagaggcccagaaggtcgaagagtaattgaaaaactgcaagggcgggccgcgtacccgcccttctgataaaacaataaaggagaaagaattatggcattttctgctgctgatgtgaaaaatctgcgtgaaatgaccggcgtcggcatgatggactgcaaaaaggccctcaccgctgctgacggcgatattgataaggctgtggaatggcttcgtgagaagggcctcgccgctgctcagaagaaggccggccgcatcgccgccgagggcatggcttacgccgccgtcgtcgatggtatcggcgtgatcgtcgaggtcaacgcggagtctgacttcgtggccaagaacgacctgttcgtggattacgtcaagggcgtcgccgccgtcgtcgccaaggagaacccggctgatctcgacgcgctgtacgcctgcgcttacggcaacggcaagaccgtgctcgaggagcagaacgataaggtcctcgtcatcggcgagaacatcaaggttcgccgcttcgcgcgctacgacaccggcctgaacgtcccctatgtccacatgggcggccgcatcgccgtgcttgtcaacctcgagaccgagtccaccgacgctgccgtcgtcgagctgggtaaggacatcgccatgcagatcgcggctctgaacccgacctacaaggataagagcgacgtctccgccgagttcatcgagaaggaaaaagagatccgcctggcgcaggccaaggaagatccgaagaacgccaagaagcccgacgccatcatcgagaagatcgtcatgggcggcatcggcaagtacttcaaggagatctgcctgctgcagcagccgttcgttaaggacgacaaagtctccgttgagcagcacatcgccgccgtcgccaagcaggtcggcgcctccatcaagctcgtgaactacacccgctttgagaagggcgaaggcattgagaagcgtcaggacgacctcgccgaggaagttgcgaagctcatcaagtaaatttcacttccattctgcatcccgcggctccgaaccgggccgcgggatatttctgtctgcgtcatcctttttgtgggagatcagcggtaaaaaccgccgtttttcgggagtagagtggctctgcggccgtgtagagccgcattttttccggtagagaccgtaaaattggaacgtagacagggaaaaatgacagtagcttgtatttatgcgccagcgggtgtacggataaagggcacacaccgtgcagcactttgagcaagcaaaggagcactcacatgatccagatctttaccgacacgtcggcaaacctgccggctgcttacattcagaaatattccctgcgcgtcatcccgctgacatacttcgtcgacggcgttgaagcgcatcaggatcctgctgtggatttcgacgggaaagcctactatgacgccatgcgcagcggcacgcccgtatccaccgccatgatcaaccttggcgcgtttctcgagccgttgcacgcggcgctggcggccggcgacgacgtgatctatatcggcatgtccggcggcattagcggcacggcgcatgcggccgccatggccgtgcaggagctgcaggaagaattcccggagcggaaaatcgccgccattgacacctatgccgcctcgctcggcgaagggctgctggtgatcgaggccgcgcgtatgctcgaaaacggcgcgcctttctcgctgatcgtcgagcagatctcccgccgccgccatacgatgtgccagtacttcacggtcgatgacctcgcctatctggagcgcggcggccgcgtgagtaaggctgccgccatcgtcggcaccgtgctcaagatcaagccgctgctgcgcggcgatgacgagggcaagatcgtcctgtgcggcaagacgcgcggccgcaagcagtcgctcaccgcgctggcggacttttacgagaagctcgtcgccgacaagtccgaggagatcggcatcgcgcacgcagacgatgcagccggcgcgcagtttctgctcgatgcgctgcgtcagcgcggcttcaccggcgaatgcctgaccgtgtgctacgagcccgtcaccggctcgcatgtcggccccggcacggtggcgctgtttttccagggcatccacagataaacgaaaacccggaggacacgtcctccgggttttttatgtctctttccggtcgacctgccggatcattttctcgaacttcgcgcgcgggcccatgacttcgcgcccgcagccaaggcagcgcagcttgaaatccgcgccgatgcgcagcacctcccagcgtttctcgccgcaggggtgctgttttttcatcgtcagaatgtcgccgacctgaatatccatcgctcactcccccttgatgcgctgccagtaggcacgcgccgcctgctcggtcttgttgtcaccgtattcataatagtgctttcccttcagctcatcgggcaggtactgctgctgcacccaatgacccgggtagccgtgcggatacttgtagccctgctcacgctcgaagccagtgccgtcgacatggacgttctgcagctcacgcgggatgggccccgccttccctgcccgaacgtcggcgatcgcggcgtcgatggacatgacaacggagttggacttcggcgccgtggccagcagcagcactgcctccgccagcggcagccgcgcctccggcaggccgagctggagcgcgctgtccacgcaggatttcacgatcatggccgcctgcggataggcaaggccgatatcctcacttgccgagcacaggatgcgccggcacgcaccgatcaggtcgccggcctcgagcaggcgcgccagataatgcagcgccgcgtcgggatccgagccgcgcagcgacttcatgagcgcggacacgacgtcatagtggtcgtcgcccgcacggtcatagtgcatggcgctgcgctgcgtgatgttctcggcatccgcgcgcagaaggcggatggtatccccctctctcggcgccgccgaaaagagcagctcgaccgcattgagcgccttgcgcacatcgccgccgcagacggacgcgatataccccgccgtgccaggctcgatgtctgccgtgacgttttcccgtgcgctgagaatggacaccgcgcgcagcacggccttttccacctcggcggccggcacctgcttgaactcaaacaccgtgctgcggctgagcaccgcgttatagacatagaaatacgggttttccgttgtagaggcaatgaccgtgatgcggccgtcctccatgaactccagcagcgactgctgctgctttttgttgaagtactggatctcatcgagatacagcagcacaccgccgggcgtgagcatggtgtcgagctcggcaatgatattgcgaatgtccgaaatgctcgcggtcgtggcgttcaggcggcgcagggtgcggttcgtgctggccgcgatgatgcttgcgaccgtggtcttgccggtgccggacgggccgtaaaacaccatgttcgggatctcgccggactccacgatgcggcggagcatcccgttcgggcccagaatatgcttttgcccgacgacatcgtcgagcgtggtcggccggatctcatccgccaatggtctgtacatagcgcgcctcctgtgatgcaatggcgatattataccgcattttgcgcgccttggcaactcgccgcacttggcaggcggcgcaaaatgtgctacactgccggagaggtgaacaatatgcgcacaccggaacaagtgcaggagatcctccgctgtctggcgcaggcctaccccgcggactgctccctgcaatatcagaaagattatgaactgctgtttgccgtgcggctggcagcgcaatgcaccgacgagcgcgtcaatcaggtcacgccggcgctgtatgcgcgctttccgacgctcgaggcgtttgccgccgccgagcccgaggacgtagagccatatgtccactcctgcggcttttaccgggcgaaggcgcgggacatcgtcctgtgcgcgcgcaagctcgtcgcggaatacggcggccgcgtgccggacacgatggaggccctcacttccctgcccggcgtcggccgcaagacggccaacctcattctcggcgacgtgtaccacaagcccgccgtggtcgtggacacgcactgcatccggctctcgaaccgcatggggcttgtagacggactgaaagaccccgtcaagatcgagaccgcgctgcgcaagatcctgccgccggaggaatcgtccgacttctgccaccggctcgtgctgcatggccgcgccgtgtgcaccgcgcgcaagccgctatgcagcacgtgctgcgtgcgccacgtatgtcaaaccgcagaggagatggagctatgagaccgatcgcacacatccacagtgactttgccacaaagttcggcattccgcgccagagcggcgtagtcgggagtttacaggccgagatcattttcgagccggaatttcgcagccgcgacgccgtgcgcgggctggaagcgttctcgcacatctggctcatctgggagttttccgaaaacgtgcgcgccgactggtcgccgaccgtgcgtccgccgcgtctgggcggcaatgtgcgcatgggggtgttcgccacgcgctcgccgttccggccgaacccgatcggtctgtcgtgcgtgcgtctggaggacattacattttccgacgcgcgcggcccggtgctccatgtcgccggggcggatctgatggacggcacgccgatctacgacatcaagccctacattccctacgccgactgccatccggaggcgacggaaggcttcaccgggcaggtggaaatgcaggcgctgacggtggagatcccaccggagctgctggcccgcttcccggttgagaagcgcgacgcactcgtcggtgtgctcgcgcaggatccgcgcccgcggtatcaggcagacgccagccgtgtctacgggctggaattcggcggttatgaggtgaaattcacggtcagtgaccaaatactgaccgtcacggatattgcaaaaaaagactcgtgaacttcacgagtctttttcatatttcagctgatacaaatccgtgcgccgcgcgcgcaggaccgggatctgcgcacgaacggcgtccgtctccgtaaggtcgatgtcacagatcagcagctgcggcgctgcctccgcctgcgcctgtacgcgcccccacgggtcgcacacgagcgagtgggcataggaaacatagcccgccgtctcgtcccgcgccggagcgcagccggcgacgaagcactggttatccagcgcccgcgcgcgaaacagcagctcccagtgcgccgggccagtcgtcatgttgaacgccgccggcaccacgatcagccgcgcgccctcgagcgccagaatgcgaaagagctcagcaaagcgcacgtcgaagcagattgccacgccgagttttccgaacggcgtgtccacgagcgtgtattgctgcccgggcgagagcgtatcggactcgaaaaagcgctggccgcccgccacgtcgatatcgaacaggtgcaccttgcggtgcttcgcctgctgcgtcccctgcgggtcaaacacgtagcaggtattgtagatcgcgtccccgtcgcgttccggcacggagcctgcgacgagccagacgccgcatgcgcgcgccgtgtcgcgcagcagacgccacgtctcgccgccctgcggctcggcgtattgcacaaacgccgcattgttatatgggcagcaccacatctccggcagtgcgaccagatcgcagccggccgcagcggcatcgcgcacatagcggcgcatgaccgtatcattctccgttttggacgccgtgaccggcatctggcacaggccaagcttcatggtattccccgctttcacaccgttatataaccagcatagcgaaaaaagtcggcgctgtcaaacgtttctacccgcgcgcacgtcgctgccgcagtgcgggcagtacgtctttttgccggtgaaaaacatcatgccaagataacggtgacaaaatgggcagcgttgtgtgaatacggcgatgagtacgcccagcacgacacaccccagtgctacatatatcagtgcccagatgccataccagcagctgctgccgtacaggcccaggccaaacaaaaccaaaacgatcgaaataccgtcccagagttttggatgcttcacacgatcgcctccaaaagtgatttagaggtcatgatagcatttttgcgtgaagttcaaaaccgcatcatgtaaaatgcgggtgaaatgcagcgattgcatttcacccgcacgcgcgcgtttatgcgtacatggcacccagaatcccgcccagaatcccgaccagaatcgagagcgcaacaccgacaacgaagccgtccagcgcccacttgccgatcgctttggcacgcaccggcgtcgtcttctggaagcacaggaacaggatcaggccgatcaccgggaacaaaaacgccagaatgttcaggaccgtcgacggtttatcctcctgctggtttaccggcgcctgcaccgcgcagccgcagttcgggcacacgaccgcctcgtccaccagctctttgccgcattgactgcagtatttcatctcgttttcctccgttgatatctctgaacgaaagcgtcgttccaatgcttgtatactagcacattattttatgatttacagccaaaaagttcgcaaaatattcatcttaatatcaaaaacataaagacctctttctgcctgagatttcaagcaaagagaggtcattttgatagcaatttcgcattagacaaacattttcgcatcgtccagtcgtcgttcccggccgagataaaaatctcagaaagaataatcaaacatgcaatttcagtggttgtcgctccaatcatgccgttcaaaggtcacgcatccgtgccaaatacttgctctttggggagcttcggcgcaaggatcacttgaaaaatccgcttatacccacctataagagaaaaactgcctccgcagctggaccacgtgtatgccacgctgcgcagaccatggtaaagcgcatacgcaatttcctccgcaggctgcatattgccgacctcatctgcaagctgtgctttcgtaattgtctgcacgaccgcgcgaaacagtaccataccctgcggaaaatcattatccacatccttttgcagaatattgatatagatctgcgcagtaatggcagggccattttcctcggcatccactgcatattcccgtaacattgcccaaagaaaagcgagattcgactcgcgctgcaacataacatccacgagctgatccacttttttaccgatacggccgatgagttcgtccacaatctcatctttcgaagaaaaatgataatagaatgtgcgcttcgtgatacctgcagccttacagatctgcatcacggtaacctgatcatagttatattccttaaataatttgatcgcctgctcctgaattttctcttttgtactactgggctgcatgcttgcatttccctccaaaacagacactttcgacaataagtgcttgataattttgtgacgttctcacaattgacacatttctcacaaaagaatagaatgtgagtgtgaccgcggtgtactataataagcccgtagaacaactttactagtattttatacctatttagtttgctccgcggcccaatattgcttttattttatacccgcatgcagaaaaaagcaaccatagcgtgcaacagaaatccggagacacgaaacatttcattggaggagtttttatgaacaagttgtttgagccaatccagatcggcagcatgacactgaaaaatcgcatcgttatggcccccatgggcacgacgaccgatactaccaacgcctttaacatgcgggacgtgaagtactacggcgagcgagcaaaaggcggctgcggtcttgtgctgaccggcgctgttgtcgcctctactgagttcgagccggctccctgtcagaagctcacaaatacgaaggatgtctatatgctccatctggtggctgaacgtgttcatttttacggcgcgaagttcggcatccagctctcacccggcattggccgcatgaactggatcgatccgcacacgccgccctactccgcaagccccgtccccaactactatgtgccctctctcatctgccgcgaactgcctacagagggcgtgaaaagtctcgtaaaagcaatgggtgaatcagcaaagcttgcaaaaaatgcaggcgttgacatcattgagatccatgcatacggcggctacctgatcgaccagttcacctccgcgaagtggaaccaccgcacagatgaatatggcggaagcttcgaaaaccgccagcgtttcctcagagagatcgtcgaggaagttcgcaaggcatgcggaaaggactatccgatcgcaatcaaaatgacgctcgacagcgttgacgacgatgagcgcccgattgaagagggccttgcaattgcaaagtatcttgccgactccggccttgtggacatgatccactttggacgcggtgcatattcgtgccgttggagaatggttagctccgtctaccagcccgtcggctttgacctcgacgccgccccgaaagtaagagaaatgattggcgatcttcccctcatggcacacgggaagctcaaccaccctgatgttgctgaaaaggccattgcggacggtttgattgatctggttgcgattggccacggtctcatcgcagatccgcactgggcgaacaaggtcaagaacgggaaactggatgatatcaacccgtgcatcggctgcggcgagtgccacttcaatgcaatgaaagggcattccagaccgtgcgcagtcaatgtccatggcatgcgcgagggcgagttcccactcacgccggcaaagagcgatctcaacattcttgtgattggtgccggccccggtggcatgaaggcagcagccaccgcagccgaaagaggctatcgcgtctcgctgtacgaaaagaacacttatatgggtggaatcatggcagccgcaggcgcaccgcggttcaaggcggatgtgcatgaccaggtcgagtatctgaaacgccagatcgcaaaatatccggtcgacctgcacctcaatacggagatcactctggaggacgttcagcggctccatcccgattttgttgtcgtcgccacaggtgcaaagcctgttgtgatcccggtgccaggtgcggataagccgcatgtcagcaccgcggtgccggttttgctcaagcagaaggaagtcggccagaaggtcgtcgtcgttggtggcggtgaggttggctgcgaattgtcgagcgaactttgcctgcagggcaaagatgtgatcatgatcgaattgctggacgacattctgcgcactgcagatcatttcgtcgcgaatgatcagaacatccgctatctcgttgagaactccggcaccgatatccgttgcagcaccagactgacggaggtcctagatgacggcatcatggtcatcaacaaagaaggtgaggccgagaaaatcacgtgtgacagcgtcgtctttgcttccggcttcaaggccgatcacagcctctacaacgatcttctcaaagctggctacgagtgcgtacaagttggcgacaatgtgaaacccggaaaaatcatcaacgcaatccatcaagcataccactacatccgcgtgcttgaagaggattgacagagccggtcggatgcatcagggcgtctcatccagggcgctctgatacaggcaaatacaatcttatatttgggcagcagccagaggcctggcagaaaggaaaatgagtcatgtcgaataaatattcaatcgtgaccggcgcatcccgcggtcttggcgccgctattgcagaggaacttgcacgcgaaggctatgacgttgtcattacctactgcacacaagcggacaaggcgcaaaaagtcaaaaagcagcttgagaccaaatttggcgttcgcgttgaaagctatcagctcgatatcaaagacgaagaagcagtccttgcatttcgcaaatgggtcgaagagactctgggcacaaatcttcaggtgcttgtcaacaatgccggcatctatgcaaatatgcccgccgaggagattgcgtcgaaaacgttctgcgacattattgacgtcaacgtgaagggtacgttctttatgacccgtcattttgtcgacctcatgattgcaaaccactacgggaaaatcatcaacctctgctctgcggtgggtctgcgcgctgcacccggctctatcgcatatgcaagctcaaaatttgccatccgtggcatgacgcaggcgcttgcaattgaccttggcaaatacaatattcaggtcaacgcgattgctccaggcgcacacaaaaccgacatgtactgggatgcgtataagattgatcccgaactgctcgagaagcgcaccaagggctgcccgcttcagcgcgcaggggaagtcagcgaaatgtatcacatcgtgcgttactttcttgcgtccgactttattaccggtcaggtcgtatcaccgaacggcgggaccacgatggtataacctcgaacaatttagaaaagagggagaatatgggctatataagtatttttctaggccttgcagtcgtcgtcgcactgatgatccggcgctggagcccgttgatggtgggcatcgttgctgcaacggtcgttattttcatgaacggcctgccttttggcgaaaccatgactggcacttacttcgacgggttctgcaccatgttcaaatcgctgttcccaccgattttttccggaagccttctggcgcagatctataatcgctctggtgctgtcaacgccgtcggcgatgccatagccaatgctctgtttaaggacagcgcttccgctacgcgcaagtatgtttcctgcattctagctatggcaatcgcgtccggtattctggccttctgcggtctgaacgcacttgtaacactgattgcgatgtatccgattgcgctgcgcctcatggagcgcgccggcatccccaagcgctttgtgatgggcattctcagctgcggcgtctacacctttgccatgtctgctcccggctcggcggagctcgtgaacattctggccatgcagtcgctcaacacgccgtcctacgccggcatatgcggcggtattttggcctgcatcacagaaattgcagtcacgacgaccctgacgaccatcatgatcaaaaaagatgtagcgaaagggaaaacctttgcctatgggccgaaggacattgtcgcttcaaatgaccagccgcgccccaaggcactcgtcgcactgttgccgttactggcacttgtcctgctgtttaacatcttttcgattgatatcttctcttcgaccatgatcgcatggctgttctccatcgttctgttctggaaatacctccccaaaaaggatggaaaacgcaccaacgaaatgctggatgtatttacagctgctggcgcaatggcgttcggcccttgcagtgctgttggctctatcgtcggcttcaccagcatcgtgcagacattgccggaatttcaggccatgctcgatggtgtatttaacttcaacatgcccgccgctctgattctgatcatcgccgtatgcctgattgccgctctcaccagctcctcgaccgcagccattcgcgtggccgtgcccatggtggcggagcgctgcacggctgctgggttatcgctggcatttattcaccgcgtctcctgctttgcgtgctcgatcgttgatacacttccctatggcaccgctgtcatcatcaatcttggtatcgcagatctggacatgaaggaaggctatccccccatgttcatcgctactacactggcgaccgcttgcggcaccatcatctgcgcactctttatgtatctgttccctgctctgccatgatcgtgtgtttttcgaaacatgggaagtttttgttgaataattgcttgacaaataattattaaatggtatcatagtactataaagcgagagatgcagttctatattattagatctgtacatcgcaaacaaatcttatcaaacgtgaaagagaggattatgaatgggttacttaagcattctcgtcggtttcttcctggtcctgttcctcatctgcaaaaaatggcctgctatcatcgttggcatcatcgcaacggcggccgttattgtgatgaactggctgaacttcggacaaaccttcaccgatgtgtacttcaccggatttgccaccatggtcaagtcactgttcccgcctatctttgccggcaacctggttgcacagatctataaccggaccggcgccgtgcgctctatcagcgatacgatgtccaatgcactgttcaaagaagggcgctccaagacacgcacctatgtctcctgcattctcgcgattgtcatccccaccggcctgctcgcctactgcggcatgaacggtctggtcacgctgatcgcattctatcccatcgcacttggcctcatggagcgcgctggcatcccgaagcgctatgtcatgggcctgctctccttcggtgtttatgccttcgcactgaccggccccggaacagcgcagctcgtaaacgtgctgtccatgcaggtcgtcggtgaaggccctgctgccggtctcgtcggcggtctggtcggcgttgtcgtcgagatcgtattcggcactttcgtcctgacgctgatgatcaaaaaagacgttgccaagggactcaagttcgcatacggcccaaacgacatccgcgttgccgatgacaagcaactccccaacttcctcatctcgctcatccccctgctctctgtcgtcattttcttcaacgtcgtgaagcttgacattttctcctcctgccttgctgcgtggctcctttccattattctgctcggcaagtatatgccgaaaaaggacggcagcctcctcaaggaactgctcgacgtgtgtacggtctccggcaccaacgcatttggcccctgcggcatggtcggttccctgttcggctttgtcagcgttgtgcagaccctgccggaattccaggcgattctcaactacatcttcagtctgaatatggctccgttcctcgtgctgatcctttcgatcaatatcgtgggcgcactgaccggctcatcctcctcggctatccgcatcggtatgccgatggcgatgcagcactgcatcgacgcaggcatgtcgttggcattcgttcagcgactgggcgcgtttgcagcctctattctggacacgctgccgcacagctccgccatcatcattaacctcggcatcgccgatcaggatatgaaggaagcatacccgccgatggccgtaacaacgattctgacgaccgcagtcggtacagcggcagtcgcgatttttatgtcgctgttcccgtccctcccgtaaaaccttccaatcaaaaaggcagcctgctcaggctgcctttttgaaaacacgttttttgctcatttgcaatataagtaacgaaggggtcacaaaacacgcataagtacacaaaatttgctgcgcgccccttgacaaatttctgatttatgctatcattctatctacgtagtacttcagatctataaatgtagatctttagtgctaaatttcgaatccgggcgccggatcaatgatcgcagaaaccgcctgtttcgcctcttccagaagattgattgtcccgttctcaatcgcccaggtcacaatgacgccgcgcattgcatacgacagtgcctctgccaatgtctccggatcggtcagattccgaatctgtccggcattctgcgcagagcgaatgacagcagtcaacattttcttgtgataaatattcttaataaaatcacgctgagaatgctctttgagtctgccgacgaagtactgctgggaaacacccgcaccgtagaaaatatcaccctcgcacatgatgtggaagatctcccagatctgcttgctgaaagtctcctgctcgacgatgcggtaaaagttatcggcgtacagctcttcaaaattgttctgcatgtccaggaaaatgtcctgtttccgcgggaaatagtaatgcagcgtcgttttggagaccttcgccttttcgcagatcatcgggatcgtcgtctcgtcgaacccataatcattgaagagctcgatcgccgcattgataatccttgtacgtgtatcgttctgactgcctttcgcgggtttgcgttctctcatttgtgattcacctttttcgttatttactaattgtaaatataataaaaaacgcagcaaaagtcaaagcaaaattatatggaggttagcaatgagcaacgacagcaattttgattcccttttcacccccttctctatcggtaagatggagatcaagaaccgcctggtcatgtcccccatgggcacctatgcagctctaatggacggctccgtatctgatacactggccacctattttgaagagcgtgcaaagggcggtgtcggcgcgattatcaccgcttcccagtatctcacgccgaagttggcccagggcatctacggcacctattttgacagcaagcgcatcatcccccatctgaccggtatgacggagcgcattcactgctatggagcaaaagccatcgcccagctctcaagcggcaccggccgcaacgcgcaccccagtcagtgcggcggcgttccgttctccgcgtccgcagttcccgcggtgttcaatcccaagattctctgccgtccactcaccatcgaagagatcaaggagatcatgaagtcctggcagttggccgctgagattgccgcgaacgccggctatgacgcgatcgaggtgcacggtcacgtcggatatatcattgatcagttcctcaccccgctgtggaacaagcgtgaagacgaatacggcggcagcgatgaaaaccgtgctcgctttgcgctggagatcctgcaggccatcaagcgaggcgcgggcaacgatatgcccgttatttaccgcatctccatggatcatcgcatccccggcggcagaacgcttgaggacagcaagcgcctcattaagattctcggcgaaaacggtgttgacgcattcgatgttgactgcggctgctatgagcaccccgacttcgtgtaccccaccttttaccgcggcgacgcctgcatggagtatgtgtgcgacaccgcacgtgaggcgactgacaaacccatcctcaactctggcaaccacacaccccagacagcaaagcacctgattgagtccggacgcgcggactttgccatgatgggacggccgctcatcgcagacccctatctgcccagaaagctgatggaaaaccgtgaggaagacgttcgcccctgcatccgctgcaatgaagagtgcatcggccgcatttggggccgctactccaagctgtcatgcgcagtgaacccgcaggcgaatgaggagcacgcattccggatcgtcaaaacggaaacacccaaaaatgttgtcgttatcggcggcggtcctggcggcatggaagccgcacgcgttgctgcccttaagggaaaccatgtcacactttatgaacgcaatgaactcggcggaacgctgaatctgcccgctcaggcacagttcaagacccgtctcaaggcgctcatcgagtattacaagacgcagatgcgtaagctcggcgtaacagtcgtgcatcaggagattgatatcgacagccccgtccttgccgctgccgacaagatcattgccgcgaccggagcacactccgtcgtgccgcctatccccggtgcacacggcgcaaacgtgatcgacatcaaggacgcccaccgcgatccagccgcaatcaagggcaagaaaatcgccatctgcggcggcggcctctctggctccgactttgctctggaaatggccaccgagtacggcaaacagtgcaccatcatcgaaatgaagccagacgtggcgatggatatggtgttcatcaatcagcattctctgaagatctatcttaaagacgccggcgtcgtgacccgcaccaacacgcgtgtttccgagatcgttgaaaacggagttcgtgtcatcaatgagcacggcgagcaagaactgatcgaggcggatgtcgttgttgccgctttcggcatggcgccaaacaccgaactcacgaatgcactcaagcagaaatacaacaagaagctcgtctgcgtcggcgactgcgtcgaggtaggcaagagcggaaaagcaattcgcggcggcttctatgccggtatgcagatcgactaattcacaaggaggagatcaattatggctatcatgaaaggctacggcgtcatcgaacccacagtgagttggggctggatggaaaaagagatcccggaacccggtccgttcgaggcactttgttcccctgtcgcagttctgccctgtacttccgatgtacacagcgcacatttccgcaacgcatggccgaaccgcatcctgggtcacgaaggtgtgggccgcgttgaaaaagtcggtgcgatggtcaccgacatccatgtcggagatattgttgcggttcccgccgtcacccctatctggcgcggcaggcaaatcgcagaggggctgcatgaacacaccggtggatttctcgggggacgttacctctcgtccaagctggacggcacgtttggcgaatacttcatcattcccgatgcggacatgaatctagcagtcgttcccaatggtgtttccattaaagctgccggccttgtcggcgacatggtcaccactggcttttccggagttgagggtgcaaatatccagtttggtgatacagtccttgtgatcggcatcggccctgtcggccttatgagcgttgcaggcgcggcgatccgtggtgccggacgtctgatcgccgttgggcaccgggagctgacaaaggagctcgcaaagaagtacggtgcgaccgacgtcgttgactacaaagacggcgacatcgttgcacagatcatggaactcaccaataacgaaaaagtcgacagagtcatcatcgccggcggaacggaaagcactatcaacgatgcataccggatggtgaagtgcggcggcaacatctccaatgttgcaggctacgacttcagtaaggaatttcatcttaccgttgcggatgccggctgccttgtgaatcatgtaacgcttaccggtcgactctgtgcaggtgggcgataccgtctggagaatctgatggcactcatcaaaaacggcagactggatccgaccctgctcattacgcacgaactgcacggctttgataagatcgaagacggcttccgcatgatggatgagcgcaagactccggatactatcaagcccatcgtcattatctaaatcatcttaattcagtacaaataaaggagactacaaaaggagactacaaaatgtttgattatcatggcagagtagcagtgattaccggcggttcgtccggccttggcgttctgtgcgcaaatgcgcttgcagcacgcggatgcgatgtcgtactcgcagcgcgtcgctttgagatcttggataaaaacgcacaggcgctccgcgagcagtacggtgtcaaggcaattcctgtccgctgcgacgtcaccaaggaggatcaggttattgctgcacgcgaactcgtggagaaagaatttggtcgctgtgacattctgatcaactgcgcaggcgaaggccacaatgactgggcgatcgacctcgcgctggaaaaatggcaggccactatcgatgtttgtgtcaccggcctattcctcatgtgcagagaattcggcaagctgatgcgcgagcacaactacggacgtattgtcaatgtcgcctccatgcttggcatgatcgcgctggacagcagcttcggccgcggcatctcagaatactccgcatctaagggcgcagttatcaatttcacccgacaactggccaacgagtgggcgcaatacggcatcacggtcaacaccctcagtcccggcttctttgcttccgaacagtcgcctgtcggccagggctggtttgcggatttcatcaacacctggtgcccgatgaagcgcaacggcagcgaccacgaactggatgcagccatcatcttcatgacctgtgaggaaaactcctacatgaccggcaacaatgttgtcatcgacggcggctggacctgcacctgagcttccttttcgccgatagcaaccattttcaaaacagatcctgctgtggagacttccacagcaggatctgttttcatttcgctgcaagcgcctctatacagtctcaacgtgcaatttctctgcgcaaaaacgcaaaaagagattgaggttgcaccggtaactccgaatcgtcttcggggtatacttgcgaacctcaatctcaaccagatactcttcgacagcactttgcatcttcatacctatgtcctcctcagtatgtcacaacagaggtggccatgtatgtcgcagctgacgccgtgttttcccgcaggaaacgacgtttgaagctgcaaagcgccatgtcatccgtcaaatatgctgttttgtgtctggaaacgcatgcgtttcacaggcagatcactcttcccagttgtgccacacgttctggacatcttcgttgtcctcaaacatgtcgagcatcttctggagattcttaatgtcgccctcatcggtgagcttgatggtgttctgcggcaccatctccacctgcgcgctcagcagctcatagccgtcattcgtgagcgcctcggccaccgatgccacatcgtcgggatcagtatagaccgtgtaaacaccctcgtcgggcgcaaagtcggccgcgccggcttcgagcgcgtcctccatgaccttgtcttcgtcgagctcctgatcctcgtcattgatgacgatgacgcccttcttatcaaacgaccacgacacgcagccggtcgcccccatgtttccgccgtacttatcaaagtagtggcgcacctcggaggcggtacggttgcggttgtcagtcatcgtctcgacgatgatggcgacgccggacggaccgtagccttcgtaagtgatggactcgtagttatccgtgttgccggagccgagcgccttgtcgatcgtgcgcttgatgttgtcattcggcatgttggcggctttcgccttggcgatgacagctgcgaggcgggaattgttattggggtcgccgctgccgccctctttgacggccacgatcatctcgcgggcgatcttcgtgaacgcctgcgcgcgcttggcgtcctgcgcgcctttggttttctgtatattatgccacttggaatgtccggacatagtcacaactcctcttgctaaaatgctttgaatattttagcacactccgggccgcgtggcaagaaaaatccgcatatttgcgcgaaaactacgcctgcgttttgggaataaggagatattgcggcgcctcagccatggcggcatcgtccgtgaggccgttcgtttcgcggatgagccgctcgctcgagcagtagcgcttggcaagcgtccacaggtcttccccgccccagcgcacgatcgtcagcgacggtacagaggcatacgggcaggcgcgctcctgcgccgtcgccccggtgacctgccggaggtcggactcctgcagtacggccgtccgcaccgtcaccgtcacgcggatctgaaacccatccgccgtgaccgtcaccaccggctcttccggctgcacgctcagcagctccagccgcgcgccgtcggccggctcgagcggcaggtgcagacgcttttccatgcaggatacgtgctgctccgtgtccgccgcgagcagccggacgagcacgtcgcagccgtcctccgtcatgccgcagacaacggcccgccgggacacgaccgtcagcgaggcggcctcacacgcaagcgtaccctccgccgacaggcgcagcggctcgcccggctgtaccgtaccggccgctaccgtctcgcgctcgagcgtgagctctgccgtgttgcagtaggcgtccgtcacgcagtcagcctccgcatccgcaaggcacaccgtctgcgcgacaagatggtactccgcctccagcgccgcgccgtcggccgcggcgctcacgttcaggtaggccgccgtgaggttgacggtcgtgtgcagcaggcacggcgatgtgtccgccgggcagtcgagcatctgggaaaacgccgtctcaaaggtctcgaccaccgggcacatctgcccctgcgggagataggtgactgccgcgcacacacgcccctgcaaaatgacgcggctgccggccgcgctgacatcgtcgagcagcacggtctccgtatggcagagcaggcggtcggcctcgggctggccggacaggaagcggtgcgtctccgagacggtgaacgtcttttcctccacggacaccggaatctgcacgcggagcgtttccgtgcgcgtgaacactgcgccgccgtcgccctcgatccggtccgtgagcgcgagctccgtctcccgataagcatgcaggcacaggctcagccgcgccgtgacacgcaccttgcgcgaattgacggcgcgcgcgtccagcgcggtgagcgtacagcgcagccacggccgcacgtgcggcgagagcgtctcgccgctgatgcgcaccttcaccggcagctccaccgggaagctgcgcagagcgccgccctcctccgcgtagaccacatcggccgcgatgctgccctcgatctgcgcgctcttgtccgaaaaatccagattccagaggcagaacgtgccctccgcgaccacgatcgcgccgatgtcccccagcgcatcgggcacaacggcgtccacgctgcaggtctcttcctccgtgcggtcaaacacccgcgcgtacatcatgcgtttctgcttgcccagttgtagttccataaagatgtgctccttgtcgtttttgtacatccttatgccgggcgcgcgccggttatgccgccatcaacagcgcagcagccacacgcctgccgcaatgagcgcaccgccgagcgcaaaccaccagaagccggccggcagcaccagcgccagaatgatgaacacaccggcgaccacgcacgcgatgccgatccagaagcaaatcccccgccgtcgaaacataaagcaccgccctccgcttgcaggttctccctacagtgtatgcggagggcggcgctttggtgcgtcacttcttcttttcccagtcattgacctgggccgagagcgcgtacaggcgcgcatagctctcgtggcgctccggcgcgatcttgcctgccgccacggcggcgaggacggcgcagccgggctctttcaggtgcgcgcagtcacgaaatcggcactggccgatatacggtcgaaactcccggaacgcatattgcagattttcgcacgagatggggtcgaccatgtccacctcaaacgaggcaaaacccggcgtatcggcgacgaacgtatccgctccaagcgcatagagctcgacatggcgcgttgtgtgcttgccgcggccgagccgctcgctgacggccccggtcgcaatgccgaacgacgcatcgagcgcattgagcaggctcgatttgccgacgccggagttgccggtgaaggcactggtcttcccgcgcagtgcatcgcgcagctcgtcgacgccgagccccgtcgccgcgctcgtgcgcaggacacgaaagccgatggagcggtaaatagcatagagatgatccgccgggtcaaggtcgcacttattgaggcagacgaccggctcgcagtcggcattttccgcgatggcgaccacgcggtcgatcagaaacggatcggtgacggggttgacgttcgccgcgatcatgatgagctggtcaatattcgccactgccgggcggatgaacgcattgcgccgcggcaggacggtgtcgatgcggcccttgccgtgcgcatcgaagctgacctccacacggtcgccgaccagcggactgcacccgtcgtaccggaaacggccgcgggccttgcactccacgatctgatcgccggcggccacatagtaaaagccgctgagcgccttgatgatgacaccctgcaccataagcgttgttgctcctttatctcatctttacggttttttcggcccgtcggagacccagatatagaccttgctgtactccgtgagctgtgtgttggccggcgcgctctgcttaaagactgtgccctgcttggcgtcgttggtctctttgtacgtgccgccatagcacaggccgctgctctcgatgcgcgcgatggcggctgactccgtcagctccgacaggtcaggcaccgtgaccgggcgcagctcggggccgccactgacgatcagcttcacgctcgaccctgcggccgccttttcgccgggcgcaggctcgcagctgatgacatactttgccgtcacgtccttggaggcctgaaactccgtcgtgaccgtaaagccggctttttccagcgcggccgtcgccttctcatagtcctcgttgatgacatacggcacatcggtcatgacgacgccggtgctgacggtgagctgcacgttgatgccgtccgagacgcgcatgcggctcttgcccgccgccggatcctgctcgatgatgatgccgtccggcacgtcgggatcgaccgtgtatacgaccgtgaagtggtaatcggcatactgcttgtcgttgacgaccgcctcgtaggacttgccggtaaagtccggcacatccacgcgctccgccgtgcggaacagatcctcaagccagaaattccacagaaacacaaacagcaaaatggcaaagacgccgaccgagaaaatgcccgtgaaataactcacgcgcttggcccgcttgcgccggcgctggtatgcttcctccgtcagatcctgacccacaccgaaaaaggagtcctttttctccgcgctctcccgccgccgctcgacaagcggacgctgctgattgaggtgctttttgcaggcattgagcgctttgagcatctcccccgccgactgatagcgcttgcgcagatccggctccatggcgcggagcgtgatgcgctcaagctcctcggggatgtcgctgttccactcctgcggcggcttggcgctgccggcgatgtgcatgagcgcgatctcctccggggtgtccgcgtcatacggcaggtggcccgtgagcatctcatagagcacgacgccgagggaatacaggtcgctgcgcgcgtcggcattgaggcccttggcctgctcgggcgcgatatagtgcacggagccgatggcctgcccgctgcgctcctcgtgaatgttctcgagcgcggcgatgccgaagtcagcgaccttgaccatgtcatcgttcgtgatcatgatgttctgcggcttgatgtcccggtggacgatgccgtgggcgtgcgcgtgctgcagcgccttgcagatctgcgtggcgtagtgcagcgcctccgtggcgctgaatacaccgtgctccgccatgcgctgtttgagcgtctcgccctcgatgagctccatgacaatatactccgtctcgccgctgtggccgacatcgtagaccgaaacgatattcggctgcgagagcatggcgaccgcgtgcgcctccgcctgaaagcggtttttcagctcggcatccgccgccatctcatcgcgcaggatcttgacggcaacatagcggtgcagcttgtggcacatggccttgtagacgaccgacataccgccgctgccgatgatctccaggatctcgtagcggtcgtcgagcatctgaccgatatagcgattcattgattgttccatagtgatccccctgttgcgcttcagcggaaaagaacgagcgcggtcacattgtcgcgcgcaccgcgtgccagcgccgccgcgatcaggcggccgcagatctgctttgcatcccgcgagccgcggcaaaaatcatgcatctggccctccgacagcgtgttggacagcccatccgtgcacagcagcagccgcgcacccagcggaaacggcagcgtgcggcagtccggctcgacctgtgggccgacgccgacggcgcgcgtgatcacgttccgccgcgggtgacggtgtgcctgctccggcagcacctgaccgcttgcgaccagctcctgcacgagcgagtgatccgtcgtcagctgctgcattcggcgcagcccgaccagatatgcgcggctgtcgccaacgtgcagcaccgtaagccttccgcggcgcacgcaggcggcgacgatcgtcgtgcccatgccgcgcaggtcaggctccgcgcacgcacggtcatagaccgcgcggttggccgcgtcgcaggcgtggcgcatggcgggttcgaccgcgctgcccgccatcatttcgcggcgaaaatccgccagaaacgtggacgctgccaaatcgcttgcgagcttccccccggcagcgccgcccatcccgtcgcagacgacggcgacggtgcagcccttgcgccggatgtgcgcacaggcggcgcgatcctgattctccttgcggacggtccccctgtccgactgtgcaaagcaatgcatgggctctcccccttcaggctcgatgatcggcgacctttttgcgcagctggccgcaggacgcatccacatcgctgccgagcttgcggcgcacggtcacattcacgcccgcccgctccagaatgcggatgaacgccttgagatgctccggcgtggacggccggaacgcgcgctcttccacgtggttgagcgggatgaggttcacgtgcgcgcagacacgccgcgcgtgcttggccagcagcctggcgtgctccggcgtgtcgttcacgccgtcgatcatggcgtattcaaaggaaatgcgccgaccggtcgcttcataataccgggcgcaggcgtcaatgagcgccgccacgccgcggccgtggttggccggcatgatcttcgagcgggtggcatcgtccggcgcgtgcagggagaccgacagcgtcagctgcaggtcgcgcgccgccagatcgtcaaagcgctcgatgaggccgcacgtggacagcgaaatgtggcgcatgccgatgttttccccgtccgggtggttgaccagcgcaagaaagcgcatgacattgtcaaagttatcgagcggctcgccgatgcccatgaggacgatgttggagatcttgctgccggactcccgctcggaatagagcacctcgtcgagcatttccgacggctcaagattgcggatcaggccgccgatcgtcgacgcgcagaacgcgcacccctgccggcagccgacctgcgaggagatgcagaccgtattgccgtgcttgtagtgcatgacgacggtctcgacggcattgccgtcgccgagctgccagagatatttgatcgtcccgtcgatggctgacacctgcttgcgcagcatctcgagcttggagatgaaaaagcgctcggagagcgcggcgcgcaggtccttggacaggttcgtcatctcgtcaaacgacgtcacgccgcgcgcgagccactgaaaaatctgcttggcgcggtatttcggctgccccatttcggcgagggccgccgcgatctcctcggggagcatggctttgatgtctctcattcgtgtctcctcagcttacaaacaaaaaatccgtccgtgccgtgttcctgcggccagaaggtgaacataccgtccgccgtgtccgcccccggcagcggcagcgaaaacgcctcggcggaaaactccggatgcgtgtgcaggaagtcgcgcacaacatcttcgttctcccgcgcgagcaccgtgcacgtggaatataccagcacgccgccgggcttcacgcacggcgcaagaccggtgagaatgtcgcgctgaatggccggcagacgcgcaagctccgccggatctttgaagcggatctccggcttcttgcggatgacgcccagaccggagcacggcacatcggccagcaccacgtccatcgctccgatcaggtccgcatccgggcggcgggcatccatcgtgcgcgttgaaatgcacgtcagccccagccgctcagcgccggcgcggatgcgcttccatttattttcgtgaatatcgcaggaaatcatacatccctgatcgtacatctgcacggcggcggcgaagcttttgccgccgggtgcggcgcaggcatcgagcacgcgcatacccggctgcacgccggaaacgagcgccgcgcagtgcgcggccgcgtcctgcacataaaaccagccgtcagcaaaggcgcgcgcggccgccagattgccgccatggcacagcagcgcgtccggaagccacgggtgcggctctgcctcgatgccgtccgcgtgcagggacgccatgagagcatccgctgtcgttttcagggtgttcacctgcaggcaggccggagcgtcggcgttgttcgccgccagcgcctgctcggcaaacgcataaccatgcgcgtcgatataccgctgtgccagccactgcgggtggctgtagcgcacggcaagatagtccgccgtgcccgcgcccggaatctccggcagcgcgtcccggtgctccgccacacggcgcagcaccgcgttgacaagaccggatgcacgcgcacagccgcccttgcggcagagcgcgaccgcctcgttcacggcggcgcgcggcgggattttatccagcagcacgatctgataagccgacagccgcagcaggtcgagcaccttcggctcgagcttttgcagcggcgttgtgcagtagacggaaagataatgatccaacagggtcagattttgcagcgtgccgtagcagatgcgcgccgcaagcgcggcatcgcgcggctccagctgtgcattttgcaggacggcatggagcgcagcgtccgaccacgcgccgtttttgcgccagcgctgcagcgcagtccaggcggcttcccgggcagtcatggccatggtcagccctcaacgggcagcgtgtgcccgagcaggtagtcggccgccgacatgcgctttttccccggcacctgcagctgcgtgatgcgcaccgtctgcccaccggcgcaggcaaccgtgacgccgtctttcccggcggccacgatcgttccgggcgctttgtgcgtcgtgcgctcggagtaatccgccgcatggatcttgaacgtctgcccgccgagctccgctgttgcgacgggccacggctcgagaccgcagatgtgcttgatgatcgcgcgcgggttctgatcccagtcgatgggcgaatcgtcgcgcgtgagcggacgggtatacgtcgcctggctgtgatcctgcggcgtgcgcggcgcggtgcccgcggcgatatcgcgcagcgtgcgcacgagcagatccgctcccatgacggcaaggcggtcgaagagctctcccgccgtctcgaattcaccgaccggcgtctgagcggtatagatcacgtcgccggtatccatttcgcggtcgaggtacatggtcgaaacaccggtcacggcatcgccgttgagcactgcccactggatcggcgcagcgccgcggtacttcggcagcagcgagccgtggacgttcaccgccccgtagggcgcgaccgcgagcaggtcatccggcagaatgcggccataggccacaacaacgagaatgtccggccgcaggctctggagatcagccagcgccgtgccgtcgcgcatctttgccggctggaacaccggcagccccgccgcgagcgcgatctccttgaccgggctcggctggagcttcatgccgcggtttttcggcttgtccggctgcgtgaatacgccgaccacgtcaaaccgctcgtcgagcaggcgctgcagggacacggccgcaaaatccggcgtgcccataaacacgatgcgcatgcgcctcaccccttcgcctgctgctcaagctcctcgggagagagcatccggatcgccttgtcgatgaacaggacgccatcgagatggtcgatctcgtggcagaaggcgcgcgccgtcaggccgcggccctcaacctcgaaccattcgccgtggcgatcctgcgcgcggaccttcacatagtccgggcgctggacgatgccgaactcgttcggaatgctcaggcagccctcggcgccggtctgctccccggccgtctccacgatggtggggttgatgagctcgatcatatactcctcttccccgtccgggacgttcgtctcgagcacgatgacggcgcggcgcagcacaccgacctgcggcgcggcaaggccgacgccgttggactcggccagcgtctggcgcatatcgtcgagcagcatgtgcagccggggattaaaatccttgacctcgtggcagtgcttgcgcagctgcgggtcgccgtttttgagaatcattcttgtagccatatcgtatctctcctctaatccagcggattgtcatcggcaaaaacggtgacatcgcggaatgatttttctgtattgcagtacatgacgatgttcgccgccgcgcggcgcaccgccttgctctgattgcagtaaagcgtgacgcggtagcggtagcggttgttcatgcgcacgaccggcagcggtgccgggccgagcacctccgcgcgttcgccgatcgtctggcgaaagtaatcgcggatataggcgcagcagcgcacgaccgcattctcctgcgcgccggagaccgtgacggccagcacctcgctgaacggcggcgtgccgttgagcttgcgcagccggatctccgagcggtaaaacgcatcgtaatcctgccgtgccgcctgccggatggtctcgttcgcgggcgtgaatgtctggatgacggcccggccgggcgcatcaccgcggccactgcggccgatgacctgcgtgatgagcgaaaacgtgcgctcattggcgcggtaatcgccgacgtacaggctctggtcggcattgagcacgccgacgagcgtgacgttttcaaaattcagccccttcgtgatcatctgcgtgccgatcatgatggggatgcgctcgcgcgcaaagcgctgcagcagcgcctcgtgcgtgccggccatggcaatggcgtcggcatccatgcgcagcgtctccacgccggggaacagcgcgtggagatccgcctcgatgcgctccgtcccgtcgccgagaaagcgcagctcgccgccgcagaccgggcactgcggatcgacccgccggcggtagccgcagtggtggcagatgagcatttggttgccctgatgatacgtcaggctgacgctgcagttcgggcacgaataggtcgcgccgcactcggcgcaggtgacgatcttactcgcgccgcgccggttgagaaacaaaatactctgctcgccgcggcggagattctcctccagctcgccatagagcacggagctgatggagccggagttgccgttgcgcagttcctgcttcatatcggcgatgatgacgtccggcagcttacgggcattgaaccgatccggcagcgtaaagtaatgatagcgcccggtctcggcgtaatagcggctgacaacgtccggcgttgccgagccgagcagcagcagcgcacggtgctgggcgcagcggaacttggccacgtcgcgcgcgtgatagcgcggcgtgctctcggacttataggtgtcctcctgctcctcgtcgatgatgagcaggccgagatcctgcacgggtgcgaaaaccgcgctgcgcgtgccgacaacgacgcgcgcgagacccgcgcggatgcgtttccactcgtcgtagcgctccgagagcggcaggccgctgtgcaaaacggcgaccgtgtcaccgaaataggcggaaaacgcctcgatcatctgcggcgtcagcgaaatctccggcacgagcaggatcgcgccctgccccgccgcgagcgcctgcgcgatcaggtgcaggtagacgagcgtcttgccgctgccggtcacgccgaagagcagcgccgcctgcgcgtccggtgcgcgcagcagctccttcaggccgtcaaacacctgctcctgcgccggtgtcagcgccgggatcggctgcggctgcccggtgtaatgcaccggacggcgaaaatagggctcggcgtcaatgtgcacgacgccctgctgcacaagcgccttcatggagcttctcggcgcgccggtaaactggcacacttcaccggccgacgcgcggccgatcgtgcacagcagctccaaaatggcgacctgatgcggcgcacgccggcggcggcggatctcctcctgcgcctcttccagcgggacggcgagactggcatactccagctgcttgtcgcgcacgacgcgcttttgcgtgccctccacggtcagaaatttctgctccacgagccagtgtagcgcgcttgccggttctttgtcgccaaacgccgcctgcagctcgtcgagcgggcagcggccgccgtgctccagcacggtctcgagtgcaagccgccgctgcttggatctcccgcactgggccaacgccgcggcctcatccagctccggcgccgcgcagtagaccgtgctgacccgataccagacgccggccggcaggatcgcgtgcagcgcgtcatagatcgtgcagaaaaagcggtcatgcatccagacggccagacggatcagttccggtgagaggatgggctcggggtcgagctggcgcgtaatgggcttgagcttcgggtcatcctccgccttgtccagcgcaagcaccataccctcacacgggcggttcccgcgcgaaaacggcaccatgacgcggcagccggggcgaagcgtatccgccagcggctgcgggatcttatacgtatacggtcggtcgaacgcaaacgttgcagccagaacggcgacctttgcgaccgggatctgcagcatctgcgcgccccccctctccgaaaaaatcaggcgggtactgcccgcctgaaagcgattattccttgtgcacgacctgaaggcggccgtcatacacctcatcgatcgccatggaaaccggtttggtatccagcggctcgcccgcggcctgcgcggcggcggcgatgttgcgcgcgcggcgcgcgaccagattcaccagcagataacggctgccggccttggcggccagctcgctcatgggaggataaagcatcatttttcaagcacctctgtaaaatagtttttccgatcgggatagcggcagcactctgccgtgatgatggcgtcgagctccttggccgcgacgtcgggatcgtcattgatgacgatgtaatcatatgtatacgccagcgcgcactcgcggcgtgcctgcgccagacgctcgcagatcttctgctcgtcgtccgtgtgccggccgcgcagccggcgctccagctccgccagagacggcggcatcataaacacgcggatcgcgtccggccggttctcggagatctggtgcacgccctgcacgtcaatgtccagcaggacatgcatgccctcggcgcagcgccgctcaacatagctcttcggcgtgccgtagcagttgccgacgtattcggcgtgctccagcagctcgtcccccgcgaccatggcgtcaaacgccgtgcgcgtgacgaaaaaatagtccttgccgtccacctcgccgggacgcggagcgcgcgtcgtggccgaaacggaaaagcacacgtcatcccgcaggcgcatcagtcgggcaatgaccgtgctctttccggtgccggacggcccggagatcaaaatcagttttcctgtctggcggttcatgttgcatctcctccggtttcctgatctgaggcctggacacggccctgtaccgcatccggcggcagtgccgaaagcaccgcgtggccggtatccatgatgaggacggcctgcgtctttcgtccataggtcgcatcgatgagcataccgatctcgcggctgtcctgcacgatgcgcttgatgggggcggaatccggactgacgacagccagcagccgctccgcggagacatagtttccgtatccgatgttgatgagtttcaagtccactgctccttactcgatgttctggatctgctcgcggatcttctcaatctcggacttgaggtcgacgaccacctttgcgatgtccgcgttctggcacttggagccgatggtgttcgcctcgcggttgaactcctgaatgaggaagtccgccttgcggccgaccggagagccggactccagcatctggcgcagctgcgcgatgtggctgcgcaggcgcaccgtctcctcatcgacggcaacgtggtcggcatagatcgcagcctcggcaatgatgcgcgactcgtcaatatcggccgcggcgagcaccgcctcgagcttctggcgcagacgcgcctcgtaggccgcagccgtctcgggggcggccgcctccacgtttgtcaccagcgactcgatacgcgcgagcttttcctccacgtcggcgcggagcttcgcgccctcgcgctcgcgcatctggtcatagtcagcgagcgcctgctgcgtcagcgcgaccagaccggcgcggatcttatcctgatccgcctccgccttctccacggacaggatgtccggaaagcgcatgagcgacatgagcgacatgtcatttttcaggtcgtagcgcacggcgagcgtattgagcgtgtcgatataggcgcgcagcagcggctcgttcacacgcaggacggtatcggccgcctgcgaggaatcgatcgtgacgaacacatccagcttgccgcggctgacgtgctgctggatggtggatttgaccgcgtcctccgcgaagaggaaattgcgcggcatgcgcacggcgatgtccagatagcggttgttgacgctcttgagctccaccgtgacgttcaggccctcaacgacgccctttgcgccgccgtagccggtcatacttcttatcattggcttacccttcttatcttaggattcccggatctgaatgatctcaaaagtaatggggctggctttcttcttacgctggtagataacattgaacgccacgccgagcgcaaaaaagccaaagccgatcaaaacacagccgccctcggcccagccgagcgcattgccgatggcatagcccagaaacagcagcacaaacggcaccagatacagcagcgccgccgcgccgagcacgtccgacgtcttgctctcaatgacgaccttctgccccggcagcgctgagaccttattgaccgcctctgcacggatgcggttctggaacacgcacgcctcgcacgactcgcatgtgccgccgcacgccgtgccgcgctccacttccacctccgccacatggcggctgaccagctttgttaccactgcatcctgcgtcatggtatcatcctcccgtaaaatgcacattcacaacgtattccccgatcgcaccggcgtcggagaagccgtccacatagaccttggccggcacggcgaccgtaccgctcgtggccttgtaatttgtcagatcggcgacaacacgtatgttgtccgccgtgatctgcgagatcgtctccgccggcgcgcgcacggtcacgaccagagatgccgttgcgatctccacgtgccggttcgtgccggtcgttgtgatattcgtcgccgtgatcttctcggtttccagtccgcggacggagatgcggaccgttgcctccgtgacgccgctgagattacgcagattgttgtcaagcgggatcgtgaccgtcgtctcgtaagatgtggcaaaactcgacagatcgacagtcgccacaacgagctggttgagcgtctgcagcaccgtcgtatcgcccgcgacctggatgctcttcggctcgatctcgatgacacagttgtcctccgtcgccccggcgccgccgaccagtgagaccgtcagcggcaggtccttgttcatcagcaccggcatggacacgctgaccgtgtcataattgccggtgatctctttgggggtgagcttgttgccgtccttgtccagcaggacatatgggcagttggtcggcgcaatggacttgtccagatccgtgcgcgtgacatagacgcagatgctgtccaccgcgtcgagctcctcctgcgggccgtagagcgtgatggacgacggatctacctggatcggttcggccgtgtagccatccttaacgctgccggtgaacacgcccttcacttcgagcgtcttgttggcctcctgcacgacggagaagctgatcgtctccggcgacttgctcaagacggtgatgctgctcttatcgacattggtcggatactgcagcgaatagctcacctgcatttcgcgcgcctgcgagatgccggacacgtcgatgaccgccgacaggtccgccgagctgaggttgccgagcacgcgccgcgtgcctttcaggcgcacggaaaccgtgtccgcgtcggcgcccgtgacgatcaggccgcgcgtagcgcgcagatcatctgcaccctgatacacgaccttgacattggaaaacgtcatctcgatcgtcgtctcctccgtggacatgatatacgtccacagcaggaacgaggccagcagcgaaatgatgatccagaaagccttactgctgactattttgttgatcgtcgtcttttttgtcatgttgtttctcccgacgaagcggattgagtttctttacgaaatcgacaatgatgtcccagcgtctgcgctgctgctcttccgccggcaccagttcgctgcggaggatcgcctcaaacgtgtccggggacaggcggcgcttgagcataccgtccacggcgatggaaataccgccggtctcctcggatacgatcacaatcacggcgtccgagtgctcgctcatgccgatgcccgcgcggtggcgcgtgccgagatccgggctgaggttcgtgttgctcgtcagcggcaggacacagccggccgccgcgatgcggccatcccggatcacgaccgcgccgtcatgcagcggcgccttgggatagaaaatattcttgagcagctccgccgtcacgtccgaattgatgatggtgccgctgcgcatctgctcatcgagcgtcacgctgcgctcaaaaacgatgagcgcaccggtcttggtcgccgacagctgcgtgcaggcggcaatggtctgcgaaatgacattgtccatgcccagcgtctcgagcggctttgcgccaaagcgcgggagcgccttgctgcccatgcgctcgagcaggcggcgcagctccggctgaaagatgatgacgagcgcgatcaggccaagctcgaccgtcttttgcaggatgcggttgaacatcgtcagcttcagcacacccgacagccacagcgcgatcaggatcagcagaacgccctgtgcaaggcgataggaattcgtcttgcggatgagcatgatgacattgtaaatcagataagcgacgatcaggatatccacgatgtcagaaaaccggatcgtggacaccagcatcgtcagctttgcccagaaggctgcaagttgtgccataagcatttcctcggctgttcgtttccgttttgcaggtgcaaaacgccaatcttatgaattataatattataccctacaaaccggcggatttcaatacataatctgcgttatcccgcgcgcaggatctcgtggaacacgcgcgccgtgcgcgcgatctccgcgtccgtgttgaagggcgacaggctcaggcgcaccgtgccagtctccagcgttccggccgtgcggtgcgcgaccggcgcgcagtgcagccccgcacgcacggcgatgccgtagcgcgcaagctcctgcgccagcagttcgctgtccatatcccggcagcggacggacagcaccgccgtctggcgcgccggatccggcgacgcaaacacctccagccggggctgcgcgcgcagctgcgccgtcaggcgctgcgcgagccaccgctcccgccgctcgatatgctcgacgccctgcgccgataaatagcggatcccggcgagcagccccgcgatgcctggaacgttgtgcgttccggcctcgagccggtcgggcagctcctcgggcatatcctgcagtacgctctgcgagccggtgccgccgcacagcaggggcttcggctgcgcaaagcacagcaggatgcccgtgccctgcgggccaagcaggcccttatgccccggcatgcccacaaacgccgcaccgagcgccgccgcgtcaaacgccacacagccggccgcctgcgaggcatccacgatcagtgggacgcccgcggcggcgcaaagttccgcaatctcccgcaccggcagcagatagccgaacacattcgacaccatcgtgcacacggccgccttcgcacccggcagcgcgcgccggaaggcgctgaccgctgcctcggggtcgaagagcggactttccgccacgcgcacctgcgcgcccagcgcatggagcgggcgcgtgacggagttgtgctcgtagccggagatcacgaccggatcaccgggcgatacgagcgagtggatcgcaatgttgagtgcgtgcgtcgcattcatggtgaacacgacacgctccggctccggaacatgaaacagctccgccgctgcttctctgcaggcaaacaccgtatcggccgcacgcatggcggcgctgtggccgccgcggccgggacttgccatcgtgcgcacggccatggccgtcgcacgcgccaccgacggcggcttgagcaggctcgtcgccgccgagtccagatagatcataccgtcacctcctggtaagtgccatcttccagcaggcgatacaccttaccccgccggatcgctgcgcggtccaggagcgccagcgcacgaaccagacgggattcataaagtttgacgcaatacgtgcatccggtctttgaaacgctttgcggcgctttgagcacagtggcggtaatgcccgcgcgctcgagcacttgcgatgaccgctgtgcataggtcagtgacctgcacatgatcagacagtagcgctgcattatgagctccctcccacatcgttatgccttattctatgcgggagcggcgcaggcgtttacgaaatccgttcgatcaggacgaccgcgtgcgcggcgatgccctcgcgcgtgccggtgaagccgaggccctcctcggtcgttgccttgacgctgacgcggtccacgtccacgtccatgcactgcgccagattgcggcgcatctgcgcgatgtgcggcgcgagcttcggcgcctgagcgagcacggtgcagtccagattgccgaccgtgtatccggctgcgtgcaggcgcgccgttacctcgcgcagcagcgccagactgtccgcgccggcataagccgggtcattgtccgggaaaaggtggccgatatcccccatggccgccgcgccgagcagcgcatccatgacggcatgcgtcagcacgtccgcgtccgagtggccgagcaggccggtctcgtgcgggatgtccacaccgccgaggatgagcttgcggcccgtgacgagccggtgtacatcataaccgtgaccaatgcgcatcatgccccgccgcgcctcctgagaatagactccgcgagctcgatatcgatcggcgtcgtgatcttgaggttttcgtccgaaccctgcgtcacgaccggcttgacacgcagctgctccacggccgagcagtcatcggtgatggccaggtgcttgcgcatggcgttcgtgagcgcggccttgatcagatccgcctggaatacctgcggcgtctgaatggcggtgagcgacgcgcgctcgggcgtgccggtgataacgccgccggccgtgcgcttgaccgtgtcgcgcaccgggatgccgggcgcggccgcgcggctctttttcgccgcctgaatggtctccgtgatgatatcatccgtcacaagcgggcgcgccgcgtcgtggatgccgatgagcgtggccctattgctcgccgccagcacgccggcaagcgaggactcggcgcgcgtcatgccgccgacgacgaccttggtcatcttcgtcaggccgtaccggtcgcgcagcgccgcgatctcctcgaggcgggacgtgcgcgtgacgacgatgagctcatccacggcggcgcagttttgcatcgcctgcagcgagcgcacgagcaccggcacgccgccgacctccatcatcagcttatcgcggcccatccgcttggaagaaccggccgccagaacgaccatcgtgcaaaacggtttgccgatgagcttcgctttgatctttccgtaaagtgccatgggatcgctcctttctcgaatatcgtgcaatgatccaaaattctatagcttcattataatcagaaatgcggaccggcgcaaggtgcgggcagcaaaaaaacatccctgcacgaaccgtgcagggatgtttcaggacggaaattactcgtcgatctcgtcgtcgtcgatctcggggatgttgccggtggcctcgccggtggcggacacttcgtagaccagagcgtcagcttccggagcatgcggcttcttcgccgagcgctcgcgcaccggggccggctcgggagcggtcagcgcgcggatggacagggagatcttgtgcttctcctcgtcgatcgcggtgatcttcgcatcgacaatgtcgccgacggtcaggacctcatcgggcttgccgatgcggcggttggcgatctgggagatgtggatcaggccgtccacaccgggcagcacctcggcgaacgcgccgaaaggcatgagcttgacgatggtgaccttcgccacatcgccgacctggaaggtggacatgaacttgttccaggggttgccgttaggatctttgtagccgagggagatcttgtggttctccggatcgaagctgatgacgtaaacatcgacctcgtcgccgacggacagcacgtcggacggctgcttgatgcggctccagctcagctcggagacgtgcaccataccgtcaatgccgccgatatcgacgaacgcaccgtaggacgtcagggacttgacaacaccgtgatagtgcttgccgacctcgatctcgctccagatcttctcggcgcgctcgcggcgctccttctgggcgacggcacggatggaaccgacgacgcgcttgcggccgcggttgacctcggtgatcttcaggcgcacggtctggccgacgagctcggacatggcagcgtccttcggcaggccggactgggaagcgggcacgaacacgcggatgcccttgacggacacaacgatgccgcccttgttgtcctcggtgactttgccctcgacgatctcgccgctctcctgtgcctcttcgatggcggcccagttcttcacggcgtcgagacgcttcttggagagcatcgcagtgccttccacgtcgttgacgcgcacaacgctcgcctcaatggtgtcgccgacgtgcaggacgtcttcgaccttgatgccgtcgtcggtgaactcgctggtcgggatgaagccggaatacttggtgccgatatcgacactgatctcggtgccagaaatggccacgaccgtaccggttaccttttctccattatatataggcttgagagatgcctccagcatttcatcaaaattttcagtctccgtgggattttcttgagtcaggatctcgtcactcatcttttgttttacctccttaatgatccatgcaggcacggaggccccggctgtcaggccgaccgtatccgcatgtacgaacgcgcttgtatcaagctgcgctgcgttttcaataaattgcacgtttgcacacgcgctgcggcagatctcgtagagatggcggctgttggcgctgtggctgccgccgacgacgaccattgcgtcgcaggcgctggccatctgcgcagcctctgtctgacgtgtaaacgtagcaccacatattgtatcaaacaattttgcgtttgtacactgtttttttatgattttctgacattccagcagtttctcttgcgtttgggtcgtctggatgacgacagtcagcggttttgcacagtcaatggtgccgtcggcaatacgcgcggcgagctccgcagcgtcattgaccacgaccggagaaacgcaccagccgcagatcgcccgcacctcggggtggccggctgcaccgatgatgaccggctgccgcccctcgacggaagcctcagctacgatctcatggatgcgcttgaccttcgggcacgtcgcgtcatacaccgtcgcgcccgtgtgctgcacggcctcaaactccgcgcggctgacaccgtgggagcggatgatgacggacgcgccctgtgggatctgctccgggccgtccacgaccgtgaggccctcggaccgcaggtgctgcaccacatcgtcattatggataagctcgccgaggctgtagcagttttgctcggcagcaagcatttcctcggccatcttcaccgaccggctgacaccgaagcagaagccggccgacttggcaaccatgagtttcttcacgcctttccctccactccgaagcgtgtgcggatagccgcgcacacggcgtcgatgctctcatcgagcgtcaggtcgctcgtgtcgatgtgcacggcgtccggcgctgccttgagtggcgcgacggcgcggtgcgtatcgtcataatcgcgctgctcgagctcgcgcagcacgtcggcataagactcctcaatgcccttctcctgcagctggcggtagcggcgctgcgcgcggcactccgccgaggcggacaggaagatcttcagcccggcgtccggcaggacgaccgtgccgatatcgcgcccgtccatgacggcactgtgcgtgcgcgcgagatcgcgctgcatatccagcaaaaacgtgcgcacgactggcagcgccgacacacgcgaggcaagcagcgacacctccggcagacggatcgtgtccgagacgtcctcgccgttgagcagcatccgctgctcgcctgcggcgtcataggcaagctcgatcttcagctccggcagcagcgcctgcacggcggcggtgtccgaacagtccgcgccggcccgctcacaggcgaggccgaccgtgcggtagatcgcgccggtgtccacatagatgaggccgaagcggcgcgcagccgcgcgggcaatcgtgctctttccagcgccggacgggccgtcgatggcaacggtaatgtgtgtatccaaaacgttcatttcctttcgtgcgttatgtgcaggccgcatttccggccacatagccggtgctccatgcgatctgcaggttgaagccgccggtataggcgtccagatcgagcacctcgccggcaaaatacagcccgtgcacgagcttagagcccatggtgcgcgggttgacctccttgagcgacacgccgccggatgtaataatggcctcatcgatgggccgcgtgccgatgaccgacaccggaaaatgcttgaacagctccacgagccgatgccgctgctcgcgcgtgataacgttgaccttcgtatcctccgggatgccggacaggcgcacgagcaccgggatcatggcatggcctgcgaggtcatagagcgcattcttaaagtcgcggttggcgtatttctgaaaatcgcgcaggatgcgcgcgtcgagcttcttttcgtccagcgccggcttcagatcgatggacaggcggtatttgtgccgcgaaaagtcgcgcatgtgcgcgctcgccgacagcaccagcgggcccgacacgccaaagtgcgtgaagagcatctcgcccaggtcggagtaaacggccttgttctgctcatcgtagaccgtgagcgtcacgttgcgcagggagaagccctgcatctcggcgcaccagggatcctcggattccagcggcacgagcgaggcgcgcgtgggcgtgaccgtatggcccagccgctgcgcaaaccggtagccgtcgccggtcgaaccggtgagcggataggacaggccgcccgtgcagatgacggcggcatcgcagtcgatcgcgccctccgtggtcacaacggcggagacggcgccgtcctgcgtcaggatatccgttgccgcagcgtgcacgaccttcccgccggcgtgcgcataggcgcgctcaagggcgttggcaacgtcgtgcgaccggtcggagaccgggaacacgcggttgccgcgctcggtcttgagcggcacgccaagcgattcaaacagcgccatcgtgtcctgcgggccgaggcggttgagcgcgctgtagagaaagcgcccgtcgcccggaatgttggcaaggatggttttcacatcgcagtggttcgttacgttgcagcggcctttgccggtgatgcgcagcttcttgccgagcattttgttcggctcgagcagcacaacatgaagcccgcgctgcgccgccgtgagcgcgcacatggacccggccgcaccgccgccgatcacgactacatcagctttcaacagtcccatacacctcgtattctttccagacggtctccagctcgcggaacgtctcaaacgtgcgctcccgatcacgcgcgctgacggccatgatgagcgcattgatcaggctcatgggtgcgacgagcgagtcgaggaaggacaccatctcactcttggcatacaggcacacgtcggagatctcgttgagcggcgagaccttgctgtccgtcatgccgaggcagcgcgcgccgtgatcgcgcgcaaacttcatggcgctgatcgtgcgcttggaatagcgcgggtagctgatgccgatgatgaggtcgccctcgccgatgcgcagcatctgttcgtacacctcgcgcgcggcgatctccttgacgaccgtgacattatccagcagcagcttgagatagatgccgagaaaatccgccagcgtcgtggacgtgcgcatgccgatgatgtagatatgctttgccgagaggatcatatcgactgcctggtcaaagttgtcctgatcgacctcgtcgagcgtggcctgcagattgttgatatccgcgcgcagcaccgccttgagcacgtcgtgcccgtccatggtgctctcggccgcctcgatgcgttcgaccgaggtcaggcggttgcgcacaatctcctgcagcgcttttttcatgccagggtagccgcgatagccgagatcggccgcgaaacgcacgacggtcgactcgctcacgccggtcacttctccgaggcgcgcagccgtcataaaggccgccttgtcatagtttttcagaataaactgcgcgatggtgcgctggcccttggaaaaggagggaaatttatgctccaaagcagacaatatatccattttcatatgttcaccctgtaaatacgcatttttaccgccaagctgcggcacatttttttattttaagcaaatttgcaccactttgcaagttgtttttgcaatttccaggagaaaaacttgcataaaaatttttgtctcaaaggtgagatttcaggtacgtgatctcctgctccgtcagcggccgccactgacgcggcgcgagcgtgccgagccgcagctgcccctctgccacgcgcacgagccgccgtacacgcagccccgcgagcgcacacaggcggcgcacctgccggttgcgcccttcatggattgtgacggacagccggcctggcgcgagcaccgtcacttctgccgggcggacacgatagccctccagctccgtgacggcatgcatggtctctgccgcggctgcgaggtcgccgccctctacgtccacctcatacgttttggggatctcgtgtgacgggtgcatgagacagtttgcgatctccccgtcattcgtcagaatgagcaggccctcggaatcgagatccagccgcccgaccgggtagagccgctcccccgccacggccacaagatccgccaccgttttgcgcccgcgctcgtcgtgcatcgtcgtgacatagccgcgcggtttattcagcattatgtaccgcttcggggcgcgcggcggcagcggccggccgtcgatgcagatgacgtcagtctccgggtctgcctgcgcgccaagctgtgcggttcggccgttgacggtcacgcggccggcggagatcatcgcctccgccgtgcggcgggaggcgacgcccgcctcggaaatgcacttttgcagccgctgctgcatggtcatcacctcaggatacaggatagtagtaggaagaaaagtaacggcaggcgtgcgtccacagccggccgagccgcgcgagcggcgtgatcttcacgtccgggtcgagcgccgcgggttctgcatagcagagcgccacggagacgctttgcccatccggcccggtcgccgtcagtatgcccgcctgcgcgccctgctccaccggcgcaaacgtgaagcgcggcagctccgccttcagcgacaccgggtcatccgggtgcacgagcagataggcaggccgctccggcgccgctgcgcagagctccaccgtggcggagagcaccggcacggcgtataccggcgtgtcgccggcaacgcagcggtactcgtagttttcaaacgcccagtcgagcaggtgcgtgtggtcgttccagtcgtccggatccgagagcgtcacgcacacgaactgcgtcgtgccgcgctgcgcgcaggacacgagcgtccggcccgcggtcttggtgtacccggtcttgacgccgaccgcaccgtcatagctgcgcagcaggcggttgtggttcacgagcgtctgcccgtccacgttcgtgctctttgtggacacgatcgcgcggaatgtctcattttccagagccgcacaggcgagcttcgccatgtcgcgcgccgtggaatagtgcccctcggcgtcaaggccgttggggttttgaaacgcgctgctggtcatgccgagcgcgcgcgccttgtcgttcatcatgcccgcaaacgccgccacagagcccgccgtgtgacacgcgagcgcgatggcggcatcgttgccggacacgagcatcaggccgtagagcagctcctcaaccgtgtacgtctcgccggcgcgcagatacatcgacgagccctcgaccgccgtgtattccggcaggatctcgaccggttcgtcgagcgcgcagtgttcgagcacgacgagcgcggtcatgatcttcgtcgtgctggcaatgccgagccgctcgtccgcgttcttttcatagagcacgacgccggtctcgggatgcacgacaatggcggccctggccgcattgtccgtcccggcggcatgtgcgcgcggcgtgaaaagcaaagaaatggccagcacgcaggcaaggccaaaaaacgtccgtttcaaaacaagcaccaccctttccaagtttcgggcggtgcttattatgggcactttcggtgcggtttatgctttgtcggccttacgctggtcgataaactggtcgatgcggtcgatcacctgcggggtcatgtcgatcaggcggtcaaacgtgttcgatgccggcggcatgacgttgagcatgcgcacattgccgtccttgacgatcagaaagcccatcggctcgaccttgacgcctgcgccgctgccgcagccgacaccgtttttgttctccttcatcgggaactccgacccgccgctggcaaaggcgaagctgacgcgggacagcggaatgagcgtgatgtcgtccggcgtcgtgatcggttcgccgacgacggtgttcgtgtccaccatttccttgatcttgctcatggtcgcagtcatgactgcactgatttcattatccattgctgaccttcctttcctgcgtggccggcgcggtctttgcgcgtgcggcccgggcctgtttcgcgtgcattttctgtttcaggaatcctgcgccgaacgccagcgcgataatgacgatctgtccgatacggatcgtgcagacgatgcgcgcgtcgatgcgcggccgctcggcctgaaaatccacaccggtctgaatatcccgctcgtcgatgcgcagcgcccgctccgccagcggcgtgagcgcgccgagcgcggcgttgacatagccaaacgccagcgccgtgtcgtacggatccgacgcgccggagacaaacaccagccgcagcagctgcacacgcagccgctgccgaaagcgatccagcgcctgcaggccgagctttgcaagggcgaggatcgtccggatatccggcggggcagatttcttcttcggcttttccttcttcggttttgggggctttttcttctttggcttctggtctggcggtttcggcaggagccggagccggaacgggccgatgcgcgccgcgagcgaaaacacatcgtccgcgtaggcggcgtccacgccgaccggcagcagattcagcaccgtcagcaccagcgcgaccgccagtatgatccacagggccgtcaatcggcatcactcccctgtcggtttttcctccgtgtccgtcagctccatctgctcgccgcggccgcgcagctccgagatggcctgttcgagcttttccgcgccctcgtcggacgacagatccggcagcacgggcagctcatcgagcgactgcatacccatggtgcgcagaaacagcgcgctcgtgcggtacagcgacgggcggccgggcgcgtcgagcttgccgcaggcctcgatgagcccgcgctcgagcagcgttgtgaccgtgtaggcactgtccacgccgcgcacctggtcgatgtacgcgcgcgtgacgggctggaaatacgccacgatcgccagcacctccagcgccggctgcgagagcttgggcggcttgcgctgctcgagcgcgcggcggatatactccgcatactccggcgcggagcacagctgcagcagatcattcatctgcaccaagcgcataccgcagcggttttcctcataggccgcggcgagctccctggcggccgagacgatcgtctgcgtctcctcgccggtgacgagcgcgatgcgcgacgccggcacgggatcgcccgctgcaaataaaatggcctcaatgaccgaaagtaattcctcgtgttccataaaaatttctcactcaacaatggattccagaatatcgtccgtgacgccgccggtgaagcttgccacatattcaccgttttgctcggaaagcatcagatggccgaggctgcacagctccagcacggacaagaacgtcgccacgatctcgctgcggctggtgcactggctgtagagcgtgctgagcggcatgctgccccgctcgcgcagctggtcaatgagcgtgcggcatttgtcgcgcacgctgtagacgatgcgcttcggcgccgccatctgcagcgcatccgtcgccgccgcgccgccgcgcgtgaacaccgacagcagcgcgcgcagaaggtctgcctgctcgatgcggtagcggtattcccccgctgacttcggcagcggctccggcgggcgcgagagatagtgcaggccggtctgggccgcagcgtcgagcatcggcgtgacggacttcacagccgcataggtgtccttgcacttgagctgctcgagcgatgcgatgagctgctcaagctctgtgacctccttctcctccgtgaggagcatacgggtcttgatatagagcagataggacgccatctgcacgaactcgcttgcgatctcgagatcgagcttttccatggcgttgaggtattccagatactgatcgaggatctccgaaattttgatgtcccggatctcgatcttgttcttcgacaagagcagcaggatcaggctcagcgggccctcaaaatccgccatctcgctcttgtcgtggatgacgccctcgagaaaataagttggatcgtccggcttagccgaagatgccgataagttcatagccccactccgcaaatacaaagagtttgtcaaacgcggcctccgtcaccgtggtgagcggcttgccgagcacgccggtggcgaccagcacgagcagcaggatcatgccatagcgctcatagcgcatgagcttggcatacgccgcgtcgggcagcagcgcaaagagcaccttggacccgtcgagcggtgagaccgggatgatattgaaaatggccagcgccagactgatatatgccgtcagccagatcatgtccagcagaaactgcaccgaatacagcgcccggtacagcaggccgtacaaaaacagaaacaccagtgcgagcagcacgttcgacaccggccccgccagcgccgtgagcgccatgccgcgcttggggctgcgaaagcgcatcatgttcaccggcacgggctttgcccagccgaatttgaacacgaccatcatcagcaggcccatcgggtcgatgtgcttcagagggttgagcgtgagccggccggcgtcctttgccgtcgtatcgccgaggcgataggcgacatagccgtgcgacacctcatgaaacgtgatgcacagcagcgacggaacgaccgacagcacgatattcagcagatatgaccagtcgagcccgttccagatcgattgcagggtgttcacgcgcacacctcccattcctacaaatttgcattatatcaagtccccgccgaaaaaacaagtgcagagcgcgcgaatacacgctctgcacttcgggcagttaagaatgaccccgccatcgccggatcgaatgcgcagcggggggctcgagggggcaaggcccgcctcgaatccaatcagccgccgcagaaagctctgccctgcagagctttgcggcgcagagcgcgcgaatgcacgctctgcacttgggttcatccaatggcgcgaaagatctcgccgagcagcgcctcgcggccggtgcccttctccgccgaaaacggcaggagcaccgcatcgtccggcagcaaaagcgtggcccggatgcgcgcaaggttcggctcgatctccgactttttgagcttgtcgcacttattggccacgacgaccatcgggcagccggtggaatgaaaccacgcagccatcgtctcatcgtcggccgttggcttgtggcgggcgtcgacgatcatgacgccgagcgtgatgcgcgcggggtctgcgaagaagtcctccatgagcttgccccagcgtgcgcgctccgtcttggcgacgctggcgtagccatagcccggcaggtcgacgaagtatgcccggccgtcgatgcaaaaatagttcacatggacggtcttgccgggctgcgagccgacgcgggcaaaattcctgcggttgagcagccggttgatgaccgaggacttgccgacgttcgacttgccggcaaagacgatgcacggcaggtcggccgcgagaaagccggacgggctgacggcggacttgagaaactccgccttattcaggttcagtgtcgccatggcagtctcctcactggcgcaggttcacgttcgccgcgtcgccgggcgcatccttgtgcgccgccttgacggccgcggcaaaccggcggccgaacgcgacatccaggatcttgtccacgtggtcggtcgtgacgaacttgagcgcactgcgcacggtcgggtcgatctcctcgagatccttttcgttctcacgcgggatgatgaccgtcgtaatgccgatgcgcatggcggccatggtcttttccttcaggccgccgatcggcaggatgcggccgcgcagcgtgatctcgcccgtcatggcgaggtcgcggcggaccggcgtattcgtgagcgcggagatgaccgcgatgcagatcgtgatgccggccgacgggccgtccttcgggattgcgccctccgggaagtggatgtggatatccttcttcttataaaactccgggtcgatgccgagcatctgtgcgcggctgcggatataggtgacggcggcctgcgccgactccttcatgacgtcgccgaggttgccggtcagctccagctttccggtgccgtcgagcacggcggcttcaacatcgagcacttccccgccgacggatgtccaggcaaggccgcgcacgaggccgacctcatcctgcgcatagacgtgctccggctcaaagcgcgcggggccgagatagttggccacgctgcctgcgcgcagctgcacgcttttgcactcgccgagcgcgatgcgcttggccgtcttgcggcagacggcggccagctcgcgctcgagcacgcgcacgccggattcgcgcgtatagagcgtgatgatctcgcggatggcatcgtcgctcacgcgcagctgcgacggcttgagcccgtgctttttgcgctgcttaggaagcagatgctgttttgcgatctggagcttttcctcgtcggtatagctcgagagctggatgacctccatgcggtcgagcagcgggcgcgggatggtgtcaagcgtgttggccgtcaggatgaaaaacacatccgacaggtcgaccggaatctccatgaagttatcgcggaagtggtcgttctgctctgcgtcgagcacctccagcagcgccgacgacgggtcgccgcggtaatcgctgccgagcttatcgatctcgtcgagcaccatgacggggttcatgctaccggcgatggtcaggccgttgatgatgcggccgggcatggcgccgacatacgtcttgcggtggccgcggatctccgcctcgtcgtgcacgccgccgagagagatacgcgcgagcttgcggttcgtggcgtgggcaatgctcatggcaatgctcgtcttgccggtgcccggagggccgacaaggcacagcacgccgcccttgacatcgggcgcgagctggcgcacggccagatactccgtgatgcggtccttgaccttttcgaggccgaagtgctctttgtccagcacctcgcgcgcggcgcgcacgtcgagcgtttccttcgtgcgcgtgttccacggcagctcgaggcagatatccagataattgcggatgacagccgcctccgatgagccgaacggctgctttttgagccggtcgacctctttgagcagacgctgctcggagtcggccggcaggtgcagggcgaggatcttctcacggtagtccgcgctctcggagtccggatcgtcggactcgccgagctccgcctgaatgatcttcatctgctcgcgcagcagatactcctgctgcgtctgattcagccggtcctgtgccgcctcctcgagctgatgctgcaggccgagcacgctcgtctcgtgcagcagcattttcgagagcttggacagtctccggctcgggcgcgtctcctccagcagctcctgcttctcttccggacgcaggaacacgtgctgggagataaaattcgacacgaacgccacgttcgtgctgccgagcacgctgatgaccgactccggcgccatgttgccggacgcggtaacataggcatcaaacaaattgcagcagtgacggatgagcgcctcggtgcgcgccgttttccgctcttgcacatccggcatcggctcgacctcggccacaaagcagggcgtgtccgtgcgcacggccagcgtccggccgcgctcgatgccctcggccatgacgcggatggtcttggtgccgggctgcttcatcatctgcttgatgcggcagaccgtgcccacgccgtacacatcgtccggggtgggaatgtcggtcgcaatgtctttctgcgggaccaggtagatgatctgatcgtcgctcatggccatgttcagcgccgcgatggacatgctgcgctcgacctcgaaggtcagcatcatgcccggaaacacggtcaggccgcgcagtgccatcatgggcaggctgcgccgggcggtgaattccgcatgatccatagtcgttgtgttatccattcagattcctctttcgctcaggggtcttgggggcaggaggcaatggctcactgctcccggcgctcgatgcgcggcggctcagtgccgtccacgctcgccgcggtgatggtgatcttggcgatcgtcgggtccgacggaacggagtacatcaggtccgtcatgacgccttccatgacgctgcgcaggccgcgggcgccgatctccattgcgatcgccttatccgcaattttacccagcgcttcgtcttcaaattccagttcgacgttatcaaactgcatcagcgcctgatactgcttggtcagggcgtttttgggctctttgaggatacgcaccatgtcctcgcggctcagactggccagcgccgtgatgaccggcatgcggccgatcagctccgggatgatgccgaacttcagcaggtcgtgctgctgcacgtttttcatgatctcggtcaggtcgcgctccttggcgctctggatctcggcgccgaagcccatggacttcttgtccatgcggcgctcgatgatcttatccacaccgtcgaacgcgccgccgcagatgaagaggatgttcgtcgtgtccacctggatgaactcctgctgcgggtgcttgcgtccgccctgcggcgggacgtttgcgaccgtgccctcgagcagcttgagcagcgcctgctgcacgccctcgccggagacgtcgcgcgtgatggacgtgttctcgctcttgcgggcgatcttgtcgatctcgtcgatgtaaatgatgccgcgctgtgcgcgctcgacgtcaaagtccgccgcctgcaggagcttgagcaggatgttctctacatcctcgccgacatagccggcctcggtgagcgtagtcgcgtccgcgatggcaaacggcacatcgagcatcttggccaaggtctgggcaaagagcgtcttgccgctgccggtcgggccgatgagcagaacattgctcttttgcagctcgacatcgttatcctgatcgccgcgcaggatgcgcttatagtggttgtacaccgccacggacagcaccaccttggcacggtcctggccgatgatatagtcgtcgagcgtggcgcgcatctcggccggcttcggcagctggtcgcgccggagcgtgacctgcgccgtggagacgctctcgggctgatagccctcatcgatgatgctcatgcacaggcgcacgcactcatcacagatatagacgccgttgccggcaacgagccggttcaccagcgactgcggtttgccgcaaaaagagcagcgcacgctctttttctcgtcatttctggccataaaaacctcacatttcctacatttgaaacagggagggaacggcggttccctcccctgacagattatcgcttataaatgactttgtccaccagaccgtaagcctgtgcttcctccgcggtcatgaagttatcgcgctcgcaatcctcggcgatggtctcgaccggcttgccggtgttctctgcgaggatgtgattgaggcgatccttgatgcgcaggatctgccgtgcctggatctgaatatccgtgcactggccctggctgccgccggagggctgatggatcatgatctccgaattcggcagggccagacgcttgcccttggtgccggacgagagcaggaacgcgcccatcgatgcagccaaaccgacacaaatggtggaaacatccgccttaatgtactgcatggtgtcatagatggcgaggcctgcggtcacgctgccgccggggctgttgatataaaactggatgtccttatcgggatcctgtgcttcgagatacagcagctgcgcaacgatcaggctggcggttgtatcattgacctcctcggacagcatgatgatgcggtcattgagcaggcgggaaaaaatgtcgtacgagcgctccccgcgggaggtctgctcgacaacgtacggtactaaactcatggtacgctcctttcgatgtttcgcttatccaagagagcataaccgttctgcccggaatccaaacagctttcggggaattactcggctgcctcttccttggtctcagcggcttcttccttcgcctcgggctccttgtccaccgcggtgtcgcggatgagctgggcggccttgcggcgcttcatatccagaacgatgatcttctcgtcgacgtactgcttgatcttgtcgacttccatcttgtactcttcggccatcttgttgtaggtctcgtcgagttcgccctcgtcgagctcgatgttctcggccttgacgatcgcgtcgagcagcagatcggtctgcagctcaaacacggcctgcggacgcatgatctcctggaaggtcttctcgtccaggcccatggaggcgagcacctgctcacgggtgagctcggggctgatgcccatggtggagatgtagttgcgcagctgctcgtcgagcttggccaggatcatgggctcggggatctcgacggtcatgttgtcgacggcggccttcatgaggcgggtcgcataatcagactcctgctgctcggtaaactctttctccagatcctcacggacatggtcgcggtactccgcgatggtctcgtagtcggagatgtccttagccagctcgtcgtccagttccggaagctcgggctccttgacgctcttgacggtgactttgaaggtggcctccttgccggccagcgcctcaacgtagttctcggggaaggtgacgacgacatcgcgctcgtcgccggccttcatgccaacgatctgctcctcgaagccgggcacgaacgtgttggagccgagctcaaggtcataatcctcggccgtgccgccgtcaaactgctcgccatcgatgaagccggcgaagtcgatcgtgacatggtcgcccatcttcgcctcgcgctcaacatcgagcaggcgggcgttgcgcttctggacattgtgcatctcttcgtcgaccttgctctcgtcaaacgcttcgtggttctgcgggacctcgaggcccttgtactggccgagctgcacttccggatacatgccgacctcaaaggtgtagatcagctctttgtcctcggtgactttctggtcgatcaggctcggcgcgccgacgcactcaaagccgcagtcggcacggcctgcctcgaacgcatcctccgccagcgcctcgatggcgtcggggtagaacacttccttgccgtacataccctcgatgacggcgcgcggggccttgcccttgcggaagccggccacgtagagatggttcttattctttttatatgcttcgttgaccgcattgtcaaagacatcggccgggaccttcacttcaaaggtcgccatgtttttttctttcttttcgatgttctggatgttcattgggtttcctcctctaatcatttatcgccgggtgcattgtttacgtgaaatttgtcatgaaaagaacatgcctaaatactataacagattcatcctctaaaatcaacacctgtttcacggaaggatcctgcgcgggcaaaacgaaatataatccgccgacagcagccggaactccgtgtcgtgatacatgccctgaaaggcgctgcggcagccgcggctgtggatgtgtccatagcagcacagcggcacgtgataggcatcgagcaggtccagaatctccgggcattcatagccgagatacttcggcgggtagtgcagaaagacgagcttcatcttatcccccgccgctttgagcgacgtctcgagcctgccgacctcgcgcagcatgatcttccggtcgtgcgcctcgcccctggcctcctcataaaaccagccgcgcgtgccgcagatggcataatcgccgtagaaatagcagttattattgagaatgtccatggtgtgcatatcgtgcgccgcaaaaaagctgtaagcctttttcgcggtgctccaccagaagtcgtggttgcccttgagcaggatctttttccccggcaacgcctcgataaactgaaagtccggcagcgcctgctccatggtcatgccccaggcaagatcgccgcagagcacgcagacatcgtcgtcatgcagggacgaaaagccaagtttgattttttctacataattttcccacggcccgccaaatacgtccatgggtttatctgcgcccagcgacagatgcaggtcgccgattgcatacaatgccatttgcgttcctccgtatattccgcgcccggctgcacacaatagattcgaccggcggatgccggaatctgatctggaggcagaaaccatgagcgatcatatgaacgactgctgcgagtacaacgttgcgtgcgacgtgagcaactgcgcctacaatgcggacggcaagcgctgccacgcagaccacattcaggtcaaaaacacccagggcacctgcacctgcaaggacgagacgttctgcagcaccttcaccaagaagggccgcgcggcgttctgacccggcggacgggtctccccgtccgttacatattatttcaggaattcgtccaccgtatgcagcatctgcgccttgtccacacaaccgccgaagcgcaccggtcgcgcgtccaggccggtcagcggcgcgggcgcgtcgatctgcgtctcgcacgacaggcggcggatcaacgccgggccgaaggcgtcggccgtgccgccgatgccgcgcagcacctggtcgcagaacttgaaggggcttgccgtggacacgacgacggacggcgtcgtgtcgccggtctcgcggcggtaatcatcgagcacgtgataggcgaccgccgtgtgcgtgtcgatcaggtagcgatggtcgcgccaggcatggccgatcttctcgcgcgtctggatatcattgcagaagccgccggcgaacacctcttggatctttgccttgagcgcatcggagaccgtgtagcttccctgctcgcgcagctgctgcatatagcctgcgacctccacgtcgctgccgcagagcgcatagagcaggcgctcgaggttgctcgacacgaggatgtccatcgacggggacgccgtcgtgtggaacggacggttcttattataagtacctgtgcggatgaagtccgtgagcacgttgttcgcattcgacgcgcagatgagcttgcccaccggcaggcccatttcctttgcgtaccagccggcgagaatgtcgccgaagttgccggtcggcacaacgaagttcagcttgtcgcccatggcgatcatgccgccggtgacagcgtcgcagtacgccgaaaaatagtagacgatctgcggcagcaggcggccccagttgatggagttggccgaggacaggaaccagccgcgctgcgagagctcggcggcaaacgccttgtcgccgaagatctgcttgacgccggtctgcgcatcgtcaaagttgccgcgcacggcgctgaccgcaacgttatcgcctgcctgtgtggccatctgcagacgctggatctccgacacgccgctgtaggggtagaacacgaggatcttcgtgcccggcacgtcggcaaaaccctgcagggccgccttgccggtgtcgcccgaggtggcgacgaggatgcacacctgccgctgctcgccgcactttttcaggctcgccgtaagcaggtacggcaggatctgcagcgccatgtccttgaacgcgcacgtcggcccgtgccagagctcgagaaacgccgtggcgtcatcgagccggtgcaccggcgcaacggccgggtcatcaaactggctgccgtaggctgcggcggtgaagcgctccagttcggcgtccgtaaactcgctcagaaacgggcgcatgatcgtcacggcgcgctgctggtaggtcatgccgcacagcgcctgaagctgctgcgcggacacctccggcagcgactccggcacgaacaggccgccgtccggcgcgaggccgcaggcgatcgcctgtgcggcggaaacgatctgctgatgatctcttgtgctgtagtagttcatatctgatccctcgttattcaaaagcattttcgatctgattgatcctgcgttgacggtgcggcgtgtccgcgtcgccataaatttcgatcacgtcaaagcgcggctgcagctgcgtctcgtgctctgccagccagagcgacgccgccgtgcggatgcgcgcctgcttggccgtggtgacatacgcgcccgcgcgcacgaaccggtcggacgcgcgcagcttcacttccacgaacacgacatagtgccggtcggccgcgatgatatcgatctcgccgaagcggcagctgtagttgcgcgccaggatgcggtagccgcgccggcgcaggtacgccgccgcgcactcctcgccccaggcgcccttcgttcccttgactgcaccggccatatcagtgcatcttcttcaggaacgacggccggtggatggggcttggcccatacgcccggatggccgcatagtgtgctgccgtgccgtagcccttgtgtttttcaaacccatactgcggataggtctccgccatccggcgcatatagcggtcacgtgtgacctttgcgagcacggaggccgccgcgatgtcggcacacttgccgtcgccgccgacgatgcatcggctcggcacggtgatgccggtgttccggttgccgtcgatgagcgcgagcgccggctgtggggacagctgcgcgatggcccggttcatggccagaaacgttgcgccgaggatgttgcgctcctcgatctcctccacggtcgcaaacgcgatgccgtagctcagcgcctgcgcgatgatggtatcataaagcgcctcgcgctttttctccgagagctttttcgagtcgttcaggcccaggatctccagccccggcggcagcatcactgccgccgcgcacacgggccctgccagcggtccgcgcccggcctcatccacgccgcacagcggctcggcgtccggcgtgcgcagctcgttttccaatgtccacagatcgacctgcgtcatgcttccgcctccggcatctcgagcgtgatgcggccgagcttgccgccgcgatattcatcgagcagcacgcccgccatccgctcaaggtcatattccccgccggagatgagaaagccgcgttttttcgccgcctgctccagcagctcgaagccattgcaggccgggtcggggcggaacttgtagcgctgctccaccgcgtcgggataaaaccgtgcgagtcggagcatgaagttagccgcgagcgtctcgcggtcgagcacttcggccttgatcgcgccggtgatggccagcagctcgccgacctcctgactgtcgaaccgcggccagaggatgcccggcgtgtccagcagctcaaggccctgatcgaccgtgatccactgcttgccgcgcgtgacgcccggccggtcgcccgcggcggccgccttgcgccgcgccaccttgttgataaaggtggacttgcccacattcgggatgcccagcaccataacgcgcatcggccggccgacctgccccttggcagcgtacgcctcgatcttgtcgcgcagcgccgtgcgcaccgcgccggcaaacccgttgacgcccttaccactgcggctgtcggtctcaagcacggtcatgccctgtcgctgaaaggctgtgtgccagcgcgccgtcgccttcgggtcggcgaggtcggtacggttgagcacaacgatgcggggcttgtcgcccgcgagacggtcaatgtccgggttgcggctcgccatcgggatgcgcgcatcgaggatctcgcacacggcgtcgacctgcttcatgtgctcctcgatcatacgctgcgcctttgtcatgtggcccggaaaccactgaatattcagcttttcaaaatcctgcgccatgttattttacaactccgatgttcttgaccggaaagagcgtgaagtatacccggcccatgatatagcgcgtatcaacgcagccgaggcgcgcgtcgcggctgtcggtagaggcgttgcggttgtcgcccatgacgaacacgcagccctccggcaccgtgatcttcccctcgaaattctcgcggtcgtgcacgggctcattgacatacggctcgtcgagcgccttgccgtcgacgtagaccacgccgtcgtcaaagtcgatgtccacggtctgtccctccgttgcgataatgcgcttgacgatgggttcttgcatgagcgtctgcttgcgcaggacgacgacgtccccctgcttcggatgatagaacaggttggagatgacgaccttgtcgctctgctcgagcgtcggcaccatggagtggccgacgacattgaccatgcgcactgcaaacacaaacagcagcacgcagaacaccagcgcgaagatgatgcactggatccaatcgtatacttcggcgcggctcttggcgccgctcggattcttgctgtccattttcaaaacctcggtgtaaaaaattcgtaaattacattatacacgctcagacccattttcggcaactaaaattgtgtgaattcttttccggcggcatcgcaaaaacgccccgaaaatgcaaaaaagaggccgaagcctcttttttgcagtatccacttagataagctctttgaccttggctctcttgcccacgcggtcgcgcaggtagtacagcttagctctgcggactttgccgcggcgaacggtctcgacggacacgatcgtgggagagtgcaccgggaaaaccttctcgcagcccacaccgtaggagatgcggcggacggtgatcgtctcgttgatgccgccgtgcttcttggcgatgatggtgccctcgaaagcctgggtacgctcacggttgccctcggtgacgcggacagtgacacgcacggtgtcgccgacgcgcatggccggcagttcgggtttcatgtactgcgcggtcagagttttgatgagatccataatgaaatccttcctttatcagacgttcataccggtggacagagccggtcacggcagcggaccgtcgttatcttgcgaaacactgtttcgcacaagccataagataatagcacatcccgcgcgggtttgcaagtgttttcagcggaaaatttgcatatcttccgtatagacctcctgccgcgtgaaggcggcaaagtccggggccagctcgggcgcgagctgatgcagcgccgcgacgaggtggtcagggttgagcgtcgggtcctgtgcggagacgacggcctccaccgtcacaaaccgcgcctccggccgcacgtgcagctccgagatcgctggcacgatgtccatctgtccctccccgcgcttggtcttgcgggtgatgacgatggcgtcgcgcgcgtaaaacgcgcggagcttttcggccatgtccgcaggagcggcgttgtcatattcataccgcccggtcacgcgcagccacttgagctcacgcaccttgcgtccgccggggtacgcctcgagcgcgcggatgccctccggcatgaccgccgtgagccgctctggcagcgcggcaaggtctacttcctcgcgcagctgaaagtccatcagctcgcacacgctcccaacgccgacggacagcggcagcaggatggagatgagcgcgtggggattgaagccctcggaatatttcagcgggcagtcggcgcgcaggaacacgcgctgcatcgtgcgcatgaggtcgaggtgcgagatgtagatcgcacggccggtcttttcaaaccgcagtctcagcttttcaggcatcgcacttgcccccttccgtcatgagtgcgagcgcaccgcagccggtgcactgcctgcggcagtcaggcgagagctcggccttgtaggcctgctcgcgctcgtgccacagatgcgcgcggtgcacgcccatattcacgatgtcccacggcaggaactcatccttcccgcgctcgcggcaggcatagaacatcgggtcgacgccgcaggcgtccatggccgccatccagcggtcgaacgagaaatagtcgccccacgcctcgagcttgccgccgcggcgccagacctcttcgatgacgtcggcaatgcgccggtcgccgcgcgagagaacggcctcgacgaagctggtatccgggtcgtgccagttgtaggtcacgctcttggccctgatgctctcgcgcaggagctgcaccttgcgcttgtactcgtccatcgtcacctgcgtctcccactggaaggggctgtgcggcttcggtacgaagcacgatgtgctgaccgtgatgcgcacaccgcgggccttgttcgtcgcgtgcatacgccatgtgtgcagcacctgattggcgagctccgcgatgccgaccacgtcctcatccgtctccgtcggcagtccgagcatgaagtagagcttcacgccgttccacccgccctcaaaggcaacctggcaggaatggagcagatcctcctcgcgcacgtttttgttgatggcgtcgcgcaggcgctgcgtgccggcctcgggcgcgaaggtcaggccgcccttgcgcaccttctgcaggcggctcatgatgtccatggaaaagttgtccgcgcgcagcgacggcagcgcgagactcatgctgcgcggctcgcagtattccagcagcccgtcgcacacctcgtcgagcgggcggtagtcgctgctcgagagcgacaggagcgtcgcctcctgatagccggtgtttttgagcgattcgatgccctgccggatgatcgtctccggtttgcgcgggcgcaccgggcggtagacataccccgcctgacagaagcggcagccacggatgcagccgcgaaacagctccacgttcacacggtcgtgcacgatctccgtgctcggcacgatggggtccgtcggataataacaggcgtcgagatcctgaatgatgcgcttggtcacgcgcgcgggcgcgccgtgcgtcggggtcaggtcgtgcagcgtgccgtccgggttccagtgcgggacgtagaacgacggaatgagcacgccctggatcttcgccgccgtttcgagaaaccgcgtcttactccagccggcctgctgcgcctgccggaacagcgccagcacttcgttattgacctcttccccctcgccgatgatcatgaggtcaaaaaacggggccatcggctccgggttgctgcaggccgtaccgcccgcgatgacaagcggcgtcagctccggccggtcagcgctgcgcagcgggatgccggccaggtcgagcatattgagcacggcgggatatgccatctcgtagccgagcgagaacgccacaacgtcaaattcgctgacggggtcgccgctctcgagcgcgtagagcgggatgcccgcgcggcgcatttcggcctccatgtcgccccagggggcaaacacgcgctcacaccagacgccgggcatctggttcatcgtggcatagaggatgcgcatgccgatgttcgacatgccgatctcataaatatccgggaagcaaaaagcgaggcgcaggtccacctccgccttgtccttgatgatctggcggtattcaccgccggtatagcgcgcgggcttctgcacgcgcggcaggatgcgttccagtcgctgatccatactacactcctacatatgatagtaggagtattttacatcatgttttcccccttggcaagtcattcccggctgcaaaagcgccagccacgcgccaaacgcgcccagtgcgagccccatgccgcgtgcaaacagcaccacaccgagtcccatgagcgcgaccggcagcaccagtcccagcacgtccagcagccgctctgccgcacgctcgcccgccagcgccgcgaccgccgcctgcagcgcgcggccgccgtcgagcggcagcaccggcagcagattcacgcacgaatacagcaggctcagatccgccccctccgggcagccaagcccgcgcaggatgcaaaacagccccgcgccggcggcagggccggccagcgccgccgcgaccgtgcgcaccgcgtcctccggcggcgcgcagcgcagcgccagcccgcaggcctccatgcgcaggccgtagatctccgtgccgcacagcaccagcgccgcaacatggcccagctcatgcaccgccacggcgagcgccagccgcgcgcaccagcgcagcggcagcagaaaatacagcccggcaagcagcgcgactgcgcccgggcgcacatcgagcgcaaagcgacggcgcttcatacggcggcgaggtaaaactccggattgcagtaatacccgtcatgcatcagctcgaagtgcaggtgcggcccggtcgccttgccggtcgcgccgacgagcgcgatctcctgccccgccgtgaccgtctccccggcgcgcacgagcagcttgctgcagtggccgtagagcgtcgtgtaaccgtcggcgtgacggaccttcacatagttgccgtacccgtcgtcctgcccggcggcaagcaccgtgccgtcagcaaaggcacagaccgccgtgccggaattggccgcgaaatctgtgccatagtgaaatttcaccttgttttccaatggatgcagccggtagccgaagccggacgaagtatagcccgcgaccggtgacgtgtgcgcaaacggcagctcgctgaccgcgtagctgacattggtcggcactgcatagccggaatagaccgcctgctcgttgagaaatgcctcgcgcgcggcaagggccgcctgcagctgcgggctctgcgtcggttcgggcgtcggcgtcggtgtcggctccggggtcggttccggcgtgggtgtcggcgtcggctccggtgcgggcgtcgaccagacggacatgttcacggcgggcagatactgccgcagctgttcgtcctgcgtctgtaccggcgcgggcgcaaacacgctgcggatctcggcaaagacggacttgtaatcatcgtctgcattgatggccggcagcagcacctcgcgcgcatctgcggccgccgccggggcgatcatcttcaccgccgtcagcagcaggaataccgccgcgcacaaataaactttccagcgcttcatgcacatcacccccgataaaaggagtgtatgcagacaggcccggttttagcacgacggcagcgccgccgtaccgtccggcccctgatactggccgaccatcgccatgtccacaacgccgtaaatacacgagatgagcgcgctgccgaacgccgcaagaaaatatttgcggtagcccgcgcgcacattgtccctgagcatatccatggtcatcctcctcgaaaaagaaaaaagccggacaaggaacagacatttcagtctgcgccttatccggctgccgtttctctgaacagctcgccctccagcgaacgagggtgttatgccagaaggaagatggattgtcaagcgggaaaatggcttactcaatgccctgctgtttgcaccagatgtccatgacggtgtccaccggcaggagcttgaccaggcgcacctgacggcgcaccgggtggccgagaatggagacactctttttcttcttgagatcctgcatggcctgcgccgccacctcgtctgggccataccacttgtccacatagcggatatactcgtcatggtgcgcgacctgctggaactcggtcttgatccagccggggcagacgcacatgacatggatgccctgcgggcgcagctcgcggccgatcgcgcgcgacaggctcaggacatagctcttgctcgcgccgtacaccgcctgatacggcaccggctgccaggcggagttcgagcccatgttgatgatgctgctgccggcgtgcatatacggcaggctcgcgtggcacatgccagtgagcgcgagcgaattgagctgcgcgctggcgagcagcttcttgcggtccgcctcggcaaaggggccgaacacgccgcagccggccgcattgaccagcatcttgatctcgggctgctcctgctcgagcagggcctgataggcatcgatgctgctcagatccgagagatcgagcgcgatcgggcggatggggttcgtgcacttgtcgcgcagctcctccagccgctcttttctgcgggcaatgacccagatctcgtcatagcgcgcgtccttgtccacagcgtagacgagctcccggccgataccggcggatgcgccggtgatgacagcaatgttcatacgttctcctccagaatgaaaatatcggtaactctatcataccgaacttgcgccgtctgcgcaagggattggggaataaaaaatcgctgcgaacgatgcaacgtccgcagcaatatggtcggagtgtgtttatgaatcatttcattaaaactaggactcactataaaattgttggcataaagaaagagcgccagcaagttttttacttgctgagcgctcttgaaactgtgccggagattgccgtccggtcggctattctcttttcaggcggcatatcgccgtcaccgtcctttcataaccgcatgggtcttatttttctgttctgttcagcgtgaatttctcaccctgtgtcgccgtacccttgcctgcggtcagctcaagccccgtatcgatatacgccacctcgtactcgcagtcggtcagtgcctcagcttcaaagtcgataaagagtgtcctgccggacagcgtgaaacggaatttatacggtgcgccggaaagccgcagctctccgctgccgtcctcacggaaggtatagacgcaactcttgtcggacattgcaaagctgccgtagatgctctcgtcatgagggctgctctcggagcggccgcagctacggcacagcagcacgatgcccgctatgagcagcaccgccgcaagggcgcaggcagtaagaaagagcgtccttctccgcttttgctttttgatcgccgagcggcgcagctcacgcctgcggagcatttctgcctcggtcatgggtcttttctgcggcggtattctgttatcctgcattgcttcaccttactttacttcaatattctgacttcatccaggaagtcaaaaagcatcggcagaccggtgccgatggggtgcgtcctcccacagacacatctcgccggtcagcgtgacgcagggcttggtcatacgaaaaaggaaaaatctgtccgtggcggcgcgcttcaaatggagcagggacacctctccgtcgccgttcggctggggatacacggtcagaatgtggctgtcgcttgccgccttccggtcaaacccctgcatatccgactcaaagtaatatcgtgaatgcccgttctcacggaaaacgaacagcagctccatgccgtcggtggtgcagcggtcacagctgtaggtatgcccttcttgtaagggcagcagcaggccgctgaagggaattctttccgaaacagtcatggcagcttctctcctttttcttatcgtagtgtcctgtagtccttccgaaaagcggcaacgccgtgattgccgcctttcggaaaggggcttgctgccgagtccgctttcaggaaaataggcggtggcggaatgatccgtcaccgcctattgtatttaggatatttcgatttcggaagcgtcggcttattcagcctcggattcctttctctttttgctgttcagacccagcacggtcagaacgccgccgcagacgaacagagcagccagccaaccgatgaggtttctgctgtcaccggtctgaggaggcttggtggagtcgtcctttcctggcttatcggtgttattatcaccgctgcctgtattgccggtgttgccgccgtcggggagcttgtcgatgaccgtgttctcgctgcgctttgcgccgcaaacggtgcattcctcgtgcttgatgccggtggcctccttggtagcggctttgtcgatcacccactggaagctgtgtgctgccgtgtcggccttatcgtcgcactcgcactcatgccagtggttggtgccgtcatacttccactctgtaccgtagctgtgggtatgagtgctgcctgttgcggggatcggtgcggtttcaagaaccttcttgcagacggtgcattccttatgcttagcgccgtcggcggtttcggtagctgccgtgtcaacgatccactcgctggcgctgtgagccgcaatatcggccttgtcgccgcactcgcactcatgccagtgattggtgtcgtcatacttccaatccgtgccgtagctgtgggtatggctgggaggcgcatccttataggtggcctcaatcttcacatcattaccgggcatggtgaaggtggtggtggccttggtggcgtctgccagggtgacattgccctccagcacgacccacttgtcaaagaccttgcctgcctccggtgcgtccgccgtaacggtcacaacggtgttctgctcgatcttgtcggtgatgggggtgccagcggcaacggaggccgtgcccttgataaccgtgagcgtatacgcctctacggggttttcggcgaactccgcctcgatcgttacatcgtttgcgggcatggtgaaggtggtggtggcgctggtctcgttagccagtgtaatgccgcctgccttaacgacccacttgacgaagtgctttccgtcaggagcctgtgccgtaacggtgacctcaacgccctccatggcgcgggtgatgggtgtgcctgcggcaacggttgccgtaccgccggtgacggtaacggcgtaatcccgcagggcggggatctcggtgttctcgctgcgcttggcgccgcaaacggtgcattcctcgtgcttgatgccagtggcctccttggtagcggccttgtcgatcacccactggaagctgtgtgctgccgtgtcggccttgtcgccgcactggcactcatgccagtgattggtgtcgtcatacttccactccgtgccgtagctgtgggtatgcgtgctgcctgttgccttgtaagtcacgatgacggtcttatccgcatccattgtaacgtccagaacattggcaagcacgggcgttgcagcgccgtttacggtgaccgtgtcgatctcatagcccgcgtcgggagtaaaaatgatcgtttcggtcgagcctactgcaagtcctgtcttgctcgcggagatcgttccgtgaccgccgtttacctgcgtcgtaaggctataggtcgcaacgggtgcgtccttatagcttgccgcaagcgcaacatcgtttgcgggcatggtgaaggtggtgacggcgcttgcagcatcggcaagagtcacgccgccggacttcacgacccacttgtcaaagaccttgccatcgggaattatcgccgtgacggtgatctcaacgcccgcagcggcggaggtaatggcattccccgatgcagacgccgtaccgcctgtgacggtaactgcatactcggtcgcagcgggattcttcacaaacttcgtctcgccgcagtcggtgcgccggcaggtgtagagaattccatcgctcttgccctgtgttgccggtttgccgccgtcccaatcatggctgagcttatcgataacatgaccgtagcggaaaatctgtccgcagcctcttgtacactgatagtcgccgctatagcctgtggtggtgcatccgggcttaacctcattgaccagcttgtagttgccggcaatttcgtggagggacggggtagcggagcccttctttgagatcctgtcgcacgctgtgcagtattggttaccggaatagcccttctcggtgcaggttgccgctcttacatcgcgcagctcaaaggggccgctatgtttgaagtcgccggtctcgccctttacggtgccgccgcaagccgtgcagcggtagtcgccctcataggcccggtgccggcagtcgcccgaattggcgttatagcgtttgccgccatggcttgcatccgtggtagccgagttggtcgtaccgtagtagtacagcggctgcagtggaccggtatgaccggcgtttgcaggcgggtaaatatccgaaccggcactgatgacttggccgcagtctgcgcaggcggtgtcgccggtgtagcccttgcggtcgcagacctgcgccttcgcattgagcaccgtggtgccgccgctgtggtcacagcctgcatagaccggctcgaagaagaattggccgccgccgggggcgcccatggcgctgaacgccgggatcgtgcagccccactcgagtgcagagccgttattgacgagcttaaacaggctcgcgacctcggtgctgctccagtttttcttaacaggacttccgtcattgtattcgcggagatactccaccttccagccgatggctttctgaccgtttctctcctcgggataaaggcggatcttgtcgcctggcttgacgatcatacgggttgcgcggccgtttttcaccgtcacaatggcggtgtcctttgtccaatcgccgtcaattttttccgtctctttgtactcgcagacgctgcattcggcctccatgccgccttcggcgcctgcggtgtcagggcacaaaaccacgttccagcgaccccagctgtggggaaccatgatgaactcctcgcagccgggaaccttgcacttttcggggtgggcatagccggactcaaggatgagctgctccaccgtcttggtcgagccgccgatgttgaaggtatactcatagatactgccgaagccggtgtagtcccagttccagccgtaatcatggacgtgactcttcacaaaaacgaaatagtcgcagacggtgcagacgagcatgtcaactctgccgccgcctaccgcgtcatagcttttttcaagcttaaaggtatgcgggaagatgcgctccttggagccggaggtcatataatgtgcttcgtattcttctgcgcctgcttcaaacaggcacgcgagcttgtggccgtcgcttttgcgaacgctgcctacggtagtattatgggtattcccatccttatcgacccaagtgaccttgtattccggcgttctcttgccgtcgtcggtgtacacaggctcaccggcctgctgatagctgaaggcatgggtggcagtcagctttgcctccgccgttttcatggtgtccgaagcgtcgccctttctgccgatgacgcagtagtaggagtagtcctcctgacaggcctgggtggaaaccgacatcttcagtgtagaggtcgtcacacccatgtaaaacctaccctccggcagcttgtagggcgccgccgtgggatgctcattatccttccgataccactgataggtcaactcgtcgcctttcaggcttcttgccgagacagagaaggtgaccgggtgattttcatagaacagcaggccgttttccggctcttcgttataatcatcgtagatggaggtcttgcacttgacgcccttgggctggcgggtgatgacgatggagctgccgctgatgtagccgcagaccttgcacacgcccttggcgtcatattcatggttggcggcattcagctttttaccgtcgcaatagcggcaggggtgccagtgccgcgttccgtcagctgaccaggacgaggaagcgatgtgggtatgcccggcaccgctgtgctccgctttcagatgatcttcaaaatcagagtcgctgaagcaccagtcgtcatgatcgcagcccatcgctttcacggcatcgaggcagcagtccttgcagcgctgatcgcagccgtcctcgcaggggtcgctgtcgcagaagcacaggccgcagtcctcgcagaagtgatccgcatagtccgtatccattgcacacattcccgcggagcagtcggagttgccctcgcagcactccttgcacagctcgcaggtttcgcagaactcgtcctcgtcttccttatccgtgacccagccgtcgcagcccgggcagatgtgctcttcccactcggcgctttccacgcaggtctcgccgtccgggcagccgccggcatcggagttgtcccggcagcactccttgcacaggccgcagtcctcgcagctctccttggccagcaggcattcctcgcactgctcgcaggccgtgtggcaatcgacgcagtggatgacgccggtatcatcgtcgtccacgcactcgtccaccgaaccgaagcaggcgttacacagcgagcagtgcatcgggtcgctgtcatcgtttgcgcagtcgtcgcagaagccgcaggtgtcgcagatggttatggagcagcagggacccttatggcattcgccgcacagctggtcatcctcgccgatgtagcacttggcgcaggtggagcagtgcgtatcctccatgcagtcggcgcatttaaagcactctgagcaccagtagggcgtgtcgcccaggcacagaccacagtcgttgcaatgggtctcaacccagcaatcgtagttgcagtcaatggtgcagaactggcagtcgcagcaattctcagcccagtggtagtggtcgcagttggggcaatctccgccggtgtcgtagtcgtcccaaaaggcgtgggtgggaaccatcagactcggcatcagcgagagcagcattataagcaccagcaggatgctgacgatgcgacttcgtgtgttcgtttttgtcatactatcatttcctccctcaaaatcattttgaagatttgtctatgcgttttgtgttgcctgatttaaacactgtcgatgaccgaagcaaagtagttttcggataccgaaccgaagagaaaagcgtctatcagaccctcgcgctttgcctgccgcacctgctcgatcaactctccgtctgtatcatcatccacaaagagaatgacacggcagttttccgtgtttcgttttaccttgtcacagattgccattcgttctttgaacatccatggtgaatacgccttgacctccattaagagcacgtccggtcgatgtgttttgcaccactcggcggtcgtgtcaggcgattcggagatcacgacctgacaatcgtccagcttctgcatcagcattcgctccatggtttgcgcatggatatcgctctgaatatccagcacgatctttttcatccttcaccaccgccttgtctatacacaacgatatttatacacattttattctacggattttttaaggcttgtcactggcacaagtgccagtaacggagcgaaaaaaatgttttttcaaaataattctgccttttttgcgcaaagtaccccttgacctgctcggtcaaggggtactttgcatttattcgtccttcaaagtcgttaccatgagcttattttcaattgcggtcgcaacgagcgcctctcggttttcaaacccgccttttcccaccatatcgtccaaattccagcgaacgccgtttttggagatgcccaatttatcggctatctcctgataggtgaagccctttatataaaggcgcagtatgtccaattgccgcggcgaaaatttatcggacattgtgccctccatctcgatggcgggtgaggaatcgggaaagagcttttcgcctgccagggtgcgctttaccacgctcatcaattcctctgtaccgtggtctttataccacaggctgtcggctgcgcccgctttcgctctttgcagcacctgcggatcgacaagcgaggtcgcggctactatcttgatttgcggaaaagcctttttgatgcgctccgcggcggcaagaccggagtgcttgtgctgcgtctgcacatccataaggacgagctttacggtggcgtcgcagtgcttttccgcttcaaaggcgtcacggaaaacgccgacaagatgaaactcgccgtctgccgcaagacgatcgacaaagtgcttttggatgtacagatcgtcctctacaagtatggtgcttatcatagctcattctccttttcgggaatcgtgatgagaagcgcaaagcgcggctcatgggaaatatgcatctcgccgccgtggctttcaatgctgtgacgaagcgcggaaagtccactgccctctctgatcggccccgtgggcactctgccgttattggttatggtaatgtcgtggcaatgattgcgctcggcaatgcggatatatacctcattcccgtctgcgtgcttgatgcagttggtcacgcactccttggcggcggcaacggtcagttcctcggcggcggtatcgcgcggaagatagccctcgacctcaacggctacgccgagctgctttgcggtctgctgcacctcctgcatcgtgccgacggaggtgacgcggttgcttgccagcataccgacggcgttttgcagggcttcgagctttctctcggtgtcctcgccgctgccgatgatgtcacgaatggtcaggaggctccgcccgatggtatcgtgaatatagacctttaggtcaaggctttccttctccttgacatcgtcctccatgcgagcgtacatcttcctgagctttcgattgacttctgccagttctttatttatttcctcttgcttttggtagccgttatacagctcggttacattgtgcgccgttatctgttgccagcggtcatcgctctccacggtgatagtttgtgtgcgaaactgccagacggtcttgtcgggcaggatgtagcaatcatccttgacggttacggatctgtccggcacgctcagggcattttccatatcgcttttgatttgcagctcgtggccgcaaagggcaaaggacagcctgcgcatacggttgttgcacaggatgatcctgccgttcgggtcagcaaagcagatgcccataggcagcttatccgttgcttccttaatggagaacggcgagagctcgttctttttacggcggtattcccgcggcagagcaatggcaaagtgaactgccgcaaggaaaatggcagcggcaaatatcagccacggtgcgcccagcagaaatgcgtccccgatattatcgggatctgcccgggaaacggagaacagcagtgggatcatcaccgccataaccgccagactcagcaggctgcgcaccggcttattgctgcgaagaagctgatacataaacagcccgatttcaaggacgatctccacaagcatgataaacggcagcatagtctgccaaaattcagaaagggaagaaaatgcactcatttcctgtcaccttctttcgcttcaaatacaaggcgctggtattcctcgtcatcctctttttcacagcggatactgtctccgcttgccaaagcggaaaggtcggccttgcagcacacatttagtgacaagcgcaagccgtttgcctttatgaggcttacctgtatgcctgttaaattcaaaatatcggcttcaataaccgattcgtaaaaatcaaatacagcagtcgccgttttgccggagagcatggaaagagactcgtccacatagagcgagctgcggacgcccaacagctttagcgtttggagcgattcattgaaggcacggtggagttccgttgccgctattttaatatctcggtcggtaaggagcgtcagatgcttgcggcgtttaatatagctgcacagcacggcaatctcggcaaggagcgttttggcgctgtcgggatcggtgcttgagattcggcggtattccttagtgagctccgcaatgcggtcgatctgcgtctgcgtagcggaacgcaggaggtcatacaggcggttttgctcctccaccttgcggcgcttagcttcgcgcttgtattcataacggagtatttcgttcctgtcggcaagctcgtctgcaagaagctcagagttctccttgatgtcacgcaaagccgacacatcctctgtccatacggcatagccgccgtcaacaggcatggtgtgaacggtcaagccgcccatcgtgaccgggctttgctcggcttttttcatcgtttcctttgagataggcgcagtgtttacagctgcataccgaacggtaaagtccttgtcagtaatctctgccgatgtgccgacagaggaggcaaacaagtccacataacggctgtttgaatgtatatatccgcaggcgatgcaaaactcaaaggtcagaatatacatcacactttggaacgcggcaatatcgccgaacaagtggagcagccaatccgcacccgcatagtaaagtgcgctgtaaacaatcgccagcagcataggaacaatgggaagaaagtggagccttcctttttgcacacggcatttgaaaaacataattacgagtgcggcaaaggcgcacagcacctgccagcctgcaatcatgaagtagcctatcgagtaaccgttgtttttgtctgtccacacggcggcgtccttcggaaaggtaaatacgaattggtgcaagtcatttgtaagcacgagcagaagcaatacgccggagatgatccacagaaccgacattcccttgggaaatttgtattcgtccggctttcccaatgacatggcaatcagcagtgccagcataggcacaaacagcatgggcagatagaacagataccacaggtaacggacggcatccggctgccagaatataaaatactttgccgaacggactaccatccatatgatgagcagtactgcggtgaccgtcataaacctgcacacctgcttttgcacgatccgctgacggacggagagcccccaggcagcgaataggccaatatagataaagctgcgcagataggaaaacagcatcgggtagaagctgcccctgcctacaattcggaagcaatatgccagtatcacggcaagtacagcgatgccgcttgttatgatagtattctttttctgttcggtcataaacagaccccatttcgccttcattcgtttttgtttttccttgggtataccttttcaaattaatctatagcataaatccgtctgtttctcaactgcctcttataaggctttgcacaaaagccacactttttacccacaacagagaaaaagggcggtctttgacctgcacaagtcgaactgattccatcttatactctgccttgatagagttatttgtctttcctttctgctgtagttatttttcagttgggtaagttcactttctccttccgtcatgacaggtggcacctgtcacttcgtcgtcgcaaactccgcactattcgttttgctaaagagtttgtcggatatccttttgttcgccgcctgacctgcgacatcgttgtccatgcagagatagacggtgtcgatattggaattcgctttcagcatttgaaacagcacctgatccccgacacagcgggcggcagcgtagctgtgactgcgccaattttccttgtgcagagaaataaaggaccgcatatctgatttctcctttttagggtaataaaaaaggcagatagatttttgctttctatctgcctgtgtatctgatatttacttttcgggaattcaagtctatccacaaagggaaaacggcgattttacatctgtgttttggtacagagaaaaatcgccgtttgggtagcaaaaaagcccgatatattcgggcttttcgcaggagacatcttttttgcctccacattatggtcggagtggcgagacttgaactcgcggcctcatggtcccgaaccatgcgcgctaccatctgcgctacaccccgatgcagctttttcattataatgataacgcacacggttgtcaagtatcaattctcatttttacagagaaatatgcgaaatttgtcgattcttgttttcggaagaaatgtttctttctgttattttcatcttgacagcattccggaatcccactataataaaaccactgcggtcagccctgtcttgcaaactttgctgactacatccttggagactgtgcactgctgccagtctccttttttctttctttcaatgctgcgaaaatataaaaatgccgcgacgtttgtcgcggcatttttatggtggacgatacaggactcgaacctgtgaccctccgcacgtcaagcatggtgtgcattgccactatgcattggtattactgcattgcgagatatggcgcaaatatatatccccatgattatccctatgccaccgcagtttgtcatttgatttgctgatacagtatcctgactcgcttccctcgctgctgtagtatccgctgcacacgattgtaatctttgacagatatgatgggcgcgtgacgtcccttgtacagctggcccttatagctgttatagccggcgtacaccgggcaggtaagcacccgccgaatggactcggccgtctgcaccttgccacgcttcccagtgtagccgcgtaatctgcacagctcggcaacggccgacagattgcggtattccgtgtaacgatcgaaaatataccgcacgcgctccgcttccgctgggttgattttcaggctgtcctttccgtcgaggtcataaccaagtacttcgttgcatgttcgctttccctgcgctgcgcgttccgcaatcgccgcgctgacacgttcggccgtaaattctcgttccatctgggcaaaaaccccgagcatacccatcattgcgcgcccggtcggcgtggtcgtgtcaaaagcctccgtatagctgattaacccacagttgtgcgccgcaaacagctcccacacgctgtataagtcagcaacgctgcgcgttaaccggctcagcgcccagacgcacacaacatcaattttcccggtttgtacatcggacagcaaccacagcattgccgggcggtgcttgatgtctttcgcactgataccctcatcggcgtacacgtccaccacatcataggcgcgatcattgcaccactgcatcaagctcttgcgctgggcggcgagggaatacccctccgccgcctgctcgcttgttgatacacggatatagattgccgcacgcattactgatcgtcatcctcgaggctcaggccgagtgccttgagagccgcggcgcccatgcgctgtgcggggatcatatcgccgtcactgtcaatgatgcatgcatcgctcccgctgatctcgtcgtaaagctcggtaagcgtgggcggctctgcctcaccgctgtacggccactcggacgcgatgcgctcgacaaggtcgctgtcccacgctctccacgccgtcgggtctgcggcaagctcctgcagtgcgtcggccaaaatgccgcgctgaccatactcccagttttcaaaaatggcggccggcttgcaatcgtcgtcgaggatagcgagcataacggcgccgccgttattttcgtagacttcgtacttcatagtgtttcctccttgatttttctgccttactcggtttataatcaaggtggccggggtaaggctcccggctcaccttctcgggtgcgagtagcggggctttggtcggtgccgctactctttttgtttactcatgcatgatgcgcttgacgctctcgcgaagttcttcaagcgtttcgcacttctcgatgagttcgaggattgctttcagcagcgcctctgtgacgttcatctcggtcattccctcacttcctttcacaagaggtttccctctgccttacgagtattattataaaccaaatagtttataatgtcaaccctatattttaactttttcggatatttcagaaaatttttagttgacacgttaaactaaataggttatgctatctaacagaaggaagtgataccgtgacagcgcggcaaataattgaaatgaagcttgcgtattttgggattacaaactccgagctggcgcgacggctcggatggtccccccagctgcttaacaaacggctgaataccggaaaatttaccgtagaagaatgggagcgcatcggagaagcactcggctgcaaagtcaacatcaaatttacgctgccagatggcacagaaatttaaaatcacaaggccgccggagcacttacgctccggcggccttgctttgcccaattatttattatccgtcagctgcttgacgctctggttaagacccgtcgccgcccagccggacacgatgccgacggccgcagcgttaagccagtcgtgcgccggatagtccggcacgcccatcgcccacgcgacgacgccgaggatcaggccggtcgcgccgcagatgattgggatccacttatctgcggcctcggtcgccttgacggccatgcccacaaggtaagtgatggcggtgatcgccgccacagatgcaataccaagttccataatgatgtcctcctcttaatttttgtgctccagatcatcgatccggtgattggccaccttgatgcgctcgccgaggagctcggtgcactcctccagcttatatgtacgcgcgatgacctgattgtgcttgtccaccttgcgctcgagctgctcaatgcgatacgcctgcagctcgtcgcgcttgtccagctccgcgatcagcttgttgtgctgcgcgcggctgttgatgaggccgaccacaatggcggccgctgcgctgaccagcgcggcaatgataacctccgacatccgcgcctcacttcccgccgccagcggcgtcaatcatccgctgacagacgatcatcgcctgcagcgcgtcatacgtgacgttgattgcgtgcttgccgtcgccctgcagcgcgccgcgggcgatcagcttctgcgtctcctcgcgcgcccatgtgggcacgtcgtccaggctgtagtagcgcggattgcgtgcctcgccatagcgcatgccgataatcgcgccgcgcacgacatcttcagagatgtcgatggctccattgccagtgcctttcagagcgccagcatccatcaattcctgaacctcacttctgtaccattcagggacgtcatcaatcgtcttgtactttaccatgttttcatcctcctcttcgttcgggtgttccggcatcagcgtggccagaaatgccgtccactgcgccgggtcatccacccacggcatggggcagcgcttgcccgtcacgtcgtagtgccgcagcacgtggtcggtgtcgatgccatagcgctgcatgatctcccgcgccagcgccgcggcgtttgccacggtctccggcaggatgtagtagctgccgtcggcgcgcttgcggctgcacatctcgatgccgatgctgttgccgttgcggcactcggggtgccagtacgcccgcgcgccgcagtgccacgccgtgtcgcactcgcgcacggactgcatcgcgccgtgttcgtccacgaaatagtgcgcgctggcctgcaggccgcccacgcggtggtagtaatcgcagttgttgcgcgcagtgtcgccgttgtttgccgtgtagtgcatcacaatgtaccgca

SEQ ID NO: 14003 - DNA, 362 bp, Unknown
  gut microbiota DNA sequence
ttgatgtagtagctgccgtcggcgcgcttgcggctgcacatctcgatgccgatgctgttgccgttgcggcactcgggatgccagtagcgccgcccggcttctgcgccgcagtgccacgccgtgtcgccctcgcgcacggactgcatcgcgccgtgctcgtcgcaaaaatagtgcgcgctggcctgcaggccgcccgcgcggtggtagtaatcgcagttgttgcgcgcggtgtcgccgttgtttgccgtgtagtgcatcacaatgtaccgcaccggctgcgtgcgcccgacgcagtaatttgacggatcgcaagaaacaaattccatcatctgttacctccttcattttgacgtcagcgtcac

SEQ ID NO: 14004 - DNA, 446 bp, Unknown
  gut microbiota DNA sequence
atgttacctccttcatctctgcatctcatcaatccgatgctgtagggcatcctgtaaaatcaacaagaggctcttttgaggtttatatgatttcttcgtttgtagtaacaattacattttccagcgtgtcgtagagcacgattgaaaaataggctgcgccatttgaactgtcgaatttaaaatcggcaactccattggcagcattaaagtttataacaggccctgcttggcctttttcgatattggccaaagatgtatatccgactttgacttgggttcggtcagacttgaaaaacttgatagattgatatgatatatcagtgttccctttccatcgaacacgcacgacatcaccctttttgaccgggagcaagcccgtgatattcgtccctgagtgtgcaacaggtgcaccgctgctgctattgtatcgcatatttttatacata

SEQ ID NO: 14005 - DNA, 983 bp, Unknown
  gut microbiota DNA sequence
agggcgacattctgcccggctacacgcacctgcagcgcgcgcagcccatcaccttcggccaccacctgatggcctatgccatgatgctcctgcgcgatatcgaccgcatgcaggatgccgtcaggcgcatgaacgtctcgcccatcggctgctgcgcgctcgccggcacgacgtatgacaccgaccggttttttgaggccaagcagctcggctttgacgacgtggcgcgcaacagtctcgacggcgtgtccgaccgggacttctgcgtcgagctgctcgatgcctacgccatcgagatgatgcacctctcgcgcctgagcgaggagctggtgctgtggtcgagctgggagtttcagttcgtgcagctctcggacagctacacgaccggctcgtcgatcatgccgcagaagaaaaaccccgacatggccgagctcgtgcgcggcaagaccggccgcgtctacggcgacctcatcgccatgctcacggcgctcaagggcctgccgctggcgtataataaggacatgcaggaggacaaggaggccgtgttcgacgcggtggacaccgtgaagatgtgcctgcgcgtcatggcgccgatgctcgcgaccatgaccgtgcgcgccgacaagatgctccacgcggcgcagacgggcttcctgaatgcgaccgacctcgcggactatctcgtcacgaagggcctgccgttccgcagcgcgtacaaggtctccggccagctcgtggcctactgcatcgcgcacaataccgtgctcgaaaagctgccgctcgagaccttccgcaccttcagcgacctctttgacgacggcgtgtacgatgccatcgacctcaccaactgcgtcacgcggcgcgtgtcctacggcggcacgtccgtgccgagtgtcgaggcgcagatcgcctgggtcgcgcagcagctcgaggcataagcacatacgcatattttttacaagaccggcgctcccatttgggag

SEQ ID NO: 14006 - DNA, 6626 bp, Unknown
  gut microbiota DNA sequence
cacaaaaaaatcctgtacaataagcaaaaagttgtgcaaaaaggcttgccatttccggggtggggatggtattcttttttatacccactttgttgaaaaaaggagaaatggtatgagaaagaaacttctgagcatcctgcttgtgctgagcctgatgctcgcgctcgtgccggcggccttcgcggcagacgctgtgagaaccgagctggaaagcgacggcacaacgctcgccttctacggcagcggcgttgccacggccgactgctggaacggcgactggaccgccgtcacgcacgttgacctcgggtatgagatccgcggcgtcgccgagaatgtgctggcccgctgcgtcaacctcgtctcctttgaggccatcggcagccggtatctccggacctacaacggcggcctcatctccatagacggcaggcagatgctggccgcgccgaacaggtgcacggcttatgagatcctcgacttggtgcagaccgtcaagacgggcgcgttccgttactgtcaggggctgacggcggtcacgttcccggcgagcctcaccaccattgaggcgcaggccttcaccagctgcctgagcctgacggacgttcagctgccggacggcctgaagacgatcggcgactttgctttcgccggctgcgccgcgctgacgagcgtgctcatcccgaagagcgtcacgagcatcggcgcgggcgccttcaccggctgcaccgcgctcacggccatcgactacagcggaaccgaggccgagtgggcccagctgaccaagggcgagaacgcgctgccggagggcgtgaccgtgaacttcaacgcgcccatccaccactacggttcctggacgggcacggacccgaactgcacgaccgagggcaagcgcacccgcacctgcaccgacgacggctgcggtcacacggaggaaatgacactccccgcccgcggccactactggggcatcggccgtgtgacgacgctgccgacggagaccacgaccggcgtgcgcacctatacctgcaggacctacagctgcaatgccacgcgcaccgaggagatccccaagcttgccccgcgggtgcccgtgagcgagcgctttgacgacgttgcccccaacagctgggcgtatgaggacatccagtactgcgtcgactatgagctcatggccggtgtcggcggcggccggtttgaaccgaagacgctgaccacgcgcgcacagctcgtgcagatcctctatcggcttgcgggcgcgccggaggtcagcggcgagacgccgtttaccgatctcacggccgactggtacaagaccgcggtgctctgggcgtaccagaccggcgtgacgtccggcgtgagcgagacgaccttcgcaccggacacgcccgtcacgcgcgagcaggtcgcggtgttcctggccaggtttgcggatcgggtgctcgacagatacaccccctatatgtgggatgcgctcttcccgtttcaggatcgtgagcaaatctcctactatgcgcgcacggccatgaactgggcgtgcgatctggggctgatcaaaggcattccgggcccgggcggcctgcgccttgagccgcagagcagcgccacgcgcgagcagatggcggtcatgatcgcacggttctgccgcagactgaatgtctggaacgagcccatgccggagctttgagcaaacggctggagcgcgcgtgcgtgcattgctgcctgataccgaaccggcgtcctgttttttggacgccggttttgttattgcttgcgtgtgcgcttcatagttttgcaacaaagaaggaaataaaaggctgctaatggaagaaaaaaggagtgcgcttgcacggatacgcacatttgacacaaaaaaacggaaaaattgcattgacattccccacgaaaatgttacaatattgtcacagaatactttggaaatttcaagcatcttgtaacatctggaaaggagcgtaacgatgaagcagagaacacgcaagctcctgaccctgctgctgatcgcagccatggtcatgagcctgatggtcccggcactggcggcggacaccgcgcagtccgagaccccctacacttacgacgccggagactacaccttcggcaagatctcgcacccgaacagcgcgcccggccagccggacggcctggtcgactacaccggcaacggcacggtggccgtgaccggcacggccgacggcgccgacggtcagggcgaccgcggccagagctacgcctgggccgccatggcctacggcgactatgtctatgtcggcacgtgctacgccgccatgggccagacgctcacggcgatggacaccgtcatgggccacaagttcgacgaggagaccatgcgcgccgagctcaacgccatcttcaacggcacgttcttctatgggcaggaggacggcggcaactccggcggcgtgctcgtgaaggtcaacgtacacaccggcgagatgaccctgctcatgtccaagtcgctcaacggtatcgccccgctgttccgcaacgctatccgctacaaggataagctctatttctgcggcagtgtcaacgccaacggccgcggcggcctgccgagcatctatgaggtcgacccgagcaacgacagcatcacgtgcgtctatcagggcctgtcgaacatgcaggaatacgcgcaggcgtataaggccggcgtctgcaccggcatccgcggcatggcggtctacgacggcaagctcgtcatcagcaacgtcggcgtcgacggcggctacctgctcatcagtgacaacccgtcgaagggcttcacgaagatcgctacgcagtccgacctctttaactaccccgccgtgcactacaaagacagtgtctacggcggcggcatctgggagatcgtcgagtacaacggcagcctctacgtcgccatgtgcaccggcacgcccgccacgcgcgtgggcgacaatatgcgctcgttcgccatcgtgcgcggcacctgctccggcgactggaatgaccccgacgcctggacgtggacgccggtcgtcggcgaccaggccgacggtgcgaagtataccttcggcatcgacccggcgcgcacccgcgccgcggcctgcaatatgtgcatttatgacggctacctctacatcggcgaatacaacgacgaggagatcccgctcgaggagctcatgttcagccaggacttcggcttccttgcgcgcaaccttgagcagtcggtgaacctctaccgtatgtccatcggcgcggacggcaccgagcagatggagctcgtcgtcggcgagccgacggagatgttcccggccggcggcatcctgtgcaagcgctccggcttcggcgactatgaaaaccagtacttctggcagtccaaggtgtttgacggcaagctctttctcggcacgttcgacaccagctccctgctcgagccgctcggccagttcaccaacggcgacctgctgcacatgtcgcgcgacgagtgggccagccagatcggctacctcaaggtgctgctgcagctgctgctgaataaaaacaccggcgacggcacgctgctcgccgccgacgccgacaccgacgccgccatcgacgccgccgtcgacgcggtgaacgaagaggcggacagccccgagaccttctcgctcacggacgcgcagtatgacacgctgcgccagggcatcgacgacggcgcttacgccgcggcctacagcgtgtccacgctcggcagcctgcgccggctcaacagcctgctcgccaagctgaccgacctcgtggagacgaacgacatcgcgggcttcgtggacatctatcagcaggcctgcgacctctactccggcatcagcgacaagctgcccgaggcgctcaagaagctctatgacgcgctcgtgcgcatcacggagctggagaacatgaaggatctcgtcatctgcctcaacaagctctcgaccgccacgcgcggcttcggtctgtacaccatcacgtccgagaacgggaagctcacgctcgacacgctcacgcgcgacggcttcggcgatccgttcaaccacggtctgcgcgccttcgccgcgaatgacgagcagggctggatggtcatcggcacggccaaccccttcatgggcacgcagctgtggcgcacgaccgtcgatatgaccgatccgatggatcgcttcaccgatctcgaccccaacggctgggcctaccccagcatcgaatactgcgtgcggcacggtctcatgtccgggatgagtgacacgatcttctcgcccaacaccgtgacgacgcgcgcgcagctcgtgcaggtgctgtataatttcgagggcaagcccgacgtgagcgatgtggccgtgccgtttacggacgccgcgtccggctggtaccgggacgcggtcgcctgggcgtacaagaccggcgttgtggacggcatgacgcccacgacctttgcaccgaataacaccgtgacgcgcgagcaggttgccgtcatcctcatgcgctatctgacgaaagtctgcggcgtggagcgcacgtggacgccggatgacctgtccggcttcgccgacggcggcaacgtctccggctgggcgcgcgccggcatggccgacgcggtggcgctcggcctgttcggcggcacgcaggacagcagcggtcaggtgtggctgcggccgggcgcgggcacgacgcgcgccgagaccgcggcgctcctgcagcgcatgtgcaccaaagtgctcggcatcggctgagcggcgcacagcattttaacgggcgtccccgccggggacgcccgctcttttgtttcggcgcgggtgcttgttttctgcccgcacatcctgtatagtggaggcagcatcgggcggccgcggccgcccggggagggaagcttatgaaaaaacggatctgcacgctgctgctcgcgctgtgcctgacgctggggctgctgcccgccgcggcgcaggccgccggggacggcagcggcacgtttgacaccgtccgctggacgctcggcgccgacggcgggctgaccgtcagcggcacgggcgacctgccggacggcgcgttcgccggccgcaccgatatcgtcaccgtgacgttcacgggtcaggtcgcgcgcatcggccgcagcgcgttcgccggctgcacgcagctgcggcgcgtggacgggttcggcgcggtcacgtgcgtgatgagtcaggcgttcgccgactgcacggcgctcacggagctggccgtgcccggcacggtcacggagatcggcacgggcgcgttttccgcctgcaccggcctgacggccgtcacgctcgcgcccggcgtgcgcagcctcggcgcgtatgccttcgccgcctgcacggcgctgcggcgcatcgacctgcccgacggcatgacgctgctcggcagcgggctgttttccggctgcacggcgctcacggagctgccgctgccggacgatgtggcgtgggtagagccgcgcctgtgcgaaaactgcaccgcgctgcaaaacatcgtgctcccggccgcgatgaccgaggtgccgcgcggcctgctgcgcggctgcacggggctgcggcgcgtgacgctgcagggcgcggtcacggcggtgggcgacggggcgtttgccgggtgcgacgcgctcgcggacgtgtacttcaccggcacgcgcgcgcagtgggacgccgtcgccgtcggcgcgaacaacgcacgcctgacggccgccgccgtgcacctgtccgcgcccgcgcacacgtacccggaggcgtggacggtcgtccgcgcgccgacctgcacggacgacggcctgcgcacgcgcacctgcctcgaccccggctgcggcaaaacgctgtccgagacgatcccggcgctcggccacgactgggacgacggcgtgatcgtgcgcgccccgagcggcgtgcgcatgggcgagcggcgcgtcacctgccgccgctgcggccggacgcaggcggaggcgatcccgcccgagatcgcggcgtacgagcagtttcatgacatcgaccgcaatgcgtggtcgtatgacggcatccagtactgcgtggcgcgcgggctcatgtccggcacggacacgcacacgttcctgcccggcggcgtgacgacgcgcgcgcagctcgtgcaggtgctgtatcatctcgcgggtgatcccgacatgaccggcgtgaccacgccgtttaccgacctcacgtcggactggtatcaggccgcggtcgcctgggcatatgagaccggcgtcgtggacggcacgtcgcccaccacgttttcgccgagccggcccgtcacgcgcgagcaggcggccgttttgctcatgcgctacgctgcgcgcctgctcggctttgcgggcagcgacgcgcctgccgatctgtccgcgtttgccgacggcggcagcgtctccggctgggcgcgcgccggcatggccgacgcggtggcgctcggcctgttcggcggcacgcaggacagcagcggccgggtgtggctgcggccgggcgagagcgcgacgcgcgccgagatcgcggccgttctggcgcgcttcgggcgcaacgtggcccacctgctctgaatgcagaccgacccgccggggatcccccggcgggttatgactgtcggaaaacccggagggtttt

SEQ ID NO: 14007 - DNA, 1260 bp, Unknown
  gut microbiota DNA sequence
cccgcctgcggcaggccgtccgggtccgccaccgcagccacatagtccttgaccggcatggcgccgaaggtctgcttcggcttgtgctccccaacggagaccacgtggtcgccgtccgccgtgtggatcaggatctttttcttctcttccgccataagtgcctccattccccgcgcgcatagccgcgcgcagatatacacacattattataataggaatatagcacgacagacggcacattgtcaagattgcgacggccgttcgtttgtggaaaaggccatattctgcacaaaaatcgtccggttttttcgtcaaatttcgtcacacgcaagtgcaattccggcatttatctttgcaccgctttctgatatagtgagaggtaagcgcaaaaatatcacagagggagcgtgaagcgttttggggatcaacaatgtgatctctctgcttggcggcgtggccctgttcctgttcggcatgacgctcatgggcgacgggctgaagaaagtggccggcaacaagctcgagatcatactctataaactcacgagcaccccgctcaagggcgtcctgctcggcacgggtgtcaccgccgtgatccagtcgtcctcggccacgtccgtcatggtcgtcggcttcgtcaactccggcatgatgcaggtgcgccaggccatcggcatcgtgctcggctccatcctcggcacgagcatcacgggctggatcctctgcctgtcggacatcagcggctccggctgggtgtcgctgctgagcaccgcgacgctcacgggcgtcgtcgccgtggtcggcatcgtgctgcgcatgttctgcaaggacctgaccaaacaccacatcggcgacattctgctcggcttcgccgtgctcatgtacggcatgtcctccatgagcggcgccgtggccccgctcaaggacagcgccgcgttcatccagctgctgacccgcttttccaacccgctgctcggcgtgctcgtcggcacggtgttcacctgcatcctgcagagcgcgtcggccgccgtcggcattctgcaggcgctggccatcacgggcacgatcacgttctccgtggccttccccatcacgctcggcatcgccatcggcgcggccgtgccggtgctgctgtcctccctcggcgcgagcgtcaagggcaagcgcaccgcctatgtctacctgctcatcgacgtcatcggcgcggtcgtctggggcgtcgtgttctacgcggtcaacgcagccgtgcacttcccgttt

SEQ ID NO: 14008 - DNA, 47802 bp, Unknown
  gut microbiota DNA sequence
tcgttcctgttcccggacaaagcgtccaccggcgcgctcgccgacatcgaccggctcgaggagcgctttctcgcgcacccggcgctggccatcgagcagagccgcctggccatcgactccatggcccgtcaagcgcaggacaacatcctgtccgcgttctccctgctcggcaagttcagtgacgagcagttcgccgccctgcaggaaaacgaggaagccatcgaccactacgaggacaagctcggcacctacctcatcaagatcacgagcaaggagctcacgccgcgccagacggccgacgtgtcgaagtacctgcacacgatcagcgacctcgagcgcatcagcgaccactcgctcaacattggcgagacggcgcaggagctctacacgaagaagatcgtcttttcgcccaccggcgcgcgcgagctcaaggtcatgctcgcggccgtgacgcgcatcctcgagatcacgatcaacgccttcctcgacaacgacgtcgccgcggcctaccgcgtcgagccgctcgaggagctcatcgacaacctctgcgacgagatgaagctgcaccacatcgaccgcctgcagaccggcgagtgcacgctcaaccacggcttcgcgttcaacgacctgctcaccaactgcgagcgcgtgtccgaccactgctcgaacatcgccgtcgccatgatcgagctcgagtccgactcgttcgacacccacgaatatatcaacagcgtcatggccatgcactcgcacagctttgacgaatactactccgaatacagcaaagaattccagatttaatgcatatatccgccgcctatccatttgtaaaaatggccgggcggcggttttttgcccccgtcgtccggcaaatgtcccaatttcgcgtggtcaggtatgtacatgctgcacaaggcatttttccctcgctgggcgtgttttttcaaattccacaaatcgcagtggatttttcatgaatgtcttgcatatttattcgcgtggtagtatattaaccttatataaatggatttttatccgcttgtgagggacgagatatgcataacgaaaaaacgaccattttcatcgacggcagctccggcacggccggcctgcgcatttacgaccggctggcccagcgcgaagatattgacctgctgaccctgccgcccgagctgcaccacgacatggaagcccagcgcgagctcatcaaccgcgcggacatcgcgtttttgtgtctgccggacgcggcggcgatcacggcggcggatctggtcgagaacccggacacggtcgtgctcgacacctcgaccgcgcaccgcacggcccccggctggacgtacggcttcccggagctgtcgcccgagcgcgaggccgcgatccgtaccgccaagcgcatcgccgtgcccggctgccacgccagcggcttcatcgtgctggtctacccgctcgtcgaggcgggcatcctgccgccggacgccctgctgacgtgctactcgctcacgggctacagcggcggcggcaagaagatgatcgccgagtatgaggcggacaccctcgaccccctgtacgttgccccccggcagtacggtcttgcgcagcagcacaagcacctgcgcgagatgtgcgccatcccgggcctgacgcacgcaccggtgtttgcgccgatcgtggcgaatttctacagcggcatggagacgagtgtcgcgctcttcgcctcccagctctgccccggcaagacggcggaggatatcaaggccgcctacgccgcgaaatataccggccctgtcgtgacctaccgcgaccccgcgtgtgacgacggcttcctgtctgccgccgccatgtccggcaaggacagcatggtcgtgtccgtctccggcaatgacgagcgcatcctgctcacatccgtgttcgacaacctcggcaagggcgcgtccggcgccgcgctcgagtgcctgaacctcgtcatgggcagggaaaagggcttcggcctcgatctgtaaggaggaacgaacgatgaagcaagtcaccggcggcgtgtgcgccgcacagggtttttccgccgcaggcatccactgcggcatccgcagaaatcagtccaagcgcgacctcgcgctcatctacagcgccgtcccggccagcgccgcggcggtctatacatcgaacctcgtcaagggcgcgcccctgaccgtgacgaaggcgcacctggctgacggcaaggcccaggccgtgatctgcaacagcggcaacgccaacacctgcaacgctgacggcgtcgccgtcgccgaggagatgagcgcgctcacggcggcgcagctgcacatcgcgccgcaggacgtcatcgttgcgtccacgggcgtgatcggccagccgctcgatctcacgcccatccgctccggcctgccgcagctcgccgccgcgctcggcgaccactccgaccaggcggccgagggcatcatgaccaccgacacgcacccgaaggagatcgccgtgcagttcaccgccggcggcaggacctgcacgatcggcggcatcgccaagggctccggcatgatccacccgaaccttgcgaccatgctcgtcttcctcacgacggactgcgccgtcagccccgccatgctgcaggctgcgctctccggcgacgtgcaggacacgttcaacatggtcagcatcgacggcgacacgtccacgaacgacatggtcgccgtgctggcaaacggcctcgccggcaatgccgagatcaccgcgcccggcgcggacttcacggcgttttgcagcgcgctcaacagcgtgaccgtctggctctgccgccagatcgcgggcgacggcgagggcgcgacgcgcctgctcgagtgctgcgtcaccggtgccgctgaccactgcaccgcgaaaaccgtggccaagagcatcatctgctcgtcgctcgtcaaggccgccatgttcggcgcggacgccaactggggccgcgtgctgtgcgccatcggctacagcggcgctcctgtaaacgtgcacaaggtggacgtcgccttccgctcggcggccggcacggtgcgcgtgtgcgtcgacggcgcgggcatcccgttttccgaggaggaagccaaaaaggtcctgctcgaaaaggagatcgagatcctcgtcgacctcaagtccggcgacgagggcgcgaccgcctggggctgcgacctgacgtatgactatgtgaagatcaacggcgactaccgcacctgaaccgggaggaacaccatcatggacattacgaatccgcagcgcgcgaaggtactcgtccacgcgctgccctacatacaggaatacagcggcaagatcgtcgtcatcaaatacggcggcaacgccatgatcagcgccaagctcaaagactccgtcatgcgcgacatcgtgctgctgtcgctcatcggggtgaaggtcgtgctcgtgcacggcggcgggcccgagatcacggaaacgctcgaaaagctcggcaagcagacgcagtttgtcgacggcctgcgcgtcacggacgcggagacggccgacgtcgtgcagatggtcctcgccgggaagatcaacaagacgctcgtcaacctcatcggtcacaagggcggccgggcgatcggcctgtccggcatcgacgggcagatgatccaggcgcgcgtgcgcgatgagcgcctcggctacgtgggcgagatcacgaaggtcgacgtgcgccccatcctcgacgtgatcgacaagggctacatccccgtcgtgtccaccgtcgggtgcgacacgcagggccacgtctacaacatcaacgccgacacggcggccgcgcgcatcgcgggcgagctgggggccgagagcctcatcgccatgaccgacatcagcggcatcctgcgcgacaaggacgacccctccacgcttatccccgtcatccacacggcggacgcgctgcagctcatcgagtccggcgtcatcaacggcggcatgctgccgaaagtgacctgctgcatcgacgccatccgctggggcgtgcaccgcgtctttatcatcgacggccgcgtgccgcacgccatcctgatcgaaatgctgacaaacgaaggcatcggcaccatgttcgttgccgggcaaggaggaaaaacagatgaacattccgcaacttgacagtacctatatcgccaacacttacgcccgcttccccgtgacgatcgcgcgcggcaagggctcgctcgtctgggacacggacgacaaggtctatatcgacatggcgacgggcatcgccgtcaacagcttcggcatcgccgaccccgcgtggatccgcgccgtgaccgagcagctgtgcaccgtgcaacacgcctcgaacctctactacaccgcgcccgacgcgcagctggcgcagctgctgtgcgagaagaccggcatgaagaaggtcttcttctccaactccggcgcagaggccaacgagtgcgccatcaaggccgcgcgcaagtacgccgccgaccacaaaggcccggagtaccacaccatcatcacgctcaaaaacagcttccacggccgcacgatcacaacgctcgccgcgaccgggcaggacgtgttccaccacgactttctgccgctgacggagggttttgcctacgccgaggcgaataacctcgacgatctcaaggcgcaggtcgccgcgcacaagtgcgccgccatcatgatggaggtcgtgcagggcgagggcggcgtcatcccgctgacgcaggaatttgtcaaaggtgctgcccagctcgccgccgagcaggacctgctgctcatctgcgacgaggtgcagatcggcaacggccgcagcggcaagctctacggctacatgcactacggcatcacgccggacatcgtctccacggccaagggcctcggcggcggcctgccgctgggcgcgacgctgctcggcgagaaggtgcaggatgtgctcacccccggcagccacggctctaccttcggcggcaaccccgtctgctgcgccggcgcgctgagcattctgcaccggcttgacggcccgctgctgcagtccgtgcaggaaaagtccgacttcatcgtcaaggctctcaccggcgccaaaggcgtcaggagcgtcacgggcttgggcctgatgctcggcgtggagaccgagcgcccggtcaaggacgtcatcagtgaatgcatggcgcgcggcgtgctcgtcatctcggcaaagaacaaggtgcgcctgctgccggcgctcaacatccccatggcgcagctcgagcaggcggtcagcgtgctcaaagacgtctgcgccggagaataaggaggaacaccgtcatgaatctcaaaggcaacgattttctcaagctgctcgactacacccccgagcagatcaactatctgctccggctcgccgcccagctcaaggccgagaaaaaggccggcatcccgcaccgcctgtgcgagggcaaaaacgtcgcgctcatctttgaaaagacgagcacgcgcacgcgcagcagcttcgaggtcgcggcgcacgatctgggcatgggcagcacgtatctcgactccaccggctcgcagatcggcaagaaggagagcatcgccgacacggcgcgcgtgctctcgggcatgttcgacggcatcgagtaccgcggcttcggccagtgcatcgtcgaggaactggcgcagtacgcctccgtcccggtctggaacggtctgacggacgagttccacccgacgcagatcctcgcggactttctgaccatccgggagcacttcggctcactggagaacatccacctcgtctacatgggcgatgcgcgcttcaacatgggcaactccctcatggtcggctgcgcgaagatgggcatgcacttcacggcctgcgcgcccgagggctacttccccgatgcgcagctcgtcgccgagtgtcaggccatcgcggcgcagacgggcgcgacgctcgacttcatctccgaccccgccgcggccgtgcagggcgcgaacgtgatctataccgacatctgggtctccatgggcgaaccagagagcgtctgggccgagcgcattgccgcgctcgcaccgtatcaggtcaacgcggcgcttatggccaaggccgaccccaacgccatcttcatgcactgcctgccggcgtatcacgacaaaaagaccgccatcggcaacgagatgtgcacgcgcttcggccgcgaggcgatggaggtcacggacgatgtgtttgaaagcgcgcagtcggtcgtgttccaggaggccgaaaaccgcatgcacaccatcaaggccgtcatggcggcgacgcttgcggagatcgagctatgaagcgctatctcgtactcgaaaacggcgaggtctttgcgggcctcgctttcggcgcaccgtgcgacacggttggcgaactggtgttcaccaccggcatgaacggctacatcgagacgctcaccgacccgagctactgcggccagatcgtgctgcagacgttcccgctcatcggcaactacggcatcatcccggccgattttgagggcaagtgctgcgtgcgcggctatgtcgtgcgcgagcagtgccaaacgccgtcgaacttccggtgcgaggaaacgctcgacgcatttttgaaagccaacaacatccccggcatcgccggcatcgacacccgcgccgtcacgcgcatcctgcgcgaggccggcacgatgaacgctgccatctgcgacacggtgccggacgatctcgcgcccctgcgcgcctaccgcatcacggaccccgtgccgcaggtgacaacgccggagccctacaccctccagccggaggggagcgtgctgcaccgcgtggcgctcatcgactacggcgccaagcgcaacatcgcgcgcgagctctgccgccgcggctgcgccgtgacggtgctgccctgctctgccaaagcgaaggatatcctcgccgccgggtatgacggcgtcatgctctccaacggccccggcgacccgacggacaacgtcgaccagatcgcggagatcgccaagctcttcggccgcatcccgatgttcggcatctgcctcggccaccagctcatggcgctggcgcagggcggcagcaccgtgaagctcaaatacggccaccgcggcgtgaaccagccggcgcgcgacgtgtgcggcacgcgcacgttcctcaccagccagaaccacggctacgccgtcgtgcccgagagcgtgaagaccggcgtcatccgctacatcaacgccaacgacggcacgtgcgagggcgtggactaccccgacctgcgggccttttccgtgcagtttcaccccgaggcgtgctcgggcccgcacgacacggcctttctcttcgaccgattctgtgacctgatgggaggtgcgcaccatgccgattgattccagcatccgcaaagtcatggtcatcggctccggcccgatcgtgatcggtcaggcggcggagtttgactatgccggcgcgcaggcgtgccgcgtgctgcacgacgcgggcgtgaacgtcgtgctcgtcaactccaaccccgcgacgatcatgaccgacaaggccctcgcggatgagatttatcttgagccgctcacgctgacctccgtcaagcgcatcattgaaaaggagcagccagacagtcttctcgccggtctcggcggccagacgggcctgacgctggcgatggagctcgacaaggagggctttttgcagcagcacaacgtccgcctcatcggcacgaacgccaaagccatcgacaaggccgaggaccgcgagctcttcaaggagaccatggccgccatcggcgagccgaccatcccctccggcatcgccaacaccgtggcggaggcgctcaccgtagcagaccgcatcggctaccccgtcatcatccgcccggcgttcacgctcggcggcgcgggcggcggcgtggcctacagcccggaggaactcaccgtcgctgcgcagaccggcctcgatgcgtccccgatcacgcagatccttgtcgagcgctacatctacggctggaaagagatcgagtttgagaccatgcgcgacggcgtgggcaacgtcatcgccgtgtgcagcatggaaaacttcgaccccgtcggcgtgcacaccggcgacagcatcgtcgtcgccccggcgctgacgctctcggacaaggagtttcagatgctgcgcagcgcggcgctgaacatcatctccgcgctcgatatcgtcggcggctgcaactgccagttcgcgctcaaccccgacagctttgagtacgccgtcatcgaggtcaacccccgcgtgtcgcgctcgtcggcgctcgcgtcgaaggcgaccggctacccgatcgccaagatcacaacgaagatcgccctcggctacacgctcgatgaaattcaaaacgacatcaccggcaagacctgcgcctgcttcgagcccgcgctggactacgtcgtcgtgaagttccccaagtggccgtttgacaagttcgtcggcgcgtcccgccgcctcggcacgcagatgaaggccaccggcgaggtcatggccatcggcacgaactttgaaagcgcgctgctcaaggccgtgcgcggcgccgagatccatctcgacacgctgcacgccaaaccgctgtctgaccgcccggtgcgcgaccggctcgccgactgcgacgatcaccgcctgttcaccgtctttgaggcgctgtgcagcggcgtgtccatcgacgagatccacgacatcacccgcatcgaccgctggtttttgtcccggctgcaaaacctcgtggactacgaggcgagcattcaaaacggcctgacgccggagctttatcagcgcggcaagtacctcggctatccggacgcggcgctgcgccgcctgtccggcagcgagacgctgccccccttccgcgcgggctacaagatggtcgacacctgcgccgccgaatttgacgcgcagacgccgtatttctacgccagcgcggacgcgcgctgcgaggcgcgcaccttcccgcgcagcggcaagcctgtcgtcatggtgctcggctccgggccgatccgcatcggccagggcatcgagtttgactattcgtccgtccactgcgtgtggacgctcaaggccatgggctatgacgtcgtcatcgtcaacaacaaccccgagaccgtctccacggactacgacaccgccgaccggctgtatttcgagccgctcacggccgaggacgtgctgcagatcatcgacgtggagcagcccgtcggcgtcgtagtcgccttcggcggccagaccgccatcgcgctcacgcagacgctcgaccgccacggcatccgcatcctcggcacatcggccgagggcatcgacatcgccgaggaccgcgagcggtttgacgagctgctcgagcgcttccacatctcccgcccgaagggcatgggcgtgcagacgctgcccgaggccctgcacgccgcgcagacgctcggttaccccgtgctgctgcgcccgtcgtacgtcatcggcggccagaacatgaagatcgtccacgacgacgccgaggtcacgacgtacatgcagcgcatcctcgcgcagggcatcgacaaccccgtgctcgtggacaagtacatgatgggcacggagctggaggtggacgtcatctccgacggcacggacgtgctcattcccggcatcatggagcacatcgagcgcgccggcgtgcacagcggcgactccatcgccgtctacccgccgtacaacctcaacgacatgatgacggacaagatcgtcgacagctcgcgcaagctcgccctcgcgctcggcacgaaggggcttgtgaacatccagtacctcatctgggaaaacgagctctacgtcatcgaggtcaacccccgcgcctcgcgcaccgtgccgtacatcagcaaggtcacgggcgtgccgatggtagacgtggcatcgcgcgtcatgctcggcgcgccgctggctggcctcggctacggcaccggcctgcaccccatcccgccgtattacgcggtcaaggtgccggtgttctcgtttgaaaagctcggcgacgtcaacgcctacctcggcccggagatgaagtccacgggcgaggtgctcggcctcggcaagacgatgcaggaggcgctgttcaagggcctgacctcggccggcatggtcgtcggccagcacccggacggccgccacggcgtgttcgtgagcgtggacacgcacgacctcggcgagatcgtgtcgctggccaagaagctcgacgacctgcacttcgccctctacgcgaccgaggagaccgccgccgccatcgcgcgcctcggcatcgacgtcgtgaccgtggacggcatccgcgagagcgaccacgccttcgccctgctcgagagcggctgcatcgactacatcgtctacaccggcgcgctcaaggacgcgaccatggacgattacattgccctgcaccgccgcgcgctgcagctcggcatcccgtgcttcacctcgctcgacacggccaacgccctggcggacatcatcgccagccgctacaacgagcgcaacaccgagctcgtggacatcaaccacatgcgcaccgagcgccagagcctgaagtttgcgaaaatgcaggccaccggcgacgactatatctacgtcgagaactttgacggacacatcacctgccccgagtcgctgtgcatcccgctctgctcgcgccaccgcggcatcggcggctacggcatcgtgctcatcgagcacagcgacgtggccgacgcgaaaatgcgcgtcttcaaccgcgacggcagcgccggcggcatgggcggcaacgccatccgctgcgtggccaagtacctgtacgacaacggcatcgtgccgcgcgacgatctcacgatcgaggccggcggcaccgtgcaccggctgcacctgtacacgcgcttcggcacggtcggcctcgtgacggtcgacatgggcaagcccgcgtttgagcccgccaatgtgcccgtgatgctcgagggcgagcgcgtgatcgaccggccggtgacgatcgccggcggggagtaccgcatcacgtgcctctcgatgggcaacccccactgcgtcgtctttgccgatcgcgtggatgaggtggacgtcgcgcacctcggcccgcagtttgagcacgcggacatcttccccgcgcgcacgaacacggagttcatccgcgtcgtcaaccgcacgacgatcaagatgcgcgtctgggagcgcggcaacggcgagacccgcgcctgcggcaccggcgcgtgcgcggccgtggtggccgccacggaaaacggcctgtgcccgaagggcgaacccatcaccgtcaaggtcagcggcggcgacctgatcgtcacctatgacgacgacggcgtgcgcctgaccggcaacgccgagctcgccttcaccggcgtgaccacgtactgagactccaaaaagcaaaaaatcacccgcatccgggtcggatgcgggtgattttttctgccggccgctcagccgcgcatggcggcggcgaaggcgtcgatgcgcgcgatgtcgagcttcggctcggcatactgcgcgcggtactgcggcgatgtcatcagcgcgccgaagagctgcttgtaggcatagctcatcttctcgtactgcatcttgccgccaagaatgtccttcgcggccgcgtgcgcaagcagctccggcgagaagaagtgctccagatacccctccgtgccgggcgtggtgtagcagctcaggtacaccccgaggcgcttgcccatgagcgtcttttcgttccggcgcaggaagtgccggatgtgcttatcgagcttgaacatgtacacgcagctgccgatgatgaccgtgtcgtacccgtcgagcgtaatgccgcgctcgcggatgttgcgcaccgtcacgtcgccgccgacggcgcttttgagcatataggcgatctcctccgtcgcgccgtagcgcgaggcgaacaggatcagcgttttcatgcagtgacctcctttgtccgccctgccgggcggccccttctttatgtaagagtataggaagccgccgcgccgctgtcaagcgctgcgcgcgatttttttacccgaccggcacgggctcgccctgtttcggcgccggctctctgcgccgcgccttggggatgttgatcgtcaggatgagcgcttcgtccgtctcctgccggtgcatgccggcgtcgatgccgccctgcttcatgaggtcgaggctgtgcgagatcgtgttgagaaacacgcgcacgtccttgaggatgaaggtcttctgctgctcgctctcgggcgcggtcttggcctcgagcaggcgctcgatgtaggcgtccgttgcggcgacgttcaggtcgcggctgaggatataggccagcgcctcgcgctgctcggccggtgtctcaaggcgcagcagcgcgcggccgtgccgctcggtgagtccggcgttgcgcatggcgttgagcacatcctccggcaggcgcagcaggcggagcttgttcgccacggccgactgcgacttgcccagccgccgcgcgcactcctcctggctcaggccgaagagccggatgagctgcgcgatgccgcgcgcctcctcgagaaagtccaggtcgttgcgctggagattttccaccagcgcgatgaagctcgcctcctcgagatccagctccatgatgatgcacggcacctcatggagccccgccatgcgcgcggcgcgcaggcggcgctccccggccacgagctcatacccgccctgccgcggtcgcacggtcagcgggctgagcacgccgtactcggcgatgctgcgcgagagctcctcgagctgcgccggggaaaaattctgccgcggctggaccgcgctcggcgcgatcgcgtccaccgccagatacacgatgctgccgcgggccgcgcggctgcgatggttggaaaactgcatagcacaccctccatatcttgtgttttacaacacaaaaataatccacatattgcgcaaaacgcggcgaaatcgggcgcgcgcagaaaaaaagagggcggactgaaaacagtccgccaaaaacagggtcgtgggataaagatatgagccgtggcttccaaactgcggaagtcaattggataagctgtaatggtattgtagcgccgggcgcgcaaaatgtaaagagcgaacggtgtcggtcgggcacttgttttgtcggcggcggaatcttttttcgcgcgccggggcatactgaccgggagtacacagcaaaggagatggaagcatatgcaggtgatcgaccgtatcgcgctgatccttgcgatcatcggcgggctcaactggggcagcatcggtctgttccggttcgatctcgtggcgtggatctgcggcgggcaggcctccgtggtcgcccgcgtgatctacacgctcgtgggtctggccgcgatctggtgcatttccctgctcttccgcggccgcgacgaaatcgacggcgacacggaggaggcataatgccccggcagcaaaaaaacggcatggccgacgccatgctgtttttttctccaatgagaaccgcttcgctgggtcctcgttggaatatgtttatccaagtctctgcatcgccagcgcgctgctgcccgggaagcggtcgaacgcatcgagcggcggcagatacgcttccagcgcgtgcaccagctcgccgccgagcaggccgccgagcgtgttgagcatcaggtcgtccacgtcgcacaggcggtacgagccgcggaacacgaaaaacagccccgtgagctgccccagctcaatgaacgccgaaaacgcgagcgacgcgagcgcgaccttgccgagatccagcccgcagacatagcgcaggtacataccaaacggcagcagcatcaaaatgttgcacacgacctgcagcaccgtgcggtcaaaaagcgccggcagatacgtgcgcgcatcggagagcacgagcggcgtctcgcgcaggaaatcggccacgaactgaaacggcacgagctggatctcatacccgctcagccgcgccgcctgcgccgcatccggcagcgggaagaacacgagcgccagcacgcacagcacgtaaaacaaaaacagaccgccgaacacggtgcgcacccagttgaagcagcgcgcacgcacctgccggtcaaaaaacggcacggccaccagcaccgcgatgagcggaaacgcataagccgccagccggatactgcccagaagatttgtcatgatccttgcctcccatggggcgctcccgccccggtttctggcatcagtatagccccggacggcatcacatcgccatcgttttggcttacagttggcttacatcttcgtaaggcagcgcgcagggcgcaaaaaaccgggcgcgtccattcagacgcgcccggccgtgcggacggatatttttcctcaggcgatgaggaagaacttcacgaggaagatcaccgagatgacatacgtcagcaccgagacctccttgcccttgcccgtgcagagcttgagcacggaatagctgatgaggcccagaccgatgccgtggccgatcgagccggagatcggcatggagatgagcatgatggccaccggcaggctctgatagatatcgtcaaagtcgatcttcttgagaccgccgagcatgagcaggccgacgtagatgagcgcggagctcgtcgcagcggcggggatgatggcggcgatgggcgcaaggaacatgctcgcaaggaagagcacgccggtcgtcagagcggtcaggcccgtgcggccgccggcctcgacgccggaggcggactcgacgaacgtcgtgacggtggacgtgccggtgcacgcgcccgcgacggtgccgacggcgtcggccagcagcgcctcgcgcatgcgcggcatgttgccgtccttgtcgaccatgccggcgcggctcgccgtgccgacaagggtgccgatggtgtcgaacatatcaatgatgcagaacgtgatgacgagcgtcacgaccgtgaaccagccgatctcgccgagggcggaaaagtcgaacttgaacagggtcgtctcggccatgtcgccgaacgcaggcacgaacgacgcgcccttgagcgacgcaaacgggttcgtgtgcaggaagatggcctcgcccgcccagtagatgccggacgcgcagagcatgcccagcagcacggagcccttgatcttcttgtgcgcgaacagcacgatcaggaacaggcccacgaacatggtcacgaccgtgagcaccatctgcgggtagccgtcgcccatgttggccttggcaaggctgggcgtgagcgcgccgaagaaatcgcgcatgacgtaaaacgggccgccgtcgctcgagtacacaccggcgttggagccgatgccgatgttgagcagcatgaggccgatggccggcgcgatgccgagccggatgccgagcggaatggcctcgacgatcttctcgcgcaccttgagcaccgagagaatgatgaacacgatgccctcgatgaggatgacgcacagtgccgtctggaacgactgcaggtagctcatgccggtcagggtgacgatgttggccacgacgacggcgaaaaagctgttgagacccatgccgggtgccatggcaaagggcttgttggccgcgaacgccatgacgagcgtgccgacggcggaggcgatgcaggtggcgaggaacacgccgttccacagctgcgagccgccctgggcgccgaagccggtcagcaggttcgggttgagcgcgatgatgtacgccatggtcatgaacgtcgtcaggccggcgacgatctcggtgcgtacggtggtgttgttttctttcaggtgaaagagcttttccattgggatcccctctccataaagtttttgccggaaacgcaaaacgccgtcagtataacgcgatttgccccgcctgtcaacgacaaaaaccggacacggaatgtcccgtgtccggtcctgctgttttcgcgtgttttacgcctgcgcggggcagtcgcgctcgtggcaggtgaacaaaatgacctgccggtgctgcgcgatctcccggaagagcgccatggcgcgcccggcgcgcgcatcgtcgaaattcacgagcgtgtcatcgagcacgagcgggcacggatcatccgccgggcacgtcagctcacacagcgccaggcgcacggacaggtacagcagatccgccgtcccggccgagagataggccgtgtcgcgcggcgtcgggtcgtcgatgctgcgcgccttggccgacaggtcgcgcgcgagcacgagctcgtcatagcgtccgtcggtgaggtagtccatgtagtccgccgccttctgcgccagctgcggggaaaagcggctctgcagctccgcgtccgcacggccgagcgtctcgatcgcaagcgcgatggccgcatactgccgctcgagcgcgtcgcgctgttcgagcagctgcgcgtgttcgcttttcagcgccatcgggtcgccgatagcgagggccgcgcctgtgagctgcgcctgctgcgtgcgcaggcgcgtgcacacgctctcgagcgcgctcctgcgctgatagagcgcggcggcctcgcccgtgccgctctcaaagtccagactctgcagcagccgctcgtgcgtctcgcactggtgctcgcgcgcatcctcgagcgcggcggcggctttctgctccgcctgcatggcggccgcgcacgcgcggtaggcagcccggtgcacctccgcctgatagtagatgccgtccgcgtcctgcgcgccgtagctgcgcaggagctccccgagcgcggcggcggcctgctgcgcgcgcttcttgccgttattggcagcgaccagcagcacgacggccagcaccgcgagcgcgatggccgcataatacagcggctgcgccacaagataacccagcaccgcgcacagcgccgagagcacgagcgccgcgatccagaagtacggcttgccgccgtgggctgccgtgtcagcaagggcctccgcccgctgcgcgtcgcgctcggcggtctcgcccgcctcgtccggcgtctgcacgccgaaatgcgtctgctcgagcgcggtgcgcctggccgcggcgtcccgccgcgcctgttcgagcgtctgctcgagcgtgcgcaggttcgatttttcctcgcccatgctgctcagcgccgcgcggcgctgccgctgccgggcggcgttcatctgctcggtcacggtctgcagctccgcgtccgtctgccggagctcggcggcgcaggccgcctgctcctgcgcgttgcgctcgagccggtgcagctgctcttctacctccgtgatgcggccctccagctccggcagcgcgccgtgccggccgctgcgccggcggcgcagccatgcgcgcagctgcgcgtcggcctcggtataggagctcgcctcctcgccggaggtcacgatggcagagatgcgcttttccagctccggcgtacccgtcacgacgaggccgccctgcccgatgaatgcgctgcgcgcgaacacctcggccgacacgcccgtgagctgctcgcccgcgtccgtcgccgtcagccccggcaccgggatgtccgtgccggtgtacaccgccgaaaagccgcgcagcggcgcgcccggcgtctccgtccagcggcggattgtgatgcattttccgccctgttcgagctccagctcgcccgccatgggcttgccgctccagggcgcgtatttctgcttgtcgggcacgaacccggcgcgcgcgcgctgggacgtgtcgatcccgtagagcatggcgcgcagaaacgcgcaccacgtgctcttgccgctctcattcggcgcgtagatgatattcagacccgtgtcgagccgcagctgctcgccgtcgagcgtgccgaacgtgccctgcatatgccggatgatcacagcgtcaccacctcctcgtcgtggtccagtgccgcaagcccccagcgcgcggccatgacaatggtctcacgcgcgcggtcagagtccgcggcgtcgtattgttgcttcagttgggccagaaactgcccgcgcagcgtgctctctcccgcccgcgcccagagatcccggcgcgcgcgcgtctcatcgcgcagctgcagcgcgaacacccgcccctcgagcgccgcgcgcagcgcggcggggttcggcgcgcggtcggtctcgcccgtgagcacgatgcggtaaatattgcgcgcagccccctccggcagcgccgcaagcgccgcctgcatggggtccgtgtccgtgacgtccacgcgcaggatctcataccgccgcccgggcacgggcacaaaccgcgcctgcacgtcgcccgcagcgacgtccacgagcagcacgcccttttcccccgtctcgtcaaagccgcggccctccatgcagcccggccaggcgtacaccgtgcccccggcgcgctgcacgccgccgaagcggtgcacgtggccgaaggcggcgtagtccagcccgctggcggccagctccgcagccgacacggggtcatacgccgaggcgggattgcccacctcgccgtgcaggcagagcacgtcgagcagccctgcctgcttcggcacggaaaagccccgcagcagaccggggcagcggctgtcggtgaacgccgcgccccagacgcgcacgcccagctccggcagcgtgaccgcctcgatgcgcggcgagcggaagatatgtacgttttccgggaacgtcaggcgcgcatacggcgcgcccgcgctgtaatagtcgtggttgccgggcgcgaggaacacctccgccccacagccgtcaaacgtctcggcgagcgcctttgccgtctcgggataggggctcgcgctgtcgagcaggtcgcccgcgagcaggatgatctgcgccccgtgcgcctgcgccagctccggcagagcgcgcagcaggctgcgctgctcccggcggcgctgcgccgcctgcgcgagcgtgagcgcctcaaacggcgagtcgagatgcagatccgccgcgtgcaggatgcgcacgctcatctcaggcgcaccagctgcacgtcgcggcagcggccggtgtcgctgtcgacctcgaagatcgcgccctcgagcttggccgcgcccatggcggcctcatagcgccgcggcgggtcgccgaggaacttgccgatcgactgctccggcgcgatgccgagcacggcgttggccgggcccgtcatgccgaggtcggtcaggtagccggtaccctcaggcagcacctcggcgtcggacgtctgcacgtgcgtgtgcgtgccccagacggccgtcacgcgcccgtcgaggtaaaagcccatggcgcgcttttcgctcgtggcctcggcgtgcatgtccacgaggacgatcttcgcctgcgtctggtcgaggatgtcgtccgcgacgaggaagggattatccgtgttcgcgtcgagcgtgaagcgccccatgaggttgatgacgcagatcggcccgccgcgcacggaatattcgccccagccgcggcccgggcactgcggcgcgaagttggccgggcgcaggatgcgctttttctgctcgagatacggctgcagctcgtagcgcgtccacgtgtggttgccgagcgtgatgacgtcggccccggcggcgaagatcgcgtcggcctgcttcggcgtcacgccgacgacgttggcgttttcgccgttgacgacggtgaaatcaatgtgttcctgctcctgaaacgcgcgcaggcgctcagtcaggaacgtcaggccaggcgcgcccacaacgtcgcccacggccagaatgcgcaagatcataacggtccctcccatacgatcggaagaaaatttgataagataataaaaatagtataccaccgacggcggcggggaatcaatccagaaactggcgcgacgcagatttcatactcccgcgcgcccgcgcgcatactatccgcgcagcagtgcagctgcgaagggaggcagaaacgtgaaaggagacagcaaaatgaacgcaatgcagtttgccaagggcatgagcatcggcatgggtgtcggcatggcggtcggcacggcggcgggctggatgatgcacccgcagaaaaagcgcacgaacaacatcgtggcggacgcggtgcgcacggtcagcgacgtgacggacaccatccgcgatacgatgggctggtaaaaacgcaaaaaaggaaaacttttttgaaaaagggcttgcaattccggccgggctatgctactatacttaggcgcgttaggagcgcactaagcgccgttagctcagctggatagagcgtctggctacggaccagaaggccgggggttcgaatccctcacggcgtgccaaaaagctcgtgaaatccaaggatttcacgagctttttttattttcttccgcgtttgtgttcccccgcaaatggagcagccgcacagctatcagatcaggatccattctgccgcagaataccgtgaccgctgcctttgcttgccgtaatggaaaacatgatttttatgcctgcgtggatcagaaaaaccaccggatttttccgctgccaaagaaattacccgctaaaaattcagataattttgctgtctgcgggcgaattggtgttgcatcggtcggaaaaaagctataagctattatggaatcatgtaagcaaatagcagcgagggggcagagacagatgctcaagaaaatgtggtatgtctacaccgtctatgaggaaaagagcttttccaaggcggctaaacggctgttcgtctcgcagccgtcgctcagcgccatggtgaagaaagtggagagcgattatgatatcaccatttttgaccgaaccacaacgccgatctcgctgacgccggaaggagaatattatatctccgcggcaaagaagatcctgaggctggacgccgacatgcggcagcatttccgcgagtgctccaaggggctcaacggcagtgtgatgtttggcggcgcgagctttttctgtgccaatatgctctcggggatcatccggcagtttcaaagcgaataccccgacattcatatcggctggcaggaactgcgcaacgacgaactggccagtcagatcctccagaaaaaaatcgactttgcctttgaggtcgacaagatcgagacggatggcatcacctcgctgaagtttggctcggaggaattgatcctgactgtgcccaccacctttgtgaccaatgcgcatctgcgcagctgctgcttccgcccgggtgatacgagcaacggtgtgcacagtatttacgaggcggagccgatcgatgtgggcctgttccgggatgtgcccttcgtctttcttcgggagggaaatgacagctattcccgtggaatccagatctgcaaaaatgccggttttacgccgaacatcatcatgcaggtggattcttccatgaccacgtatcatctcgcagccgcgggcaatggcgccgcctttatccgcctttccgccctgtcgatcgaggcatcgggcaaactgtgctatttcaggatcgccgacccgctgaacgtgcgggacattttcctttactaccgtgcggccggcaggtccagggtggaggaaacgctgcttgcgtttatccgcgacatggtcggcggcgtgcagaaaatagaataatttgccatacgattttggctataagaaaatacacttttttgtcttggacagaaaagtgtattttttctataatcaaattaaataaatgtttgattcgaaaaaaatgatagcaaaagtcagaacagaaagtgaggaggtttatcatgattacagacgagaaaattttgttcgacgatgcttttttgaaggagatccaggacaagttctactacgtgcacgaggattatctcggcagaaagcgccagttttttgaaaattccggcggttctctgcgcctgaaggccgctgtcgaggaaaaagcgcggctggaaaaaatccccgactgccccgaacgtatccacgacacctccatgatgctcaagcaggtcaaagcggacggcatgcgcgatatcatgcaggtgatcttcggcgcaaagtccggcgcactggtgacggagctgacgtcctctcaggtgatgttccagatcgtgagcaccattatgcgcaatgaaaaatggggcaccaacgcagtcgtaacatccattgagcatccatcggcttatgactctgtggagctttactgcggtctgaccaaccgggaattccgcgtggcgatggcgaaccccaagaccggcggcgtcgatctcgatgagatccttagcaagatcgataaggacacgctgctgctgagcgtgatgagcgcctccaacatctcgggctatattttcgatatcgagaccatcgttcgggaagcgcgcaagatcaatccggatatttatatcctctccgatgccgtgcagcatgcacctcacggcgtgctggatgtggaacagtgcggcctcgacggcgtgacctttgccccctataagatgttcggcatccgcggctgcggttatggctacgtgtccgaccgtgttgcgaaaatgacgcaccacaaactgctcgcaaagccggaaaaagagtgggagctcggcaccttcccgcatcccaactatgcagcgatcacggcggtcgtcgattacgtctgctggatcggcagacacttcaccgattcggacgatcgccgcgagcagttcgttaccggtatgacgcgcatccacctgcaggagcactccctgctgatccacatgatggagggaaccgacgaggttcccggcctgcgccatattcccggtgtgcaggtgttcctcgattctgcggacaccgtggaccgcgaccttatcagcgccatcggcatcaacggcatcgacttcacacagctgacggcggagtattacaaacgcggcatcacggtctttgagcgcgtgaacacgagcctgtattccaagcgcatcgtggaatctctcggcctgaccggcgcgatccgcgtctccccgctgcactgccacagcacgcaggatatcgacgacttcctgcgcgttaccgccgagatcgcagctaccgtgaaggcataaggaaaaaagatacaaacagaaggagggcgtaatcttatgagtaaatggaaaaaggtagcactttggaaaaagattctgatcggcgttgtgatcggtctgatcatcggtcttgtgtccccgaaggccgcggaggtcatctcgccgctcggcgacattttcctccgtatgctgaaaatgctcatcgtaccgctggtgttcttcagcattaccagtggtgtgtgcaagatgggcgatgtcaaacagctccgcacggttggcatccgctatgttctgtggatcatggcctccgcggtgattgccgccatctgcggcgtgatcggcggcctgatcgttcagcccggccgcggaacgaccgaattcctcgccgccgccgaggcggcggaggcacagtcttacagcttcattgacaacgtcatcagctggttccccacgaacattgtggagtccatggccaatgccaacatgctgcagatcatcgtgttctgcctgtttttgggcgttgcgctgctcgctctgggcgataaggcaaaaacagtcattcggttcatcgacgaaggcagcgaggtcatgctcaagatcacggagtatgtcattgagttctctccgttcggcatcctttctctgattgcgacaatggtctccaccatcagcggcgcgatgatgaaggaagttctcgtgttcctgattaccgacaacgtgatctgcctcctcattctgattctggtttacccgctgatcatcaagctgcttgccaagctgcctccgtttggctttatgcgcaagatcgctcccgcgatcctcgttgcggtctcgacctcttcctccgcagccaccctcccggtgtccatcaaaatcagcgaagaggatctcggcattcccgagaacatctacggcttcaccctgcctctgggcaacacggccggtatgaccggcttcgcggtgttcatcggcctgtgctgtgtctttgcatcgaatctttacggcttccccgttacgttttcgagcgtgctccagttcgtcttcttcggcctgatcctgtccatcggcgcagctggcgtcaagggcgcgggcgtcgtgatgtccggcgtgctgctggaggcacttggtatgccgctgactctgatccccattcttgcggcgatctggcctgtgatcgacccggcgcacacgacgctcaataacgtcggcgatctggtcggcaccacggtcgtggccagaagccttgaccgcatggatatggacgtgtacaacaacgcaaaataagatacacgggtcccgtcccgcagcatagaaaaataaacaagcgctattccgctgcagcggaatagcgcttgtctgcatacaggacattcgatgcagcggagacgatgaagaaggccgcaattctaattccgcatcgaccgcccaacgcgggctccccgcagaccgcgcgcacaggtgccggcataacgttccgggatctttcctgcgcaaaaagcagcagaggatggatgcgtatatgacattctgaacataccgctcgaaaagcgtgctgtgcaggaaatcaaggcatatctcgaaaccgtcattggtcagcgcttccgcagcttccatcattttatgaagccctatggctatgcgatcaggaaagcctctggcaatacagcgagcccaaactacggcaaacaaatcatcacaaggattgggacaggcaaaacgtgaaaggcggggaaagtttctcgcgtttccttttataccgcaaaatttgcccccaacggcagccaacacttcgtgtcggcgccaagcttgcagcgcagtacgtgctgcgcccgtgctgctcgcttgaattttgcctgctcgctgcgcctcagcggcggtgctttttccccttgcgggttttttccggctcgatgccctcggcctcggccatggcgtccacggtcgcctgcagatcgtcgagctgggcatgcacgggcttgagcgccttttccacttcctgcgcgacgatggtctggtaaaaccggtagcgcacggcgacagcgccgatcgtgccgacggaggcggccccgcccacgatgagcgcggtgcggcggaagcgcggtgagcgcatcagctgcacggcaacggtcttgatgctcggctttttgagctgctgcgcggtgtttgtggccagcgcggccagctccttgccgctgtcgatggtctggcgcaggagcgcgagctcctgctgcatggcctggatctgttttttgcgtctcatatatggtcccccctgtcatgaattggcttttcaaagcgcgaccggcgcaccgttgagcacggcctcgacgagcgtgtcgccccgatagcgcagcttgagcaggaaaaacggcgcgtcctccgccagcaggcggaagaagattttgtcgcccgcccacaacggcagcgacggcacggccgccttgtccacccactcgagatccccctcgtcgcattcgcgcagcgtgccggtgaagcccgtcgccgtgaagaggtacatgtattccccctcccactcgtcggacaaaaacgtcaccacgccgcggcagcgccagtcggtcagcgtcaggccggtctcctcctgcgcctcgcgcaggaggcactcgtccggcgtctcgtcacgctcgaacttgccgccgatgccgacccatttgtcgtggttgaggtcgtgttccttcttcacgcggtgcagcatgagatactgctccccgcgctcgatatagcagagtgtggtgttgcgcatggtgcttcctccttgtcgatcggtacgccgcggctcacaataggcgcatacagcgggtgaggtagtcgatggcgtcctgcccggtcagccgctgcgcggccgggagcttgcggaaatgatccatccagacattgagctggtgcaccatcgcgccggagctgacggtgtaggccggctgcgcgccgccggatgcgccgtcgagcacgaaggcggcgtgctggttgacgaacacggacaccgacaggtcgtcgtaattgcagacgcggttttgcgtgcacaggatgcacagccgctccggcgtccggcgcagctgctcgatcatgctgcgcagatgctcgcgccgcgcctcgggcggcacgtcgatgaccgtgccgagaaagtgcagccgcccggtataaatatagtccacgagcgcgagctggtagaggaagatcgtctcgaaaaactccgcgctgccgagaaacagctgcagctcctgccgcagctcggggtgccgggacagaaaacgctcccgcagcggctccggcaggaaaaacggctgcatatgccgcagcaggcatcggccgtgcggctgggtgaagtaatcgaggaaatactgctggcggcgaagctgctgcaggttcggcgcctgcgcgagcggcagccggtcgcggatgtaggcatcggccgcagcgcagtagcgcccgacgagcgcggggtccgccgtctcgagcaggtatacctcgcgcgagaacggctcgcgcaggtactgcagcatgagcgcgtcgcggatgaggtagacataccctgtgcggctggcgcgaaattcgtaaaattcgtaccggatctgcttccccagccccagcagatagcagagcgagcggcagaagctgtccgtgcgcgcggagacatcctccatgtccacgaactgcaccacgcgcagcgccgtgcccgccgagaggatgccgcgcacgcggcggaaaaaggcgtcgttgttcttgaactgcatgtggatcggcatcgtgcagatcatgtccagccgcgccgaggatggcgcctgctgcaaggccatgaagatgccctcggggaagagcgcgatgtccttgaccgggctcaggccggcattttccgcgccggtcggctgcggccgctcggggccggccgcccggtcggccgcgatcgtatccgccagcaaggacgccagcgccgccgaaaagccggcatcgtcggccgcatcacagcgcaggtcaaactgcccggcaatgcgcgcgcgcacatccggcgcggcgttggcggtcagataggcggcgatctgcgcgggcagcgcatcgttgctgcgcagcgacgggtgcttgacgccgttgatccaccggctgatgtacgacgggtcatagccgagcgcgtcggcaaggttgcagcgcttgacaccgcacagccgtgtcagctcctgaagggtgcgcccgaacgtcatatcctcgcctcctcgcgtgcgcatttcttgactcagtgacgaaaaagtcacgcatctttcccatccagtatacgcgctgcgcgccgtgctggcaagtccggatgcaaaaaatcgcgcggctgcgtgattttttcaatatgaccgcgcaaaagcacttggtcaagttggggcaatttttatgcacgaaaagcaatctgcatccagcggatgcactgtgcagggcgaaaaacgtgtgataagatattgacgatctccggaggcgtttcccgagtcagcgccgcgcggcgccggctgcctgccggaacggacaacgaatcagcccaagcatgacagcttcaaaggagggactgcacttgaccatcgatgccgatcgcaagatcaaagagctggcgcgcgcgatcatcgccgacgcgggcctgccctacacaccggagcagctcgcggagatccccgcgatcctcgcggccaagaaccgctatttctggtgcattgacaaccaggagtttgacctcatgccggacgtgttcacggagacgggcttccgcactttctggagcggccgccccggcttccgcgaccgtgacgcgcaggtggcccagaaccgcagcacctgcggcgacgacatggtgccgatgcacttcggctacaaccagatcgtgcacttcaccggtccgcgcagcgcgcagctgctgaccaaaatgcatgactaccacacctacaaggacaacggccagacctactccggctacggcctgtatgtggacgacctggtcaaatgtgacgacgatcgctggcgcatccagacgctgcgcctgacctaccgtctgctcgacggcaaactgaggaggacaaaataatggatagactcaaaggaaaagtggccatcatcacgggcgctgccggcggcatctgccacaaagcgtccgagctcttctgccaggagggcgcgaaggtcgtcatggtcgatatcgacccgcaggtcgagcagttcagcgccgagatcaacgccaacggcggcgagagcatcgcggtcgtggccgacgtggcgcagcgcgacacctgggtgcagctcaagaagctggccgacgcaaagtacggccgcatcgacacggtcgtcaacggcgcggcggcgttctcgcccccgacgcacgactgggcgcacatcacgtccgagatgatcgaggacgtcatgcgcgtgaacatcgactccatgctctattcttaccagacggtgctgcgctacatgatgaaaaagaagatccgcggcagcttcctgaacttctcgtcctcgacggcgctggcctacaacggctcggccgtgcagggctatccgttctcgaaggcgtgcatcaagctggccacgcagaacatggtcaaccaggtcagcaagaagtacggcatccgcttcaactgcctcgccccgaactacgtctgggtgcccaagcaggagaaggtctgggatatgtaccgcgagcactttgaggccacgacgccgatgccctatgtcggcatgccggaggacgcggcctgggcggtcgtgtacctgtgctcggacgaggccaagtacatcaacggcgtctgcctgccggtcgacggcggctgggccgtgcagaagtgatccaaggagtaagatgtaattatgccttctattctgtcccggccgatcaagatcggccgcatggaacttaaaaaccgcatggtcatggcgccgatgggcgtcacggtcggcaacctgagccccgcctcggtggcgtactttgccgcgcgcgccgagggcggcgcggccatggtgttctgcaacatccgcgcctcgctcgcgttcgagtccggcgagcactccatctacctcaacgatgagaccgagccgctgttccgcggcctggccgagcgctgccacgcctgcggctgcaagctcgccgcgcagatccagcccggcgacgggcgcatcggcgggccgtccgtgcgctacaaagtgcccatcagcgcgtccgcctgcccgtggatgcacgtgccgcgtatgcgctgccacgcgctgacgatcgatgagatccacgagctggaggaagatttccgccgcagcgtgcagatcgcgctgcgcagcggggccgactgtgtgggcatccacgcctacggtggctatctgaccgaccagtttctgacccgtcgctggaacacgcgcaccgacgcctacggcggcagtctggaaaaccgcgcgcgctttctcaccgagctcatcgccatctgcaaggaagagggcggtgcggacttccccgtcatcgtcaagttcacgccggaccactacatggacggcgagggctaccgcgccatcgacgagggcatcgagctggcaaagctgatcgtcgccgccggagcggacgcactgcacgtggacgccggctgccatgaaaactggcccaacgccatgccgcccgccggcatgcagcagatgacgctgcagtcgcgctcggccaagatcatccgcagcgtggtcgatgtgccggtcatgacgcacggccgcttcggcgacgtggacaaagcggaggctgccctgcgcgacggcgtgtgcgacatcgcggtcatcggccgcggcctgctcgccgaccccgacctgccgaacaaggtgctggccggccggccggacacgatccgcccgtgcatctcctgcaacgagggctgcatcgcccgcgtctacaacggcgagacggcgacctgcgcgctcaacccgcgctgcggccacgaggacggcagcatcgacattccgccggctgcccacccgaaaaagatcctcgtcgtcggcgccggccctgccggctgcatggcggcgctctatgccaaacaggccggccattcggtcgagatctgggaggcgggcggccacatcggcggcaacgctctgtgcgcctgcaagccgtttttcaagcgcgacatgcaccgcatgatccgctacttcgagcgcgagctgctcgtgcacgacatccccgtgcgcttttacaccacggcgacgccggagctcgccgcggcctatgcgcctgaccacatcctctgggcggccggtggccggcccatcgcgccgaaggccatcccgggactcgactgcccgaaggtgtaccttgcgaccgaggccctgtgcgactgctgtgatgtgggcgagcacgtcgtcgtgatcggcggcggactcgtcggcgtcgagacggcgctgcagatggacatgtggggcaagcacgtgacgtgcatcgacatggccaagaccatcccgtcggagccgggcttcaagatgaacgacatgctcatgcgcgactacatggcgcgctcgaacgtggatttccgccccgcgacgaagctcgtgcgcatcgacggcgatgcgttcacgtgcagcgtcacggtcgagcacgcgcacgagcagcagcagatcgcgtgcgacacggtgctgctggcgctgggctttgccccgacggcgcaggccgcggccgcgtttgaagccgtcgcccctgtgacggtcctcggcgacgcgcagcagccgcgtaagatcctctttgccgtcggcgacgcgcacgaggccgtgcgcaaactctcggactgagcccgagcgcacctgcatcgtttcacgcatcatgttcccatttccacagtgcaagcggcccgcaccatccggtgcgggccgctcttgctatttcattaccgcgtcttaccgcgtcactgcgtatcgtctttgccgtagtattcgcgcaggaacgtcaggaacattcgcgccgacgtgccgatggtgttcacggacttgaccgctgcgccgagccgcagcgcgatgggtttctccagctggagcacccgcacctgcccctcgtacccgacgagggaaaacgacgacagcaccgacacgccgaggccgccggcgaccatggacaggatcgacccgtcgtccgatgccgtgacctccagccgcggggtgtccggcgggagaaacggctcgatgtactggtccgggctcgagagaaacggctcgcgcagcagccgctcgagcgggatggtctccccctcccacgggaagtccggcggcacgacggccacgagcggcgtgtccgccagcggcagaaagtcaaagccctgcgcgcgcgcctcgtccacgagggcgagctggatctccccgcttgcgagcgcggcaggcagctcatcaccgcgcacgagcacgtccattttaatttccgggtgcagcgcgcggaaggcgcgcagcagctccggcagacgcgcgcgggcaatgctcgcaaagcagccgatgcgcagcgtgcgcgtgcgtgggtcattctgctcggcggcctcctgcaggagcgtgtcgcacgcgcagatcacattttgaatataaggcagcagctgcttgcccgcgtccgtcaggcggatgccctgactgtcgcgctcgagcagcgtacagccgacttcagcctccagtttgttgaccaggtgcgtcatggcggactgcgtgtagccaagctgggccgccgccttgctgaagctgccgcattccaccgccgtaagcagtgcccgcagttttccgtcgtccatatgctgcctcctttttatcattcttttttcataataccacgaatttgttcaactcaaccaataaaattttctgacccatgccatttgcttttttcatacccccatgaacaactctcgtttctcatttatcaaaaagaatgataccctatattcggaaattgaaagcagccgtcccgcttcgggcggcaaaaggagagaaaccatgaaagagacgaaaaatcgggcggcacgcgacgtgatcgttgtcggtttcgccctgttttccatgttcttcggcgccgggaacgtcatcttcccgccatacctgggcatggaatccggtccgcagtggctggccggattcagcgcgtattttatcgcggacatcgggcttgcgctcgccgccatgttcgcgctgctgcgtgtcggcagcagcgaggccgtgctccagcgcgtcggctgtgtgccgtcggagatcctcatgtgcgcgatcattctgtgcgtcggccccatggtcgccatcccgcgcacgtcggccagcacgtttgaaatggccatcgccccgaacctgcccggcgtgtccgccgtggtgttctcggtgctgtttttcgcgctcatcctcgcgctgtgcatccgcgagtccgccgtggtggacatcgtgggcaaggtgctcacgccgctgctgctcgccggtcttgcggccatcatcatcaaaggcatcgtcacgccgctcggcacgatcgcgcccgaggcgctaatcgacagcgccgtcgtcaccggcgtcaaggccggctaccagaccatggacgcgctcgccgcgctgccgttcggcattctcgtgctgcagagcgtggtcgacaagggctatactgagtccggcaagaaattccgcatcatgagcgggtcgtccatcctcgcgtgcgtgctgctgctggcggtctatatgggccttgcctatctcggcgccaccgtttccgcgcagtataccagcgagatcggccgcgcacagctcgtcatggctatcgttgaggccctcatgggcaagaccggtatgatcatcttcggcatcgtcgtcggcctcgcgtgcgtcacgacggccgtggcgctcaccagctccgccgccgcgtattttgccaagctctgccgcggcaaggtgccgtacaaagtgtttgtcatcgtcatctgcgtgttcagcgccgtcgtgtcgaacctcggtctcgaccgcatcgtggccatcgccgcaccggtgctggatgtcgtctatccgcctaccctcgtcctcattttcatttcgcttgtcgtgccgcggctgcccgaccgcatcagccggggcgctgtcatcggcgcgctgctcatgagcgtactgtgcacgctcgacggctatggtgtgccgctcacgttcctgcacaagctgccgctgtttgagctgggcttcgcgtgggtgctgccgtcggtgctcttcggcgctgtggctgccgtgctgccgcaccgcaaggagaaagcgggcaaggctgagcccgcctgcgccggcgcaaacggcaaacagggatgaccgctccctgtgcaaaaattccccggaacatccgttccgggggattttttcgctttggacggtgcgcccgcgctgtccgtcagcccgccgcttccagcagctttttgctgacgcgcgcctgcacgtcgatgtagtacgcggtctctgcgtcgttcatgtccgcgctttcccactgattgaatttctcgcacgcatccgcatacttgctcatgtagcgtgcgtaatccgccatcagcgtgggatcgttcggattcgcgttgtattttttcatgaacgcgacatattcgttcataaaggcctcatagctgtccatggcttctttgaaatccttgcgcatgccgttgacgagcttgccatcgttttgcgccgttgcggatggcgtggaggaatccggcgacggctcggaagtcgtgctgcccgcgctcgtgtccggcgcgtctatacgaatgctcatgatctggttgccctcataatcgatcgagacttgccaccccgcgtcgttattggcacgataatagttgtcgcccttattgtagtcgaccgtaaagcccttatcccggcaggcgctgacataggcgttgtaatcgtctctgctcgtgccgccgatgtaaacgaagaaattgtcatcatactcaaaagagaatttgccggtcagggatttgggtgcgggcagctgtcggccggcctcgctgtccggccaggtgatggggcccatctccatcggcttttccagccggatggacaatccctccctgtttccgtaatagctcagctccagcttgtatccctcagcgttgtaagcgccgaacgacgaggaattggactccgcatccaccgtgaacccaaccgtctgacacgcctgcacatagtccgcatactgcttgtcggagatcttttcgatatcgacccacagctcatcggccgtgttggtatggatctgacctttcttcgcaggcggctgcgggagctgcgcgcccaggaccatatcgtcccaatctattttttccgacttgctgcctccggagatcctgccggcgatcgcgatcacgaccacggcgacgatcacataaaaccaccacttcttgtaaatcggtttcttcggtttttgagatctcgggcggtctgccgggatctctggcgacggctgcgggcacggctctgccttcgcgccgcaggccgtgcagaaattgccctcaaattctgcaccgcaatgactgcatttcatgttcctgttctcctttcggtttatctttctgtccgcgcggcatggtgccgccggcctgttcttccaaacaaacgttggaaaacggggcgtttctctcttccctgcgcccggcgaatttggctgtttccggtcaatttcggaaaatcgcggaaacttccaaaccgataataacacatttgtgttcaaatgacaacatatgtattcataatctgcagaatttctctctacactgaaagcacaaacagtgaagggagcatggacgatgctggatgcaaaagtggttggcagcgtgctgcagcggctgcgggaggagcgcgggctgtcgcaggagatcgtgagcggtctcgccgggatcggcaggacgcatttgagcgccattgagcgcggggaacgcaaaccgacgctggagaccttttaccgcatcggtgaggcgctgcatatgcggccaagcgcggtgctggcggagatcgaggcggagttggaaagaaacacatgagcccggcggcaaacgccgcatcctctgcgcagcgaaacgcgcaggcagcaggcatgaaaaaaacaggagagcggtctgctctcctgttttttgatctctctgtttccgctgcacccgtacttaccgttcttctcggaaatacggcaggccgaggcttgcggggggctgattttcgcgcttggaacgcacgctcgtgatgatgagcacgatgatcgtgacgacataggggatcatcttgtacagttccttgacggcgaggttcgtgccgctcggcaggaagatgtgcaggatgtacaggccgccgaagaggaatgacgcgagcacgccgatgtttggcttccagaccgtgaagatgacgagcgcgatggcgagccagccgcggtcgccgaaggcgtcgttggaccagacgccgcaggcgtagtccatgacgtagtacaatccgccgaggccggcgatcatgctgccgacgcaggtggcgacatacttatatttcttgacgtcgatgccggcggcgtcggccgtctgcggattttcgccgacggagcgcaggtgcagacccacgcgcgtgtgtttaagcacgtaggccgcgatgagcgcgatggccacggcgaggtaggcgagaaagccgtaggacaggaagatctggccgaaccagccgagcttcgacgcgaacggcagcgccttggaaaagtaactgttcgtggccgagagcgcgatggacggcacctcgctgccggtgagcttgatgagcgagccgcccatgaagttgccgaagccgacgccgaacgtcgtcatggcaaggccggtgacgttctggttggcgcgcagcgtgacggtgagaaagcagtacagcagtcccatgagcagcgagccgagcaggcacgacagcagcgggatcatgatggcgagaaagccgttcatcccggcggctccgccggccgcctgctcatacaggaacgcaccgatgacgccgctgatgccgccgacatacatgatgcccgcgatgccgaggttcaggttgccggacttttcggtgagcgtttcgccggtgctgccgaacagcagcgggataccctgtacgatggcgcgggggataaaggacacaaaatcaaacatgctccgccgcctccttcttcgccggcttgcggaagctcagccggtaggtgatgaaaaactcacagccgatgatgaagaaaatgatgatgccgctgaggatatcagcgaacgactggttgaggccgaacacggtcgagatctcgcccgcgccgcggtcgaggaacacgagcaggaagctcgtgaagatcatgccgagtgggttgaacttggccaaccacgagaccatgacggccgtgaagccctgcccgccggcgatggtggtcgtgatcgtgtgatccgtgccggacacgagcagcacgcccgcgatgccgcacagcgcgccggacagcagcatcgtgcgcacgatgaccttgccgaccttgatgccgacgtagcgggcggtgcgctcgctctcgccgacgacggagatctcatagccgtgcttgctgtagttgaggtagacatagacgagcacggtcagcaccgcgacgacgaggatcgtcagcaggtacttgtagccgccgatctgcggcagccagccggcctcggtgctctggttgatgatgccgaccttgcccgagcccttcggcgactcccagacgatgatgaaataggccacgagctgcgtggcaacgtagttcatcatgagggtgaagagcgtctcgttcgtgttccacttggccttgaagatggcggggatgacggcccagaccgcgcccgcaaggatgccggcgatcacgatgagcacgatgagcaggccgttgggcagcttgtcaccgaggcagatcatgcacgccgcggcggcgaggccgccggcgagcacctggccctcggcgccgatgttccagaagcgcatcttgaacgcgggcgtcacggccagcgaaatgcacagcaggatggcgaggttctgccccaggatccagatcttgcgcggcgagccgaacgcgccgctgaacatggtgccgaacaccttgatggggttgaggtgggtgcacagcgtcgtgatgagcgcgcacagcagcagcgccagcacgatggcgaccgcgcggatgccccaggcctgataccagggcagcgtgtcgcgcttgacgatgtggaacagcggttcccggactttgttatgcatgggcttcgttccctcccaactgcgtcatcatcatgccgacgtcgcgcttcgtggcgccgcggccggggacgatgccgctgaccttgccgccgcagagcacgaggatgcggtcggccagctcgagcagcacgtcgagatcctcgccgacgtagatcacggcgacgccgcgctccttctgccggttgatgaggtcatagatcgtgtaggatgcgttgatgtccaggccgcgcacggcataggccgtgagcagcacggtgggggcggaggcgatctcgcggccgacgagcaccttctgcacgttgccgccgctcaggcggcgcaccggcgtggtcacgcccggagtgttgacgtcgagttcctcgacgacggtctcggccagcttgcgcggcgacttgcggtcggtgaggatgccgcggcccttgcggaaggagcggagcatcatgttgtccgacaggtccatgttgccgacaaggcccatgccgaggcggtcctccggcacaaaggacagcgccacgcccatctcggcgatgctcagcggatctttgccgagcagctcctcgcgcgtgccgtcgtcctcgacgtagcagatgctgccgttttcggtcggctgcaggccggcgatggcctcaagcagctccttctggccgcagccggagatgcccgcgatgccgaggatctcgccggagttggcggtgaaggacacgtcgtcgagcttgacgatgccgtcgatgctgcgcacggtgaggtttttgacctcgatgcgcggcttggggtcgacggggtcgggccgggcaatattgagcgtcacggcgtggccgaccatcatgttcgtcatttcctgcgcgttggtgtccttcgtgagcatgtcgcccacgaactggccgtggcgcagcacggccacgcggtcgctgagcgtctcgacctcgtgcatcttgtgcgtgatgatgacgatggccttgccgtcgtcgcgcatgctgcgcaggacggcgaagagcttgtccgtctcctgcggggtgagcacggcggtcggctcgtcgagaatgaggatgtccgcaccgcggtagagcgccttgacgatctcgaccgtctgcttctgggacacggacatatcgtagatcttctggttcgggtcgaggtcgaagccgtagcgctcgcagatgctgcggatgcgcgcggccgtggccttgagatcgagcttttcatcgaggccgagcgtgatgttctcagcggcggtgaagacgtcgaccagcttgaagtgctggtggatcatgccgatgccgtagcggtaggcatcgcgcggggagcggatgacgacctcctcgccgtcgatgaggatctgtccctcgtcggggaagtaaatgcccgagagcatgttcatgagcgtggtcttgccgctgccgttttcgccgagcagcgccaggatctcgccccggtagatatcgagccagacgcggtcattggcgacgacggagccgaagcgcttggtaatgtcgcgcattttgaccgctgcgatcttgttgtccaatatggtgtccctcccgaaatggcggcagacgccgcacgacggcggcgcgctttaaagtacatatgagggaaggcccgggttgacaggccttccctctgcggtagattcagatatcagctgccaaagttctggtcgagcaggttgatgccgtcgatctgcacattgaagtacggagcggcgcggaactcggactcgtggaagtaaccgtcgctgatggcctcggtgtcgccggcgttgtcggcgtcggtgtcaacatcggccatgtagctggtcagggtctcgcccttgacggtgaaggtggaggtgtcaaagacgtgcagggtgccgtcctcgagctgcttggtgacttcggcaatcttctcggcagtgcccttggcagcgaccttctcgttgacatcggtcagcacgacggagccagtcttgagggtgccggtccagtcggaatcgagcgaggtgccgtcctgaacggccttgatgaccatctcatagtacggggtccagtcgatgcgggaggaaacgatgaaggtgttcgggcaggcagactcggtgctgccgttgtaggagacgttcgggacgccggccgtctcgcaggcggtcggagcgcccatggagtcggcgtgctggctgatgagcttgcagccgccggcgatgagcttgttggcagcttccttctcgagggcctcatcgtaccaggagccggtgaaggtgacgtccatggtcacggtcgggcacacggacttggcgcccagatagaaagaggtgtagccggagatgacttccgcataggtaaaggcgccgacgtagcccatcttggcctcgtccgccgtgaacttgccggcctcgatcatctcgttgagcttcataccggcagcgacgccggcgaggtagcggccttcatagatggaggcgaacgcattgtggtagttgctgagcttctcggtgtgggccttggtgccggtggcgtggcagaactgcaccttcgggaaatccttggcggcctggatcatgaagtcctcgtggccgaagctgtcggcgaagacgacgttgcagccggcgtccacgagctcggccgcggcgttgtagcactcctggccctcggggatgttggtcttaatgatgtactgatcctcgctcaggccggcgttcttgcaggcagccttcgcggcgtcgatgaagttcttgtcgtaggtggagttctcgtcatgcaggcagataaagccgaccttgatgctctcggctttgtcgccgtcctcggtcttgctgccgcaggcgcacagtgcgaacaccatgacgagcgcgagcagcatcgaaacgaactttttcattctcagctctccctcaaatcatcaaattttgtatttatctgcattgcttgcgcaaagaagatacaaaaaaacattggcaggtgctgacctttcggcgctcctgccaatgtggaaccgggaagatgccggtactgccatctcccgcggggaatttcacatcgatagtccagcaatttacggtgccgggtagaaacgccaagccatatcctttggtatatatcgactgctatttacgatcgctcccgcagcgcgggaacacttatacgttaccatgggcgaacggggttgtcaaccgtcgaaatgagcgaatttcatacttttgaaacattttccccgtcgatttgcacaacgccgctcagcagaacacgatgcccgtctcggggtccatgctctgcacgcgggcgagcgattccacgcggtagccgcgcgcgcggatgcgcgcaccgccgggctgaaacgccttttccaccgcgatgccggcgccgaccacggtcgcgcccgcgccctcgatgagcgtgatgagtccgtcgagcgccgcaccgttggcgaggaaatcgtcgatgacgagcacgcggtcgtccggcgagagatactcgcgcgagatgcggatggtgttgtcattgccgtgcgtgaacgagtgcacgaccgtcgtgtacgcatcgtcggagacgttgcggctcttggttttcttggcgaacacgaccggacagtcgaacacgagcccggccacggccgcgatgccgatgccgctggcctcgatcgtgacgagcttgttcacgccgcagccgtcgaacagccgcttccattcctccgccatcgccagaaacagcttcgggtccatctgatggttcaaaaaccggtccactttcaggatctcgctggatttgacctcgccctcggcgagaatgcgctgctcgagaagctgcatatcgctccatcctcccacaatcactaagatggtctttatcgtagcacccgcgccgggcgcgcgcaaccgtttttcgcaaaaaatccggcaaatcgccgaatggacggtttttgtgccggacgcggttgactttcccgtcgatgtgcggtatcatcggttcctacaagtaggaaaagtatgaatttccgcaacaggaggcgaggctatgcccggaggcaagcacgtgctcggccagagccgcgaccggcacatcttcggtacggtgaaggtcggcgaaaagggccagatcgtgatcccgaaggaggcgcgcacggtcttcggcattcaaccgggagacacgctgctcgtgctcggcgacgaggcgcgcggcatcgtggtcacgcggccggaggtcatgcgcgacgtggccgcaaaaattttcgacgaatctgacgaatgatataaggatataaggagaggaacgatgaatacagagtccatgtacaccgcgctcggcatcacgccggcggtgcaccgcttcggcgaggaggtgctcgccggtctgcgcgcgcgcttcgacgagatcgaccgcgtcgcggaatataaccagtgcaaggtcatcggcgcgatgcagaaaaaccgtgtcgacgcgacgcactttgccgccaccacgggctacggctacaacgacgccgggcgcgacaatctcgagcgcgtctatgccgactgcttccacacggaggccgcgctcgtgcggccgcagatcacctgcggcacgcacgcgctgaccgtggcgctcagcgccaacctcctgcccggcgacacgctgctcagccccgtcggcgcgccgtatgacacgctcgaggaggtcatcggcatccgcccgagcgcctgctcgctcaaggaatacggcgtgcactaccggcaggtcgacctgctgccggactacggctttgactatccggccatcgagcaggcgctgcgcggcggcgtcaagctcgtaaccatccagcgctcgaagggctacgccacgcggccgacgttctccgtgcagcagatcggtgagctgatcgcgttctgcaagcgcatcgacccgaacgtcatctgcatggtcgataactgctacggcgagttcgtcgagacgatcgagccgtccgacctcggcgcggacatgatcgtcggttccctcatcaagaatcccggcggcgggctcgcgcccatcggcggctacatctgcggccgcaaggatgtggtcgagcgctgcgcctaccgcctgagcgcccccggcctcgggcaggaggtcggcgcgaacctcgggctcatgccggcgttttatcagggctttttcctcgccccgaccgtgacggccggcgcgctcaagggcgcggtgttcgcggcgaatgtctatgagcggctgggctttcgctgcatcccgaacgcggcggagccgcggcacgacatcatccagtgcgtggagctcggctcgccggagcgcatggtcgccttctgcaagggcattcaggcggccgcgcccgtggacagctatgtcgaccccattccctgggccatgccgggctacgattcggaggtcatcatggccgccggtgcgttcgtgcagggctcgtccattgagctgtcggccgacgggccgatccgcccgccctacgccgtgtattttcagggcggcctgacgtggtatcacgccaaactcggcatcctcatgagcctgcagaagctcgtggacgccggtctcgttacactcgatcaactggaggagaaataaagtatgtggttctggctttctctcattgccctgctgtgctggtcgggctcggatctgttttcaaaaatcggctgccgcgacgcggacgatcatctggcacatttaaaaatggtcatcgccgtcggcgtcgtcatgggtctgcacgcggcgtatgaaattttcatcggcggcgtgagcgtgacgtggcacgtcatctggacgtacctgcccgtgtcgctgctgtacatcgtgtcgatggcgctcggctatgtcggcctgcgctatattgagctgtccatctcgtcgccgatctgcaacgcctccggcgcggtggtggccgtgctgtacctgtgcttcggcgggctggacgaagacctcagcggcgggatgcgcgtgatggtgctgctggccatcgcgctcgtgtgcgtcggcgtgatcgggctcggcgtggtcgagtcgcgcgaggacgacgagctgcgccgcgcgcgccaggcggcctcgaactaccgctacgccaagagctggctcgccctcgcgctgccggtggcctactgcctgctcgacgcggccggcacgtttgccgacagccgcgtgctcacgcgccttgacccggacgccgccaactgcgcctatgagctgacgtttctgttcgcggcggtggtgtcattcgtgtatgtcaagttcatccggcacgaccgcttcctgcccaaacgcgaggggccgaagtacgtcggcgcgctgttcgagacagccggccagttcgcgtacatctacgccatcgcggacgaggaccacgtcatgtacgccgcacccatcatctcggcctactgcgccgcgtccgtgctctggagccgcatcttcctgcgcgagaagctctcgtggcggcactatctcatgctgctgctgatcgtcgtcggcatcgtgctgattggcattctcgacctgtgagcgctgccccccccgcagcgtagatttccggtctgttccacgcggccgccccgatcgggcggccgcgcaaagccctgacccctcagggctttgcgcataagatccgattcgaggtgggccttgccccctcgagctcccccgctgctctgtcctccttccccgcagcgtagatttccggtctgttccacgcggccgccccaatcgggcggccgcgtttttgcgcaaatatttgtcaagtgtgtaacggcggcttgcaattggccgtttgtctggtataatgatggcatatctgcacctttcggtacagtattttgggagaaatgtgaaaaaatcaggagggatctcgtggatacggaaatcaaatccaaacgcggcggctggggcagcaacttcggcttcctcatggcctcgatcggctcggccgttggcctcggcaatatctggggcttcccgtataagatgggcaagagcggcggcgccgtgttcctgctgctgtatctcgtgctcgtcgtgctcgtgggcgtgacggtcatgctcggcgagctcgcgctcggccgccgcagcggcaagagcgccgtgagcacctaccgcggcctgtcgaagaagtacacctggctcggttacgcgggcatcgtgtgcggcttttgcatcatgtgcttttacttcgtgctcggcggcatcgtcctgcgctacgccgtcggctacttcctggccatctttggcgggagtgagtttgcctggtcgggtcagggcacgggctttttcggctatttcctgacggatacgaacagcatgatcctgtttttcgtgctctatatcctgctcaacatcctcgtcgtgtccggcggtgtgcagggcggcatcgagaagttctgcaacgtcggcatgccggcgctgttctgcctgctcgtgttcatcatcctctacattgcctgccagcccggcgcggccgagggctacaagttcatgttcagccccgacttctccgtgttcagcaatccggacatcggcttcggccgcgtgctcaaaaacgccgccgggcagatgttcttctccctgtcgatcggtctcggcgtcatgatgacctacggctcctacctcggcaagcaggagcacctgcagcgcaacgcactcatcgtctgcggcgcggacacgctcatcgccgtcatggccggcatggccgtcatgcccgcctgcgccgccttcggcgtggagtacggcgccggccccggactgctgttcgcctcgatgcaaacggtgttcgcccacatgggcagcatcggcaatttcatcggcttcatcttctacctgctcgtgctgatcgcggcgctcacgtcgtcgatctccatgctcgagctgtgcacggcctacgccgtcgataagcagatcgacaagggcctcacgcccaagcgcgccaagcacacggccagcgtcgcggcgctcgtgttcgtggcgggctcgctcgtcgcgctcgacgggctgggcgcgggcgttgccggcggcgccgccgtcgagacgccggccaccctgttcggcctgagcgtgcacggatggaacgactgctggctcgacctgtacgacatggtcgccgagggcatcctcatgccgctcggtgcgctcgtgatgacgattctcatcggctgggtgctcaagcccgaggtcgtgcagctcgagtgcgagcagagcggcttgaagtaccgcgccgccggctacttcaagctctgcttcaagttcatcgtgccggtgctgctcgcgttcatcctcttctgccagctcatcgacttcttcggcctgaagatccccggcctgagctgagccccgtaaaaaattccgtcagcgtctgcccaaacgggcgggcgctgacatttttatgacgcttgttgaaaaaacgaaaacgctctgatatactgggcttcaccgccattttttgtccgaaaggagcgctgcgccatgcgcaaaacggtcgcctacgccttccaccactcgatcccgatcctgatcggcttcttccccgtcggcctcgcctacgggctgctcatgcagcaggcgggctataacttcctgtggtcgggcgcgtgcagcctgttcgtgctggcaggctcgctgcagtttctgatggtcacgttctttgccggcggcgtgtcgctcgccacggtggccgtgctggcgctgctgctcaacagccggcatattttctacggcctgtcgttcatcgacaagttccgctccttcggcccgtggcgctggtttctgatctactcgctgtgcgacgagaactattcgctgcactgctcgcacgatttcgggcccgacgtcaacgagaagtgggcctacgtgctcacggccgcgctcgtgacgttttactgggtgacgctgtccatgctcggcgggctcgtcggctcgctcatcccatttgacaccacgggcatcgactttgcgctcacggcgctgttcacagtcatcgtggtcgatcagctgcgcggcgcgcgcacgcgcatccccgcagtggtcgccgccgtgtcgagcatcggcgcgctgctgctgctcgggccggacaagttcctgctgccgtcgctgctcgtgacggtcgcggcgctcacgctgctgcgcccggtgctcgagccgaagtatgccgaaggaggtgccggggcatgaccatctccgtcggacagagcatcgccatcatcgcggtctgcgccgcgtgcacgtttttggagcgctggctgccatggctgctgttcggccaccgcgccgtgccgaaggtcgtggagtacctcggcaagatcctgcccatggccgtcatggtctcgctgctggtctactgcctgcgcgggatgcagtttaccgccgccggggcgtgggtgccgcaggtcatcgccgtcggcgtgacggcgggtctgcactggtggcggcgcaacacactgctgagcatcgccgccggcaccgtgtgctacatgttgctcgtgcagctcgtcttttgatgccaaaccgggcgtcccgactggggcgcccggtttctggttgcacttttcctgcatatccgttataatatagggcctaaaaagaaatttctcctgcagcgaggtctgcccatgaaacacgacaagaaaaaacaatggctctcgatcggcctgctgacgctcggcgcggcggcgctggcggtgttcgccgccgcgacgctcgacgcgggcgacgtgcgcgcctcgctcgcggcgctgctgccgggctggacggctgcgatcgtgggctgcatgctgctgtactatctgtgcgacgcgctcaagtaccggctcatcacgcgcgcgttcggctgcgcgcagccgctgggcgacagcatcgacgtgtcaatgatcggcttcttctactcggccgtaacgcccgcggccgcgggcggccagccgtttcaggtgctgcacatgcaccgccgcggcatcccgaccggcacggccacgtccgtcatctgcacggtctacagcctgtggaacatcgcgctcgtgacgctcggcatcgtgggcgtgtgcctgtgcggcggcaagctcgcagcgcagagcgcggcgtggatccccgtgctggcgctgggcctgttcgtgcacgcggggctgctgtcgctcgtgctgctctcggccatcttcccgaagccgatgtccgcgttcggcacggcgtgcatccgctggctgtaccgacgtaagccgttcgtccgccggggtgcagaccccgaggcggccgccgaaaaatggtgcgccttcgtggcggagtatcacgatgcgttcgccgccggcatccgccaccgcggcaagctcgccggggcgctcgcgctcgcgctggggcagtgcgcggcgtacatgtcggtggcctactgcacgtaccgcggcttcggtctgcgcggcgtaccgttctggcaggtcacgggcacgcaggtgctgctgtacatcggggcaagctgctttcccatgccgggcgcgtccggcgcgagcgagggcacgttctacctcgccttctcgccgctgttcggcgactatctgaccactgccatgctcatctggcgtctggcgtcgtactatctcacgatcgtgctgggctacatcgccgtcgtggccgagcgcgtgacgctgcgccgcgcagaaacgtgaaggcgcacgaaatccgcacacacgg

SEQ ID NO: 14009 - DNA, 1436 bp, Unknown
  gut microbiota DNA sequence
ccaggcgtcatagtcgtaggacgcagcgagtttgccgttcgcgttcagcagcgcaatgacgtcgccctgcgcgttgagaacgtagtagtagagcgtcgaggtcgagccgtcgttatagatcatggcgaacggctggttgccatcgtcgtagacaaactcaagtgttttgccgtcccactgctgccgcatgaccttgccggagagcgtggtgtagttgtacgtcgtgccattgaccgttttgctggtgcggacaccggacatgtcgtaggtgtaggagacctgcttgccgtcgaccgttgcggaggcaagctggcggcccttcgtccacgtgaaggaataatccttgccgttgtaatacgtgaccgggttgccggaggacgggacgccgctcgtctgggtctggccttcgtagagaatgtccttcgtcgtgccgccgactgtcacgctcgtgagcaggtccggccacgaggggttcgtgtagccaaaggactttatgaccgcgccgtcggtcgtgacgctgcggatgttgcccaccgtgtcgtaggcgtaggcgcgggacgcgccgccgttggtctcggtcgcaagttggccctgcgcgtcgtaggtatacgtcttcgaggcggctgccgcgggcacattcgtgccgccggtcgtgaccgtctggatgttgccggccgcgtcgtaggtatagtcgaagctgcggctgctcgagccgaacgtgtaggccgtgctcgccagacgcgtacccatccggttgcagccgtcatcctccgcgatgaccgcataggtatagccgcgggtgtagaccgtggtcgtgcccctgttctggttgggcacagtgaccgtctttttctcaagctggcgcaggtcattgtactcgtacttagacgtgacgtcgagctggcccgggatcgtggtcgtgatggcgctgatcgtgccgtcgaccgagctgtcggccgtgccgtcggccttgacgccggtgtaggaatactgctgccggtaaaggcccgtgccgaactgccacgactgcgacgtcatgcggttggcggcatcgtacatatgctgcgtggactggatgagcgcgccgttggccgtcgactggcgcgaatggatgaggcggccgaggctgtcgtactggtagctgtactgctccgtgaccgcgccgctgccgtccgtggcgtactgccgcgtgaggtcgttgtcgccgctgtagtcgtagtggtaggttgtaccgtcattatacgcagcggtgcgctgcctgtcaaacgcgtcataggtgtagctgacactgtcgccgttgccgtaggccatcgtggccagccggccgttattgacgttgccctcatatgtatacgacgcgagggtgacgggggaggtgtaccccgtctgctccgcgctcgaggcgcagacctgcacgcgcgtcatgttgccgaagg

SEQ ID NO: 14010 - DNA, 596 bp, Unknown
  gut microbiota DNA sequence
gcgccatgccggtcaaggactatgtggctgcggtggcagatccggacggcctgccgcaggcgggcagtgtcggcgcggtcgtgtcggcgctggcggcggcgatggggtcgctggccgtgcgcgcgctgcgctcggacgatgcgtcgctgcagaaaacggccgaggagctgcgccagatgaccgactacatggtctttcagatcgacgaggagctgcgcgcgcgcgagccgcttgaccggcgcagagtcgaggagaacgtcacgcgcaccgatctcgacagcgcgctgcgcgttgcgagcgacattccgaacgagatcgtgtacatcatgtgccgctgcatcgagctcatgaaggaggtcgtggacaagggcgacgacctgaccgcgtgcagcgcgctcgcggccgtgcatctgagcatggcggccatccgctgtatgcaggcggagctgctgtcgtatgccaagatcatggacgacgacgtgttcggctacacgatcgtgcgcgaggccgagctgaacctggccgaccatcaggagctggtggacgggctggtcgaagagctcacgcgccgtctgacacgcgcgaaaaagtaagac

SEQ ID NO: 14011 - DNA, 254 bp, Unknown
  gut microbiota DNA sequence
aaggactttatgaccgcgccgtcggtcgtgacgctgcggatgttgcccaccgtgtcgtaggcgtaggcgcgggacgcgccgccgttggtctcggtcgcaagttggccctgcgcgtcgtaggtatacgtcttcgaggcggctgccgcgggcacattcgtgccgccggtcgtgaccgtctggatgttgccggccgcgtcgtaggtatagtcgaagctgcggctgctcgagccgaacgtgtaggccgtgctcgccag

SEQ ID NO: 14012 - DNA, 718 bp, Unknown
  gut microbiota DNA sequence
cgtctactctatttttaacaacataatcccaaccatctccaccacacttatcacatctgtcttttcgctttgcaaatgggtcgagtcgccttacgatatagtctggattgtgaatgtaatcattcaggcacttcggacatagacagcgaatattttctttcccctccggcttgtaaacccaaagtccaaaagtctttttcaaagttgcatttatttgtctgaaaagtttatcgtcatctaccgtacctatgtagtcacgcaaatcctctctattgactgtccgtatctgttccagaagaaccattgacggtttcttcagtccaaactcctcgccgagaataatgtgcgatggtaaatatcttttcttgattacacttgtaaccgctgcaacaataatcgtcggagcattctggttataatcgtccgcctgaacaacaagcactggacgctctccgctttgtactgaaccactgttatctccaaagtcatagtagaataaatccccatgacaaatcattttttctttcatatacataacctcacaagaatctaatttttaaagtgtcattcgtatccggaatgaaataaccccttcactcatttggacaaagggtgctgaaatgcacacccaaaatcagagattttcataaaatttgataaagtttttctttgccgctgcaatagacttatctacggagctgtaatatacgccctcctg

SEQ ID NO: 14013 - DNA, 350 bp, Unknown
  gut microbiota DNA sequence
ctttgattctggtcctataatataggacacctcttttcataactgtgccatattggggaagcattatttttctatttgccaattcctccacctcctaagaatatactccagcgctgtatctatgttttatcagaccattatgatttcgacaaggatacggaccggctcacactccagctctgcgaggtttacgataagttgcgttcttttctgctggctttgctctgtgggtgcattttgcgatatactcctgaaggcccgctgaggtaaagtacacacagccattctgcacatattgcacataagaaataaggccattgttacgggccgcgtccagcgttgcaatgctg

SEQ ID NO: 14014 - DNA, 754 bp, Unknown
  gut microbiota DNA sequence
gaaaataactccccaattttaaggaaggaggcgaagcatggacttcgttcgtgattacatgcgggcgttgctggcaaaagagatcgacgcggcagctgaattgcagaaacagaaatctcaggtcgtttatcagcagtattgcgcaggcggtacgatgcatcgtggctactattgtccaagcttgacggaagatctctggctcggcaacacaaaacgtggccgcctttgcaagaagcggccgtcggaggaaagactatcacacatatacggctttgatgcggcagaacggcttattgttgttgagcacatgcactgctcaaaggagtatatcttgtacgatacaggagtgacgttgggtgtggagatagataatgctaacaatgcaagtgcagtaaacatttgccggtatgacgtaaatggaagaattcagatatacgaatgctattttctcacgccgaaggcagatcaggttttctatatgacccgagagacgttccgctacctgccggatcaggttatagataattggtacagggagatggagtatgcaggagaatggtttcacgagcatcaacgctgcgtctttccggtgaaagacggatgtctgggtgactatactgcagaaaatttttatcatggtcgatgcggtgttaagatcccttatcgagtgacaaaaaagcgaaaagtcccgccatgtagccctgaaaataggtgattcagtaagcgggcggtgcattagcaccgcccgcatttt

SEQ ID NO: 14015 - DNA, 5285 bp, Unknown
  gut microbiota DNA sequence
ctcccctctttgggggcgttcggggcagtgctctgcggcgcaggcttgcgggcagcgggtgccttgccctcacgctggggctgctgtgcctgcggggcgctgccgttcccggcagggcgacggcggcggcgacggtgcggggcaccgttcggggtctgggcgggcttttccataattcacctgatccttataagccgatgacacggcattcgttgtagtatcgtttttcctcggcatggcccatgctgaaggtcttgcggggtagcacgccgcccagcacaacacccttgaacaggtcggccttggcaaaatcgggcagcagtatggcggtggcgggcttggcggggtcggcagccaatgccatcgcaacgctctcgccgtggatataatcgaccgttacaccggggtggcggggcagataatcggccagaaaggcctcaacactgccgacagtcagcggtgcgggcgggttggccagcgccacggcggactcgccgcaggcgtcagccagacgcagccgctggtcggaggcggtggtgctgcttccctgctggcggtcccacgcatccagcgcggcgtacagctccttggcggatacgccgaacaccacgcggtggatcggctcgatctcaatggcggggctgtggacattgcagacctcggccaagcaccagcgggccggatgggtccggcgctgctcctcggtcagggtgggcttcagctcttcccaataggcttttgcggtggcaaggctgtggttgccgtcaccaacggccagcaccatcggctcctgccctttggcggcgggccagcggcgggcaaaggcggcggggtcagccagtgcagccagcgcggcatcgacctgtgcgaccagcgccggatcctccacggcccagccgcgcaggcggccgccgcccagcatcagctccccgtcatagagcgggggcagcgtgtccttactctgaccgatcggctcgatcagggtgcagccggcgtcatcggccagcatcatgacatggggggtctccagcgtggcaccccggcgcaccttcaggcgcggggggatgcgctccacaacggtgctttcgctgggacggatggcgggcttggcaccgctggtgtagtcgtaggcctccagatccacggcgcccacaaggccctgacggatggtgccgtccatctgggtgcgctctacataaacatagccatgtacttttcttgtcagaacggtgtggcggtagtcctccatcgtgcggcggatgctctgcaggcgcgcgtcctcctgcggggtgccgagataggcctccggcaggacgatgtgcagggtgctgggcttgttttcggcgcgctgctcggcgcgctgccagtactccggctgggaggtgaactgatcaacagcgatgcaggcccacgggtccagcggaacaccggcggcaggcagtaaaatatcggctgcggtaaagcaggcttcggacatgataacgaccccctcacaaaagcaaaattacaatacgacggtatggcccaccagggcgtagatggccagactcagcacaccgatgtagatcatcgagctgggcaggccctgaaagatcgagggaacggccttactgcgcagacggcggcggccctcccggacgatgtagacagcaaagacatagcctagcccgctgccaagggaaaaggcgatgcactgcaggatcgtatagttctggttggcacagacgagcatggtgcccagcacggcggtgctgcaggtggccagactgagctggctgcggcagctgtggcgcaggcggcggggcagcagccccagcagcagccatgtgacggccatagccgccacgccgcaggtcaggtagacaacggggcgcagggctgagagcggcagccagtccggcagaatgtcgcgcagccatgggaaaaacaggttgtgtgcggcccagcccggcagtgcggacagggtcatgacgagcagcagcggcaggcagaaatcccagacctgcgtgcggtggtccggcaccagcttcatcaggcggctgacgcccagcgcgcgggccagaacgacattttccgcaaagacagccagcaccatgtagctgataaattgcagcacgccgcttaggatcggctgcaactcaatgttcacggtctgcatacaggcggcgcacctcctcatgcttgtaatcggtatacaggttggcggcggcgcaccagcaggcggccataacgcccagaatgacaaagccgcccgcgggcagtgcggccagcggcagcagcgcattgtgcatgaccacatggccgaacacggcaccggtggccagcagctcacgcaggcagccgaccagcagcagcacgacacacatgccgagcgcattgttgaagccgtggcgcagcgcttccttcaccggctcaagctcggaaaattccatacgcttgacgatggcaggctccacaacaaggatcggcagatagatgcccagcagtgtgagatctgcgccgaacagcgcgtagagcagcacataggtgggaatgtagagcagcgctgcggtataacagtagatgaccgggcggaaacggttgccggtcaggtggcagactgccacagccagcacgcgggtaaaggtgaccagaatcagcgcggcgatgcagagcatcagcgcccgctggccgtccagtgcggcgccgatgaccggggccagacccagcccgcgcacaacaaccgggttggagagcaggatgtggtcggcgcggatacgctcgttcagcgcggcctcggcctccttgtagctgttgcacggagcggtccgtttgtgctttggcgcaggggcggcagcgggctgcggggcagtctggacaggctgcggcgctgcggccttcggctgcggggctgcctgcggtgcgggggccgtgggctgcacggcgggcatctgcagggtgcgggtatcctcggcagcggtctgccgtgccggtgctgcgggggcaggcgctgccggggtaaagccggggttgccgtattccctgtcgcggtaggtgcggaaatgcgcctcctcggcgcgggcctcggcctgacgggcagcctcccgctcggcctgacggcgctggacctcctccagcatggcgcggcgctcggcctgggtgtagcgcgggcggctggtggggatgatgactgtatcattgtgggcagcggtgttgcgcgggggcgctgcaggctgctcctgcggctgtacgatcggcttttggggcacggcggtcccggcctgcatggcggcgatggcctgctcgatctcggcgcgggtggccccctgctctgccatgcggcgggcagtctccaccatctccttggtgatatgcgggatgatcagcgtctcggagcgttcctcgccccggcgcttactcggtttttgctgcattggcaagacgctgctcctcctctctcatgaagcggatgcgctcggtacggtggctgatgagatccagccactcgggaatggcgcctgtgatcagcagggcgcagcagacggcgtactcatacggactgaaggtgcggaacacatgggtcatgatgccgagcattgtgccgtagacgatgcggctcatcgggcgatccggcattgtgaccggctcgcagatcatgaacaggccgccgaacagtgctgtgccggacagcacgatatatttttcgagatagacgcgctggcggatatactcccacgggagggagaaggtcggcagctcgttcagattcgggaaaagccacggcaggccgatgacaaacacaaaaaacgggatgacgaccagagggctgatgcggccccgcaccagcaggaagaggccgcacgccatcaggacgagcgcggcgcttgtgcccacagcggccgagacattgccggtcagcagattcatcgtgctggcgctgggcagaccgccatcacgcagggttgcgttcatgccctcgaccagagtggtgtttacctccccaaagagcggcagctgggtgccgggcacagggtaggaaaagacattcttaggccaggagatgccggcgaccacaacgccgacggcagccgggtggaacggatagtgcccctcaccgccgaaggcctccttgaccagcacggcaacaatgacggcggcgatgacgatgggataggagatgctggcgggcatcatcagcacgatcagtgcggcaaagcactcgctggacggctcatgggactggtagcccgtgccgtgcagcggtgcaagcgcgcagtcgcacagataagcggtcagcagtgccgccaaaaaaagcagcgccgggcgcagaccgtaaaaatagcatgacatcccgaccagcgggagcgagcaccagagaatatcgctgtaatagctgtaattcgggctgcgctcgactttcatacgtttgggcatggggaaaagctcctttacttgctgtgcagtacacgcaccacagcagcggggtcctcagcgcggaaaagagaatttccggctacgagccagtcgacaccggcctcaatgcactgcgggccggtcacggtgtttatgccgccgtccacctcaatcagggtgttgcagcccaagcgggcacgctcggcacggatggcggcgatgcgggccggggtggtgggaagaaatttctgcccgccgaagcccggctccacgctcatcacaaggatcagatccacaacgctgagatacggaaagacggcctccacgggggtgccggggcggatgctgatgccgacctgacagccggtggcgcggatggcggcgatgacctcctccaccgtgtcgggcacggcctcaagatggaaggtgatgagatcggcaccggccttggcaaaatccgccgcgtagcgggccgggtcgctgatcatcaggtgaacatcataaaagacatcgggcagggcggcgtgcaggcaggtaagcaccggcgcgccgtagctgatgttcggcacaaaatggccgtccatcacatcaaaatgcattacatcggcaccggccgccagcaggcgggtgcagtccttgtgcaggttagcaaaatcggccgacaaaatcgaagcggcaactttcgtcatgatacaattaactcccttatataaactggttcccacaaattcctgtgcagtgcgcacatataaagatattatatcccattacaagccaaaaagcaaggcggccgccaagcgcaaaccgcccgcagatctgccgcaatgcggctccgcgggcggttgtgaaagtttttcagcgggcaagggcagcctcacgcgcaggggtgcggc

SEQ ID NO: 14016 - DNA, 62095 bp, Unknown
  gut microbiota DNA sequence
ataacgcttgattaaaaccctgtcaaaagcgcagaagatggaacgcgaaaagttccgtattccgcgcagcgtacaggatgcaatccccatccaccgcatttatgcggatgggatttttcaggtcgggaaccagtattccaaaacgtggtcgttcaccgacatcaactacgccatcgccagcaaagaggacaaaaccagtatgttccttgattactcggaactgctgaacgccctcgactccggcgcatcggcaaaaatcacgatttacaaccgccgcatcaacaaggccgagtttgagcgcagcgtcctgctgcccgataaggatgacggtctggacgaataccgccacgagttcaaccggatgctaacctcgcaggtcaccggcaccagcaacagcatcgtgcgggaacgctacctgaccgtcagcgtggtaaagcgcaacgcagatgaggcccgcagctactttgcccgtgtcggcacggatctggtgacgcaccttgcgcagctttcctcggtggcaaccgaactgacactgaacgaacgactgcatattttccgcgactttttcaaggccggggaacagactgcagcagagttcaatattcacgaacacgccaaacgaggccagcacttcaaggattggttctgccccgacagcatggagttctccgccgatcacttcaagattgacgcccgctatggcagggtactgtatttgcaggactacgccagctacatcaaggacagctttgtgtccgagctctgcgaccttgaccgcgacctgatgttatctattgatattctcccggttcccacggacgaggccgcccgccagctgcaaagtacgctgctgggcgtggaaacgaacgtggccaactggcagcgccgccagaatgcaaacaacaattttaccgccacgattccgtatgacatggagttgcagcgcaaggaaacgaaagaaatgctggacgaccttaccacccgcgaccagcgcatgatgttcggccttgtgacgctggtgcatctggctgacagcaaagaacagttggacagcgacaccgaaacgctgttttccactgcgcgcaagcacctgtgccagctttccacgctgcgctggcagcagaaagacggactggacacggtgctgccgtatggtctgcggaaaatccaagccctgcgcacgctcaccaccgaaagctctgccgtgctgattccgttccgggcgcaggaaatcatgcagccgaacggtctgtactacgggcagaacgccgtcagcaagaacatgatcgtggcggatcgccgcttgctgctcaacggcaacagcttccgtttgggcgtttcgggttccggcaagagcatgagcgccaaggaagaaatcgtgcagatcgcgctctccaccgaggatgacattctcattctcgacccggaaagtgagttcggctatctgaccgaagcccttggcggtgaagtcatccgcatttcggctacgtccgatacccacatcaacgcgctggacatggatcgcgctatggcgacgagcgcaatcctatcgtcagcaagtcggagtttgtgctgtcgctgttcgagcagctcatcggtgacggcatggtgacggcgaaagaaaaatccatcctcggtcgctgcaccgagcaggtgtacctgccctacatccgcaacggctacaaaggcaccccgcccacgctgcaggacttttaccgtctgctgcaaatgcagccggaacccgaagcacaggggctggcgctgtcctcggagctgttcattaccggcacactgaacacctttgcccggcacaccaatgtggacacgcaggcgcggatcattgcttacgatatccgcgaactgggtgagcagcttatgccgctggggatgttggtgacgctggatgcgatttacaaccgcgtgattcagaactggaaaaaggggcgcagaacgtggattttctgcgatgagttttacattttgttccgctatgagtacagcgcgaatttcttttacaagctgtggaagcgcatccgcaagtacaacggacttgtgaccgggttgacgcagaatgtggacgagttgctgcgctccgacaccgcccgtctgatgctggcaaactcggagtttctggtcatgctgaaccagagcgccaccgaccgcgaggaactggccaagctgctgaatatttccgataaccagcttagctatgtcaccaacgtccccgcaggctgcgggctgattcgctgcgcgggcaatatcgtgcctttcactaacagttttccgaaaaatactaagctatatagcctaatgcagaccaccccggatgaacagcaatgggagtgaaccaatgatttataaaaataaagggccgccgaaacattcctcagcttcaatgaagtaaggaggaaagttggtaaggatgcaatgttacaacatcgttgaaacatcatgtgctctattcatatgaattttccgctttaatgtgagtatgtcttctgcccttaagtcatcgaccttttgcagctcctctaaaaatttatcattttcttcaagaattgcgcagctatgaaatggagcaatagcaattaccctatagtcatttccaacgaagcgctcttgaatgtctaaatctgagacgttttgaaccttaccattatatcttacataaccactttctacttgtttgtaaggaataatatgctttccatcaatgactgcaacggaataatactcgtttccctcaattatatatggcgatgattctcctatctctaacaacaagatatcatcataaagatcatcagtaagtaatccccaaattgctcgaatatttagttgccggaagtccattaagaagtcatcgttttctatctttataatggaaccaatagagtcattcgctatgccagtgctaaattcaattgattgattgtatttatgggaaaaaatactattaaataatccgcacatagtatctttatctgttatttcaaaagcgcacctaaagaattcgggaacaacagacaatattgcacgatgaaacacacgcatgtcttcgaatggatcgcatgttctttctttattcttttcattgtaatagaactgctctatttcctttattgattgaaaacgttctgatggattattcctaaggcatctactgataatcatatcgaaaatatatgcgtcatcccatctgtatttttgcgcaataagttcagctccagtaccacgatttactgttccgaatataaaccaatacataatctgagccatagaatatatgtctgatgcttgcgtcacttcatagtgacaatcaatttgttctggtgcagaaaattctatgttggctaaacggtcacccttcttcgttttattatctatgaggaagtcttctttattatagtgcgcaattccaaaatcagataatacatatttttggtttttgtcaaccaaaatattctcaggcttcagatcgcgatgaataatgccttttctgtgaatggaagccaatgtagagaaaagaaattccactaaatttctaaaatcatcttccctaatttcacgcattcctcttctataactttttaaattttgtgcgtaacatgtcatgattatatagggaacaacaatcttgtcctgtatttcgagttctccataatgtatcatgttaacaacattcaccaattcatttcgaatataatttgtattaaaatattccgacttaaacctaatgtatttttgctccgaatcggaaatcaaaaattttatagcaatttcctttccatttatcgtggcaagatataccaatccatttccgccttgcccaatcctattatgattggtaaacagcagcttacctaaagaagttgggacgccttcatgagaattgatgtattgaatcaaggcttgttcgatctcttcagctttcatatagcactcctaacaatcacgaaatcaatataataacggtttaaatatgatgtgatactattggactcattttctcaagtacttttattcttataatcccattatagcgaccgtagatggcttttgcaaacaaaaagctctgcaatacgatgcagagcaaattttatatgtaaaagctttcttgcctaatttgttgtctgcccttgaccgagcgattgctctggcatggtctaaggcgcagtggtgagtgcgggatgcttcctgcgtttgtttcttgattacgagatttattatagcggtgacttgtgtggagaatttaaaaggcttttgaacgattttgaaattctatttgaataatttatgacaggggtgatgacatgaaagatattaaagagaagcctgccgagcgtatgccgaaaagcaatgtgaccgggaagattccaaaggcggcgctgaaaaaagcatggacagaatccaaggaaaaaagccgaaccaagctgcgggaaagcatctctatgcagggggatggcgactatactgccgcccaaggtacaggtgtggtgttgacagacacatcctattccgctattaagcagaacaccgatttcaccgtagaacaaggccgcaagtttgcccgcaaacagtttcaaaaataccggaaacgccgtaccgcagagcaagccgaagccacccgcacctacgccgccagtgagcgcggtgtcagcccgaaacaggccgagtgcggcacactgcccgatgcggcgcaacgcccgcgccgtggggcagatttgccccgacagcgggcaaaagaaaaagccgtcaccgccaagaccgtgccgcgcgatattcgcggtgtgacccaaagtcagcgccaactgcgtactgccgcaaatgaaactgtgcggagcgtaacaacccaagcacaaatgcatacccgcacccgccaagtacagcttgctatccagaaagctgccagcaatacccgcaggacggttacagcggtacgctcggccatacgacactttctcgccagcctccacaggcttgttgcggccattgccgtaggcatcagcgtggcacttagcatcattattgtcatcagccttgtggcgtttgtgtccagctcggcttacggcatcttctttgccgccgatgcccccaacgcagcgtccgtcaccgtgcgcgaagctgtagaaaccctgaccgaagaataccgcgataaactggaagaaatctccgacaccgtacagcacgaccgccaagacattaccgccaacgatgatgtatactacatccgctggcaggacgtcctggcggtcttttcttcgtatgtggcgggcagcgaacaaggcgcgcccgttgcggcgctgacggaggaacaggtggacaagctgcgggaaattatgtgggcgataaacgcagtggactacgccacccatgcggaaaccgctgttatagaaacaacggacaagaacggaaagcctaccaccgcaaccataagcgaaaccgtccttgtaatacgtcttacccacaaaacgccgggcgaaatggcggcagattatcattttaccgcccgccagaacacctacctgaaactcctgcaagacccgcagtacgaacaactgtgggcggaattgctcggcggttttgcacagggcagtggaaaacttatgtcccccgacagcacccgcaccccaacaggcacactccaatggccgctgcccgttgcggggacgattacctcgcaattcgggcatcgcgtagaccccatcaccggcgaagccagctcccacaccggcaccgatattgcctgtgccgagggaacgccgatcctcgccgccgcagacggaacagtcaccgttgccaacggtcttgacagctggggcggcagttacggctattacatccaaatcgaccacggcggcgggctggaaacgctgtatgcacactgttccagcatctgtgtcactaccggtcagcaggtgcagtcagggcaggttattggctatgtcgggcacaccgggcgggcaacagggagccatttgcattttgaggtaagagcaaatggaaatcgcgtaaatccactacaaaattttctgtgatagaaatcactctataattctgagtgctgatgcgacaagcgaaaaatacagactgccataaaggtgtttaatcctcaaggcgcaaggaaaaagagcgtttataaaatccatcgattgcacgctcgacaatcttggaaacaaaaatagacatcacaactaaccatgtggtagcaacggtttgaataaggttacttactgcaacacagataaagttgtatcacaaatatatgcatgactgtcatagcaggaatttgttcggataacttttatcatcaaaacattacccccatttacactgacactaataggccgaatatgttcatctcgcacaacgtcatcaacacgcccaacgagaacatcatcaagatagatctccacgctcatgtttgcatctcgatttgtatcttccgatgtaacaatatttgccgcgaaggtatcatattgaccatccaacttgaacttggcccatgctgtgtcataagcctcaaagcgatacgatatactgtgcgtggttccatataaatccttgactgaggggacttgctcacaattaacactgtcaaggcattccaaattgtcaaggcgcttggaaatgtctcgctttaatccaccctgctcaattacgctattgatttcgtctgaggaatatgtatttaatagtgtttccttaagtatttgaatttgattttttaagtcatcattttcgttttgtaggctttggacttgtccctgcaacgttgattgatttgcctgatactgattattctcatcaagaacctttctgtatgcggagattagctcatccgttgagtctgttaaatcagtgccggcagatacataactgccggtttcccccaaaatttggagcacatttccatttactgtttgggagatgttctggacgttatgaagtcgaaaagcgcttccacctgctacaatagctgaaatggcggtaactactgcacaaataattttggtgcggtttttctctttcgtaatcatttttacacttatccttcccagtcaccgaagtgaattattcgaatcgaatatccttccgtagtttttaggcgtcatctacctgtgattagcggcctttcacccggagagtgcatatccctgcctcattacggttttcaaatcattttgccccaagtccagtttcttccgcagctttgcgatatgcacatcgaccgtccgtgtctgaatcggcgttgtgatatgccaagcggatgacagcagaagattccgagaacagatatgcccggaatggtcgagcaacgcaaggaatagctgatactccatggtggtcagatgaatcggctggccctcttttttaacggtacagttggattcatctatggaaagatttttatagtatctcatccggaacacctatcatatcatagtcatcaataagggcctgaccaatagcccatgcgaggaagaatgctgcgcataccagaaaaatcggaatccacattgcattatagctttcaccgtcagcggtatatccttggttttgccaaagcgcggctgcatggaaaagcggataaaatcccagccactcgataccatttttcattccggaaaggctcagcagcgcgggcaggcaataggtaactgcactgataaagagcgcagtcagcaaattccccaatttctgtccaagccataaggtgatccggctcatgcagaggcaggccgcgaaacgacagattagccagaaaatcagcaaatccgacagggttataaacttgggtacagcctgcaagtcggagatactcatcgcaggtcctagcaaagagggaaggccatagtcacgcagcacctgccacaggtgaggcagaacggttccgaacgatataaccgctaccacggcggtactttgccgcagctttgcctttacagtgtatttgcggcccaatggtgtgcaggccagaatctcatccatgccgcctttgcgttccatggcaaacaggccgctgaagcacagcgcacacagcagccccgccagaagtgtatcctgtacatcgccggtgccggtaaagccgaacagctttttatatccggtttcatagacaagccatgcaccgggattctctttcagatagtaattgatgttggactgcactacacgctgatagacagaatatttctgctgcagtgaattgtaggccagcagcgcatcactgctcaattcaccgctgttgacgcgcttctgggtctccagcatgggaataaactcgttgcgctgatctttcagccagtcgcggctttcttcgctccacgggccggaaatgtgcttcatataataggcatagtaaatttcgtccgcgtctatgtagctctccgccgtcacgccctgatagatgccaaacgccagaaacgctgccaagaatactgcggccccattcatcaacaataacttcctgccctcttcatgggtaacagaggtcgcacgcgttttgcgggaaaacgtaagtgcaaagctgtgcttggcagccggcagcagctgtgccttggcaaataccgtacagaatgccgcaaatagcgcaccacccaaaacggctgccgtcaaccattcgactagcggcaggctgacaggattaccaaaccagaaaagattccggtagttccccagcagctcgttggtctgcagcaggctcaccatattcgcatattttacaacgttccaatgacttgtggcaggaattgcagcacgaataccgtacattgccaagggcagcgccaacgcgccaatccaaccggccgcagcacgtttggcgataagggcagccagcatgacccacagccccatcacaaacgcaccggcccacttagcaagtaaaaaccgaaaaagatactggccaacggtaatctgcatggtacagcgcatcaaagccggaacgctttgaatcgtgcggttcatggggccaaggctgaacgatgccgaacagtatgcgagattgaccccatacagcaccgtaagaacgaccaataagctggcagcaaatgccgccagctttgcaatggccgttttcagccgtccaccgggcaagctgcgaatcaggctcaacaaaccgctgtcgcgctcttggcgcacaagaatcaacgcaagcagcagcatggccgccaacaggataagatccgtgaatgcatagctgatggccgtgtacaaacccttttgcgggtaatactctataggcgtatccgttagcccggcataaacctgtgcggtcaattcgatgtttttcaaatcgtacccggtacggtcgttttgaaaaattgagatgccggacagttgggcggctttggtttgaacaccatccaagaagtcgttgtaagcagccacggtgtcatactcgctttgcagctggctgaacaggcggtactctatgttcaaatcatctgtgaatagggtgtaggatttgtcattatattcctgctcataggcatcaaacatagcggcattgtcctgccgatactgggaaaggccatagccaccgtatgccatttcacggtaatactgtccgatttttacaaggctttctatctcggtgtatttgtcatgcagatagctgcctttttcctccatggtcttgcctgtcagttctgcgcctacaacccggtacgcagaggcgggcggctgtttggcggtggggcgggtgcccatccacagcagcaagagattggcggatgccagtatcgccaacaggacaggaaacaccctgccgccccaaattttgcggagttcagcaaaaaacaggctcatttgccgtccccctcaccgaacacattcaggtagacatcctcaagaccttggccgggtgcgtatttttcaatcaactccggcacgggcgcggcatccacgatcttgccggcgcgcaaaagaataaccttggttgctactgtttctacatccgaaacaacgtgcgttgccacaagaataatgcggtctttcgccatatctgccagcaattcacgcagacggacgcgctcctttgggtcaagacctgccgttggttcgtctaaaattaacagcttcggatctccaagcagggcggatgccaacagcaggcgttgcttcatgccgccggaatatgcagaaaggcgcttgtccaactcagcagtcaaatttacggcagcggccacacgatcaacctcgactgcaacggcttttctaggaatttcttttaaggcagccatgtaggcaagaaagcgccgcccagtatagctgtcgtacagtccctgctgctgcggcatatagccaagaatgcggcggaacgcaatgccgtgcgcggggcggccgcaccatagcacctcgcccgaatcggcggccaatccgccggtgatgatgccgatcagcgtcgattttcccgcgccgttcggccccaaaaggccatacaggcccgggccgagggtgatggacaccccggccagagcctgtttggttttcggtttgccctgcccgcggcggtgcagcagcggggcgggcagcagataggttttgcgcagatcgttcagttccagttgcatggcagagtctctccgtgtagcgaaaagataaatgcataaaaaaggaatcaggccattatgaatcaaaagctatcgttagaaatcggatgaaaattatcacgcgagtgaaaatagtcaccttgtgagagcaatgcgtattttggaatcaaaacattttccatcgtgttgtcatcggcaacggcgatattgacggatgtgtaatcgtagacaacacaaaattgatcttttactacggttaacgatgtaaggaaattcccttgagaatctttcaaattcatctcttcggaaaactcaccgttttcgagatttaatactcgatagtgtggcagaaaatacccctctttgctcacataagatgtttcgtaaagcaggtatttcccatatggtcctctgcaatcaggacgatgctcatcatccggctgctctgcataaggggaacagtcaaaacatttttcctcgccggtaagtaaattccgcatttttagagaagctgtttgatagtcatactcgaaaagtgtgtcgacggaaacaaaagctcctgtttttgaagtctcattgctatagaaaggtgtactcgcaagaatcgcggccgtgtcatatcccggataaaggtaatagaagtgctgttctctttcgtttgcctgataaactataaaacagtctccgcaagccgaatagaggccgcaatctgttatatccattaacggaactattttcgctgtttttacatctaatttgcttaaggtctttttttccgttatcccgcccgacgattcggatacctctgacaaaacaaaatacaatgacgaatttgtttcatctgtataaaaagcagggccgatgctctgtccgctttgggcactgaataacaatttcttgttttctccgttcgcatcagcaatccaaatgcaagcagggtggtttgatgactcgccgttttgcacaagaagaattgaattcccaagttgtaaaattccggggagaaaaccgctttcatcaatttgcagccaggcagtgcagctatcatttgagtgtgtacaatttggtgtatcgcataaaggtatctgctgcattgtctcaaaatcaatataaaaaatgttgccatacccattagcaatcgaatctacagtatacatccctttctcggagctcggaacgcaaagtgataatgtatgttcggttgttgagggggtgactatatcatcagatgccatttgcgatgatggcgttggcgttgcttcgccgacattgcaggagcatccgactaaaagcaaagacaaggttccaattgccaacagattaaaatgtttcattctgttctctcgatctgctacaaatgcattatattttacagaaaagacggacccctgctttagtaaaaacgacttttttagaatctgatgagatgaaatgctttcataaagcaaggatccgctttatacaatataacaatcgtctgcgatattcgaactgcttaaagatatggatttatatccacattcgtcgtgctcaaaggaaacactggcgttccggatgcaaaccaacttgcgccagaggccccaaaaataacattagagccggatacgccaattgttccatagcggtaggaaaccaaaagggtcgaagaatccgactgtggagtttttaaacgagagtcaccatagccattgtttgataaactccacagccatgcacgaccattgttggaattacgattcattgcgtactgagagtttgtagaagcacacagaacaaaattgttcccgaagccgctcgaacggtatagatggaagcgttgttcgctattcggagcactggttttgtagagagttaaataccgcatattcaaagagctgccatatgtgccatacacgttgatataacggttgctgttatcatcaacttcgattgtccaatccgcaaacgccggaacagccatagccatagccataacacaggcgattgcaagggtgagaaaacgcttgctgagtttcttcatgatgtattcctccattctgaaagaaacttgtgtcgggttggttgtggggcggatatgttcagcatctgcgcgccgatgcttgagccttagatgtggatggcggttctttggaacaacttcattataccaaaaagttttcacattcgccacgtttcggcagtatttcaagagttccatgtattcggacaattacaagcgcctgtgcaccgacgcttacatacatatagaacttttcaatctaggtaacgggagcgcctatttatcttgacttcaagataccacaagaaaatcttcatttccacaaaattgacacaaaatccgagtcgcttgtcataaaatacgagaaaaaactgccccggttgctaaacctgggcagttgaaaaatctataggcccacaaaatgagaattctaaattattgcgataagtgactaacaatcttgctgaacaattcaagcctctgttcagcagttgtgtgccttgccgaaaaaacttgcgtaagctccgaaatcagttctttttgctctggccgcaaggcacgaacagaaatcaaatttgaacgatccccataaaccagtgtgtcaagcgatacatcgaacaattcggccatttcaataaggcagtcgacagacggaagcttggcattcgtttcataggcactgatagtggaagtcttcttgcccaactttttgcctaatacttgttgtgtccagcctttttcttctcgcagcttacgaatgtgatctccaatatagttgtgacgttcggtatctttcatgtctttgtccagcttgctttatcaatgaattttcttcttagggtaattcaattttaaatgatttggcttgccaaacggtgtaaaaacaatataatattacactataagtgttatttcgagaaaatacttgactttcgggagaattaaacgtatgttgaatggcaaagaaggacgtctgctacggcgaaacaacgataaggatacacgcatgaagattaatattttactttgcgatgacgacaaggattttttgcagagaatatcagacgcggttgctggccagccggtaccgcccggagcgtccatttgcataacaaaaagctcgaatcccgccgagataacggaccggcaattatcacagtatcacatcatgttcttggacatcgacatggatgaacgcagcggcatggacattgcacgccgtgtgcgggaattacatctggatacggtaattgtttttgtgacaaattacccggaattttcgatggaagggtatgaagtccgggcgttccgataccttctcaagcaggaactggagcaaaagctggccaactatttccgggatgcattggcagaattgccgcgtgatgataaagttctgcgcttttctgccaacgcggagtcgtttaacattccctacaaagatattctctacttggaaagtaatcaaagagttatatatttgtacacagtaaagcctatgcaggtaccagaccgcttttatggaaaaatggaagatttagcggcagaattggaaggagacggattcctcagaatccagaaaagctatctggtcaatatggcatacatcaaaaaattcaattatgacagggttattctcctcgatggaaaagagctatcggtaagtcagaagcggtactcacaaatgaaagtccagtatctgagttggaaaaacaaaaactgggggaatgcacgttgagcgcttatttcttgacctacttgtggacttggatggagttcttttcggcaattttgctatttgatgcattttcagcaagaaaaatggaacgttttcgtcattggattattgtgacgagccttgcttttttggaggcaacgtttctgaacattgcctcaaatgtattgcctgcttattcgaaaatcttaattgcgcttgtcctatattattttgtgcatagaattttgtacatcagtaatagattttttgggttatatatttcaattattatttatgcaacgatgtgttgtatagataatttatggcatactcttgctcttttgttatctgaaacgctgaatggtgtttttcttgggaatgcattatgccaaagtatgcttgtacacggtgtaataatagcagtatgctttttacaggcaaaggcgcgaaatgggaaattaagtcaagcaaccaatttcagatggtacaccattcctgcagtgctttcccttgcgagtgttttgcttattttcttttttggaagttgctttcagcagggtcaaatatcaattcagccgctatgtgtctgtgccacatttattactgtaatgcagatagcagcgttacttttaatcagctggatggaacaaaacgccaacttccgtgaagaagcaatcagcctacaagccaaatcaaaagcacagcaagagagcatcgaagcattgagtgccgcatatgctcagcaacgtaaactgacacatgattttcgcgctcatctgagtacgttagacggaatgctgatgcaacaaaatatagatatcaataaaatacaaacctatatccatagcctgcaatcgaaacaaaacgaacgcatcctgctcgtcaatacccaccatgcagcactggatgcacttctgaatcaaaaggcacttgttgcaaaaaatcgtaaaattgatatacagttcagtgtgaacgatttatctcccataaagattgacatggtggatttgacggttgtaatcagcaacacactggataacgcgattgaagcgtgcgaaaaactgccggaaacggaccggcaaatttatgtgcaggcacttcttgaagaagatgaactgttttatgctatccgtaataaatctttgccggtaaatatgattgcaaatcagctgccggcatcaaccaaggaaaatccatcttttcatgggtatggtttgcaaaatgttcataccacattggaaaagtaccacacgctttacgccatggattatgaaaacggctggtttgaatttgcaacagagctgccgaatactctgatttcatgacaaaaaactactgtttcactacaaaaatgatgaaaaagctgaaaactctgttttaataaagatagatctaatttacagaggttctgcatatggaagcaatcgtcgaaagaattgtggagaagtgtatacaaagcgaactcattgaagaaagtcaacgcgattggatggcatactcgctacaacgaaaattcatgaactttggcggtttctttattctcgtttgctttggagcacttgttgcaccgttaccgcaagtgattcttttgaattttgggttggcatttttacgggaaaagacaaatgggcttcatatgccaacagtattttcctgcttcctcacctctttattttgtgaatatgcctgcttatatctgattgaccgactgcaatcttctacgatagcagctacaattatgctgcttattgtctctgttacgctaattttaacacttgctccttgcaataattcggcgattcattgtagcaacgaggagttgcaggacatgaaaatagcggtacgcaaaagacttgtattatattgcttgattattccggctcttttattgctgaaacctttgtacagcattgtttggattgtagctgcagctgcggatgcatttctgctggttttggctaaaattggggttggaatcaaataaaaccgaatgaaaaccgccaaatcaaaactggaaagaaggcctttaccatgaaaacaaccgaaagctttgttcacaagaatttacgtgcagttgcccaagcatcagttcgtaaagaagcaagcgagccttgcagtttattttggtcctatcagccccaccggcccgaaaagcctctgacaaattctcaggagaaaaaataaatctcacgctgcagctctaagcccgtcgcatctcaaaatgcggcgggcttttttgtgtgttcggttgggcaacaactggcgaaaggatgctacgcgcttagcagtaggaagcgctagccgaaggcaagggcatccatcgtgaggtggcatcagaatgccagcagaaaatgctgacgggcaaacacatgaaccaacaagcagaaattcatatatttataaattatagtgatctagataaaattcgaacggatttaaagtttaactccgcaaaagttgcggggtatttgcgatattataagtgcaaagcaaattcggaaggaatttcaaagatgacatctaacgagcgacaaaagaaaagaattcgcttgttagataagcgccggaaagatacgatggagcatctttcaatagaattccatgtttcaacagatactatcagtagggacatagcaacattaaacgaggactatccaataaaaatagcccggggccgaaatggaggcctttccctaccagacggataccacttgttcaagaaaatgtacatgactcctgttcaggcactcgcattacatagagcgttgctgtatgtccctgatgaaatcaagaaaatccttgagacaattttgaccgattttgcttggtagtcaattatgattacccagcaccttgacaactgaatacccagcataacaggtacgttccttttccggcagacccgatgggcggtttggcaaaccataagatgccaagggaaaggccataatgatacacctgctgcctcccgcgtcagagggggtgaccgagccggaattgtaagcagtaagattccggcagagtcagcgaacggccgccgccagcggcctgcctgttgtgttcccggtgtcaggggtgcgggcggcaaatatggcacacttacttaactatctacttttgccgtttagggcaaatcgtgggcagcaggaacccaagcgcctgctgcccatcattttgctttaaacgagatggaaaacaggggtgtaaaccaatgcaaacttatccgacaggctatacggaatcccaccgcatggccgaacagattttccgggagattctgccccggcacggcatggcggtgcgcgaggagcaaatcgcgctttgccatgaaattctggataccctttacaataaggaaatttctttgtgtgaggccggtgtcggcatcggcaagacgctggcctatcttgtggcttgtgtcctgtggcaaatgaaccggcctgacaggctcaagctgcctgttgttatctcaacttccagtgtggccctgcaggacgctattattaacgactatttaccgaatctgtctgccattttgctggaagaaggaattatccaagcaccgcttacagcggttatccgcaagggaaaagaacgctttgtctgcgatgctcggcttatagaacgcgaatcacaaatttccaccaccagaaaccgtcagaggaacagcctgcgcatggctgagcaacttctggatatggaccatctcccggagctttcccgctttgatcgcagccgtatctgtgtgccgcagtcctgcccgcgaaactgtgttttacaggaggattgccgctaccaacaatatctgcgggattctatgaaatccgacattcagatttgcaaccacaattatttgctggcagatgcagcacaccgccagcaggacagaccgttattattgcgcagttatcaggcgctggtcgtggacgaggcgcacaagctgccggacgcggcccgccagatgtacacggaatccttgtcagaacgcgaaatgcaagagctttgcacacttctgcggcaagcgcactattctcacattgcccagaacttgcgcacggcgttccggacactggttttagcctgtcagcatagccggacttggaaagaaaaaaccgtctgcagtccttttgggcttactccgtttcgcagcaaggcattggccgattgtattgcacagctacaatttgcaggctgccgggcagatatgcctcggtacttgcggaaccggctgggagaggcggaaagcacactgcgtctttttctcttggaggttcccacacgcattctctacatcgaaaccgatatgcaaggtcagctgacatgttgtgcggccagcaatcgtgtgccacagcttttgcgcagtgcgctttggaacaccggcgaaccggctattttaacctccggcacgctggccgcagcgggaaactttgaccacactgagcagcttttaggccttgcagcgtacaaaccgctgcgccatttcagcgcggactctccgtttaattacaagaaaaaatgtctgttatacctcccacagcgccgcaaggaacgcacggataaccggcagcttgcagatgaaattgttcggcttgtccatgcctgctgcggccatgcgctggtgttgttcacgtcctatcgccagatggcagaggtaaaagccatgacagacgggcgttggccgtaccctacctttcaggcatggcgcaacggcggcagggtgattcagcagttcaaagaatccggcaatggcgttctgttcgcggccggttcctgctgggagggtatcgactttcccggcaatatggtgtcactgctgattatcgcaaagctgccgttcccgatttccgacccagtcagcgactatgagcgccagcagtacccgaacctgcgcgactacataaacgtcgaaatcatccccgaaatgcaaaagaaactgcggcagggttttggccgtgccatccgcaccgagcaggattcctgcgtagtggcaattctggacgaacgtgcgggcatcggcggcaagtaccatgacgccgcgctggcagcgctgccgtcctgcccgaccaccgagaaaattgaagatgtgcagcaattcatccgggagcagaagcgcccggattactttttgtgaaaagaggaacctgagatgtaccttatgcgaaaccacgatgtttggatttatgtgcgctgcgccaacagcgatccgcgcattgcctttgaccggctgtatgaccttatcgacgaagccgccggacacggttttcttgtgcgcggcacatcttttgaccattgcagcggaaacaccttgaaagaccgcatcggtctgcgcaccatgctggacgccgtggagaacaatctggtcgaggccgtgattgtccgtgacttggagcaaatcagccgcaacagttatctgctggtaggtgttatcgagattttccgcaggcgggatgtctatctgattaccaccgaatgtgacttaaacgcagaactcatcaactgcgggctggaacgctttgccggagataggttcacaagagcctcattcggtaagccgcgctttgatgtgcatttgcccctgatggatcaattctgaggtgcagccatgacagaatacaaagtctgggcctacgcccgcagtgccgcaccgaacctgcccgcattggaagaacagcttgcagaagtcatgcgcgaggccgaccggcgcggctatagcattgtcaactcctgcatggagcaaaagtacggcactgaattctggcgacccgccctgttcgccatgctcaccgccgtgcagcaggggcgcgtcaatgccgtcatggtgcagagccttgaccggttgagtcacgacattacaaccttgtaccgcatcctgcgctttctgcaaaattacggtgcagtactgattacgaccgaaaccaatctgcaatatgaactctatctgacagggttggatgcacgcttgctgcgccaccacaaccgaaaacctatttactatgtggagtgtgaagaacgatgaaagaacctgtgcaaatgccgccgcaggcgtccgcctgcgaaattgagaaaatcaccctgccgcagattgtcagcatcaaacaggccagcgagattatgaacctgccgccgtactatctgcggcgtgtctgccgcgaaaacccggatttggcatttcagtccggtgttaagtggtatattaaccttggtaaactggcggcctactacaacaataaaacggagcaatctgaataatggcatcggcaaaacttatgatacccaaacgcaacgccccctattatgtactgaccgctaatgtgactgtacatggaaaaagggtgcggcgatatgggcgctttgactttgaccccactgtactgaaaacccaccgccagcgtgaaaacgctgccattgaagccgcacttgtttttgaacgcgcagagcaacagaaagccgacgatgaaaaagatggcaaaaacacgcccttccgagatgtagcaagagcatacattgattccaaaaaatcgatgctcgacccctccgttcgtctggagggcgactacgaacagcataagaataaagccaacaccacagcaggtaaggaaaccatgctgcggcgaatctgtgaaatcagcccgacatttgcagaaatgcctatttcaaaggtaaataagcgcgaatgcgagaagtttctggatctgctgggtgaggccgatgtgcgcagcgtgaaagggtatgcggtgctgaaacccaacgcaaagcaatataagaaactgtcctgtccccaaattacagcacaatgttccatacagacaaaatctgtagagcgagtgttccgcggagagcgtaccacactaaaaacagcacaggaaattgcagcagctctcaaatgtaagcccgaaaagctgtttcatattgaactggatcaccgccctattgcacgaaaaaccatcaaggagtatgccatctttctgcggctcgtaatgcaatatgccgaacgcgagtacggcatagacaacgatacccaaacactcgcggttaaaggtacgcgcagccgaccggttgactgcctgcatcctgaggaagtagaggcactttttaaggtgctgccgcgctgttccacgctggagcaagtcatcgtcatggggctgctgaataccggaatgcggcgcggcgagttagccgggctgacatgggaagatattgacttcgaccactgcaccgtccatgtggacaagtcactgctcatagtgaacaaaggctaccacctaacgaccacgaaagaggacaatgtccgtgacattgatgtagcgcccgaatttatggaatatctgaaaacctaccgggaccaatggcttgcacaaaggcaccgtatgggcagtgcttggcagacctgcatggatggcaaatgggaattgtaccgggaatccctgcaaaagctgcgcggggaaaattttatcgttatcaatgatttcggctggcccatcagccccgaccactatggcaaaattgttgaccgcgtggccgagaaagcgggcatccgcaaaatccacccgcatatgtttcgccacacctttgtcagtatcctgctctccaacccggatatcggtgtcgctacagtggcggctgaggcgggtcatgcccaacccagcacgacactggcaatttatacgcaggtttaccacaagcggcaggactccatccgaaaccaaatgagcgagactctctacaagaacaaaaatccagaaagatgaaaagagacatgcaaaccttacgattgcacgtctctttttggtgggccaggcaggagttgaacccgcgaccagtccgttatgagcggacagctctaaccaattgagctactggcccttatgaagcatctgcgggtagataaaaccacccgtagatgaattgtagatgaaaacggtaaaaaagtcaagaagaacacaaaacataacggattatcgttaaactgcaagcgtgaaaatcctaacatccaatgtttatgagccgccggctttaaccgttaagctaatggcccgcacagatgtactatatagtataccagaaattatccggtttgccaagggtatgcgggtcgaaatatgagatttttttcaggccggtgttttatcgggtgggcaggcgtcctgcaggtcgctgcggcagcgccagactgccagcaggatgaacacaaagcagatgatccatgtcgttggttcgcagaagcagacagcgcggtagccccagaccggcaccagccagactgcaaagatcaccttgccgatcagctccagcgcgctggccagcagcggctcgaccgtgtggcggatgccctgcagcatattgcgcaggatcaccagtacggccataggcgggatgatcggtacactgattttgagatacagcatcgcgttggagatgatgcgcgcatcgctgctgccggttataaggcgcagcaccggctcgcccagcaggaaggtaaacgccagaacaaaaagccaccagacaaaatagatcctcagcgctgcgcggacgctctgaccaatgcggctgcggcggcctgcgccgaggttctggctgctgaaggttgccacgccgatgccaagcgcaccgcccgggataaagtacatctctgccatgcggcgggccgccgtttgggccgtgatatagacactgcccagcgcgttaatgctgctttgcagcgccacgctgcccagattgtagatcgcactcatcaggcccatgctcatgccggcccagaacatattcatgaccgcgcggcgggtagattttttgaaatgcgcgggggtgaagtgcagctccggatagctgcggaccagatacactgcgcccagcacggcgctgataccctgcgccagcaccgtggctacagcggcaccgcgcacgcccatgcccagcggccccataaaggcggcgtccagcccgacattcagcacactgctgaacaaaagaaacaaaagcggtgtaacgctgttgcccacagcgcgcagcagggcggcctccatattgtacagcattgtcagcgggatgcccagcagaataacggtcaggtaggcagctgcgccgtcccacacctcggcaggaacctgcagcacctgcagcagcgcgccgcgtcccagcagcgacactgtggtcagcactatcgacaccgccgccgaaagggtgaccatccagccgacggcgcggcggatgccctcccgctcccctgccccaaagcagcggctgaccgtcaatgccagaccgttgttcataccgaaggcaaagttcatgatcagcccgtacagtgcggcagtagcgccgatctccgccagagcggcggagccaagcagatgccccgccaaagcggtgtcggtcaggttgtagacctgctgcagcaggttcgagcagaaaagcggcagcgagaactgcagcaccagtcggaacgggtcgccccgggtcatatccagcacgcggcttttgtgtgcggtggtcataggggtgtacatctccttcatgggacttgcagaggccgatgcccggcaccggcctgcggcaaggaaattattcctttacaatattcttcacccagataccctttttcaccagcacaaagccgatggcgcatttgacaatgtccataccgttgacgaacagatagatcgcaacgatattcagcccggtaaagcgggacaggccgtaggccagcggaaccgagacagcccaggtaaagcagctgtcaaacaggaaggtgataaaggtcttgccgccggaccgcagcgtaaaatatgcgcagttggaaaagccgtacagcggcatgcagagcgccgccatgcagatcagctcggtcgccagcaggcggatggattcctcggtattataaatgcgcgggatatagggcgagcagagtgccagcagcgtacccataataacgcagctggtaaggctcagggtaatcatacgccaggccgtgcggcgcgccccggtcagccggtcggcacccagctcctgcccgacaacgatggccgtggcgttgcccagcgagaggaacacctcattgaagatctgggcgatggtgttgcagatgttcagtgcagccaccgcctgaataccgcgcaccgagtagcactgcagcagcacagcctgcccggcaccccacatcagctcgttggccagcagcggcgtggagcggatcaggatgtcccgcaccagcgcgccggggatcgcaaagctgctgtagatgccccgcaggaaggggtagcgctcgctgctgcggtgggcgcccactaccacgatggccagctccacaaagcgggacaggaccgtggcaatggcagcgccggccacgcccatgcgcgggaacggccctatgccgaagatgagcagcgcattgaagataaagttcacgaccatggccagcatactggccttcatgggcagcacggtctggccgctttcacgcagggtgcccgcatagcactgggtcaggccgaagggcacaagcccgatgagcataatgcgcagatacccctcggcatattgcagggtcgcagcggcgtccgccggggaggtatccgccgcgatataggccccgatgagtgaaggccctgcggcgagaaacagcccgatggctgccgctgtgatggcaagcgccaccagcagcttgaaccggaaggtgtggcgcacaccctccatatctccgcggccgtagaactgcgcgccgaagatgcctgcacctgcagtgctgccccagactgccagattgtagacgaacaacagctggcctaccacggcaacgccgctcataggcagcgtgccgacctgcccgaccatgacattgtcgagcagggatactacatttgtcagggtgttctgtacgatgatcggcagaacaaccaccagcacatgccggtaaaatgcgcggtcgccgatcagacattcccgcagcgccagcttttccgttttttccataccttctcctttttttgccgtgtacggtctattatacggttcggcgcgcaggctgtcaatcggaacttttcacagaaaaagccgagaccccatcatcgggtctcggcgttgtgtcatgctgcggcggtttccggggtggcggtgccgttcagggcggcaaggcggcgctcgacctcgctgtcaaggtattccttggtcgcgccttcgccatcgtgtgctgcttcatactcctgctcaatctcattctccagctgcgcccggatatagctgtctcggtctgcctcggtggagaaggcgctgccgtcatagtaatactccttctcgacacgcccggccagctgggcagcggtcagtcccaccgggaaggcagcgttgcagtccagagtgtaccgtgttccctcctgcagatcatcacacgagctgaagtagtaggtcgtaaagcccagcccgtttgcatcggcggcctgcaccactgcctggcagtctgcggcaaatgcctcgtcactgtcatactctgccgtaaagctgaggtacagcgcacattcatcaccggcctgcagcgcgtagctgtcgcttgccgtatggctgatccagacatttacatgcgcattggcaacgcgggatttcagcgccgggtccccggtcagggcgttatagatgccggcgaccttttcggactcaatgcggctggccgcatgctcccgctcggggccccacagatgccacaccgtgggcaggacggccgctgtgcccactatgcagaggataaaggcacagccgagcatcgacagccagtcaaaccgtaccctgacatcgggcttactgctgtagaacagcagctcgatgcccagcacgatgaggattgcaggagaaaacttcaagatccaaagcaggtcaaggctgggcattagctggtagagcatcagcagaacgcctgccagaatcagcaccagcgcaaacgccagcgttcccacgcggcgtgtctttttcggggtggttttttcgtccatgatttattacctcgtttattcttcgttgcacagtaggggccgggcatgcccggcccgcgcgtgtatggcgggcacagcggcggtgggtcagcagcgggcgggacatatcccgcccctaccctgcggcaaaaggcagacgagcggcgtccgtaaggccgcccctcatccggcgctgcggcgccaccttcccccaaggggggaaggcacagttattcatgcggatacggcggcagttcgtcatcgctgtgcttcgtttcggggtgcaggcccagcagcttgaggcctgcgaaaatcagcagtgccgcaatgacaacattcggtatgccggtgatgatgtcgtaggcgtagccgttgcccacaagagcgcacagcagcgtatagagccagtttgagatgaatgtctcatacagtgcccagacgccgatgccgaccagaccccaaccgatcagcttgttgtgctgggggagcagctttttgatttcctcataattgcccagaaccagcagggaatcctccttcggctcaccggccgccatgtggcggatgaggtcataggtgtcaaaaaagctgtacatccagataacaaggcagaggaacagcagcggctgaatgacggtggccgccatcacgcagagtatcagcatcatcgcaatcgacaggccgcgctgcatatagccgtagtacatctgccccgcaccggggatgcaggcgaagataaaggtcaggaatccattctttttcataggtcattctcccttggcggtgctgccgccgatgctttgtgctctgatttggtcaaggccgttttcagcggtcagtgtaaagcttttgaaggtatcgtcgaggctcttgtaaaagccgttgacggcggtgctgaatttggtgccgaaccgctcatgcggggtggtgggctgctgggcggtcagggcggagacatccggcaggccgaatgtgctgaccgcgccccacagcacaaagcccagcaccaccgccgcagcggccgacacataccggtttgtcatgatacggaagctgcgcagccgcatcaggttctgcacctgcgggatcaggtcgcgcatgggctgcttcatagcctcgggcgcggcctcgatcagtgccgtgtagcgcagcaggcagtagtcgcagaagctcagatgctcggcggcctccagcgcgccaaggtcatcgagcgtgccgtccttcagcgcgtacaggcccgcatcggtcaggtggccctcggcgtcaaacagcttttcattatcaaaatacaggctcattccctctgcctcctctcaagtatctgctggcgaagcagcagctttgcacgccaaagctggctgttgacggttgcgggcgggcggcccacaagccttgcgatctcagcgctctctttgtgctccaaaaagtacaggacggcgatttttccgtagggctcgcgcagggtgcgcacaagctgctccagctctgcggcaccggcgcgcgccagcacactttccgccgggtcatcggcatcgctgccgggggcgccgcgcggctccggcatggcatcgtcacccggggcctccacccggcgcacccatgcgcttttcaggtggtccttgcatttgttggccgccacccgcacaagccactgcttataatactgcggctcgcaccggtctatggccgagaacgccgagagaaaggtgtcctgggtcagatcctcagcggtgtgggggtcatgaacaaactgcaggcagcctgtgtagatcagtctttggtactgctgcatcagcccggtaaattcttcatttgtcagcgcccacacctcctttgctttgtccttctgtatactaaaacgaattccccggcgccgatattgcaagcgcgggggaaatttttcaaaaaaattttctgctttggcttccccccttgggggaagctgtctgcgaagcagactgatgaggggcaagcgtaccgttatcgcccatttaccgggcaacccccggaaagccgcccctcatccggcctacggccaccttccccccttgggggaaggctttacaggtcgatatccagctccaccgggcagtggtcgctgcccatcacatccatcaggatcgcagcggtctggattttgtcggcaatgcggtcgctgaccagaaaatagtcgatacgccagcccgcgttgcgctcccgcgcgcggaaccgcatgctccaccagctatacatgcctgtggcatcggggtgcaggcggcggaaggaatcggtaaagcctgccgccagcagctcgtccagcttgccgcgctcctgattgctgaagcccgccgcgccgcggttggggccgggattcttcaggtcgatgtcctcatgcgccacattcagatctccgcaaagaatgaccggcttttcagcgtcaagccgctgcaggtagcggcgcaggtcatcctcccactgcatacggtagtcgatgcgcgccagctcgttctgggcgttgggaacatagaggttgacgaggtagaaatccgggtattccagtgtgatggcgcggccctcatggttatggacatcctcgtccagaccgtaccgcacgctgagcgccggtgttttggcccagacagccgtgccggagtagccctttttatcggcgctgtagatgtactcggtgtagccctccggcgcaaagtcggcctgcccgggctgcattttcgtttcctgaatgcagaaaaagtccgcgtccagcgtgcggaacacatcctcaaagccttttttaaggcaggcgcgcagaccgttgacattccagctgatgaatttcattgataaactcctttttaagccttccccgtcaaagggtggccttttttgctataccttttttactgcgctcttttgccatgcaccgctggcaaagcgtatcacaaagcaggtcacacggcagatccagtccacgaccatggccagccagacaccgaccgcgcccatgcccatattgacacagaggacccagctcaggcccatgcgccagacgatcatcgagaggatcgaggtgagcatcgtgaaccgcacatcgttggcggcgcgcagggcgttgggcagcacaaagccggccggccacagcaaaattgccacaccgttatggatcatgaccagcgtccaggacagggcgcgcgtctccggcgagagggtgtacatgcccaaaatccggttcaggaagaacagcaccagcagattcacggtgccctgcgcgatataatcccacaaaagcagcttttttgtataatgcttcgtctgctcaaaatcctgtgcgccgacacagcggcccacgaccgtgatcatggcaaggcccattgcgttgcccacgatgcagccgacagcatcgagattgttggccaccgcattggccgagatatgcaccgtgccgaacagcgagatcatcgagacgaccagcacccggccaagctggaacaggctgttctcaaacgctgaggggatgccgatgtagagaatgcccttgacggtgcgcccctccagccgggtaaccgtgcgcggcgtgatgcacagcgcgtagtcccgccgggcggccagtgacagaatgatgaccgcccccaccgcgcgggagaccagcgtggggactgcaacgcccgcaacgcccatgcgcagcacaaagacgcagagcgcgttgccgcagaagttgatggcgttgacaagaaccgagaccttcatcgacaccgcgctgttgccggtcgagcggaagatcgctgcgcccgcgttgtagagtgccagaaacggaaacgacagcgccgtgatcgtaaagtaggtcaggcacgcctgcatgacatcctcgctgatcgtgccgaagaagagccgcagctgtgccgtgcgggtcacaaggcagaacaccgccaccgtcataccgagaataccgctgagccccaccagctgcccggcgctgcgggcggcctcctcaggccgcttggcgcccagatgctggctggtcacgaccgcgccgccggttgccagcgcaccgaacactgtgatgataagctgattgatcatatccaccagcgacacgccggagatcgcggcctcccccactgaggagaccatgacggtatcggccatacccaccagaacgccgagcgcctgctcgatgataagcggccagagcagcgccagcagctgttggtttgtaaacagtcgttcttttttcacctcatcgtacatctcactttcccagtatgagtatagcacaaaaaaatcccccgcgcaatgcgcgggggcagagtttactcgtaccgcagggcctcgatgggatcaagctttgcggccttgttagcgggatagtagccgaaaaatacgccgatggccatgctgaagccgactgctaccacgatggcggtcaggctcgggcgggcggcatagcccacggccttgctcagccccgcaccgagggccagccccagcaggataccggcgatgccgccgatcaggcagaggatgacgctctcggtgatgaactgcatccggattgccgccgccggggcgccaagcgccttgcgggtgccgatctcgcgggtgcgctcggtaacggagaccatcataatgttcataacgccgatgccgcccaccagcagcgaaagcgccgcaatggcggagatacccagcgataccgtgctgagcatcgaggacatcgagtcgagcaggcttgccagactggaggcactgaccgtccatgagtcgttgcgggtgtagtagctggcgaagaaatcgccgaccgtatccacgaacgaggtcacattgaccgccgcgccgtccgccacgaccgtgatgctctggtaaccggcccccgccccggcaatggactttgccacatcgagcgggatataaaaatccgtctggatcgaatcatcgtccgtgccggagaacatgctggaatagctgtcctccgtgtagcggtagacgccctctatataaaaggtatacaggttgttgttgatggtcagcgtcaccgccttgccgatggcatcctgcgcggtgccgccaatggcctgcgcaacgaacttttccgacacgcaggccaccttgcggcctgcatccttgtcatcgtccagccagcggccatacaagatctgcgaatccgtgtcacgattttccagcatggcggcgttggcaccgctgaccgtggctgtgatggtcgtggtcgggtcgccgtattttgccaccgtaccgctgccgacctgctgggtcagctcgatatgatcgaccttgccggaaaaggcatccagaaaatcctgcatcatcgcatcggtgatgaggtcggcgtccgacggcttggagtccttgaaccgccgcagcgtgacgccctgcgccgtgccggaggtattgcttgcgcttttctgcacaacactgactgaaatgttgctggcgcccataccggccatcgaatcagtgaccgagccggtcatgctgttgccgaccgtttcgatggcaatgactgccgctatgccgatgatgatacccagcatggtcagggcgctgcgcatcttgttgctttttacactggccagcgccatgccgatattttcaaagagctgcacgttcgcctgtcccctttcgttcccccacgatcagcccatcgcgcagcgtcagcacccgctggcattcctcggccagcgcagggttgtgcgtgatcagcacaatggtcttgtggtatttttcatgcatttcgtgaaagaggtccatcacgacacggcttgtctggctgtccagcgcgccggtcggctcatcggccagaatcagcgcaggctcgttgaccatggcgcgggcgatggccacccgctgcttctgcccgccggaaagttcgttgggctggtgacgcatccgctcgcccatgccgacacggtccagccagtccttggcgcggcgggcgcgctcagccgcaggcacgcccgcgtaaagcatcggcagctcaacatttttcagggcgctctgccgcccgatcaggttgtaggtctggaacacaaagccgatttttcggttgcggatggccgccagatcattgtcatcggcctcatggatgttcacgccgtccagcacatactctccggcggtcggcttgtccagcacgccgataatattcatcagggtggacttgcccgagccggactcgcccacgatcgcaacgaactcgccggggtagacggtcaggtcgatgccgtgcaggatctccagctcattgggctggccgatgtagtagcttttgcggatgccgcgcatcgcaatgagcggccgggccgggtggtcagcctccgccccgagcaggctctgcgcgatcgtctgggcgaactgttcggtgttctgcatcactgacctcccggcccgccgggaccgccgcccatatcattgccggctgccggggcgatggtcacgccgtccggcatatcgctgccgtcccccacatagaggctgccgtcctccatcatctgggcggcgctgtcggtgctgctctcaatgccctgggtcaggtcggcggtggctcggatgatgtcgccctcgtgcagatcatcgccggtgatctccacataataatcgttggtgtcgccctcggtgacggcgacctcctcaaaggtcatatcggtgccctcgccgccggtgcggcgcagcacataggccgtgccgtcctccttcgtgcccacagcatcgcggggtacggtaaagacattgtccttctcgctgatgacgatctcgaccttggccgagataccgatgagcaggccgctgtcctgcccgttgaccgtgacggtcgcgccgaagctgccgctgtcattcgccacggggtcaatgcgggtcagcgtgccgctgatgacggcatcgccggtggcatcgcttgtgatgcggcaggtcatgccggtggacagcttgccgaccgagcttgcggggatcgtgacctccacggtcagattctccacatcctgaatcgtggccactgtaccgctgcagacatcgccgaccgtggcgttcagggcggtgatcgtgccgtccatcgtggcggtcagggtacattcctccagtgcggtctgcaggctggtcagcttatcatcctcgcgctgggactgcgcaagcttggtagcggcatcgtccacattccgcgcggcattcgtggccgacttctggtaggactcctgcgccctttgcagcgcatcggcgtagctctggatgctctcgtagcacttcttcaccgcgtcaaagccctgcagccccagctccgggatgctgcactgcgtcttggcgatgctctcacggttttgatagtcctcgatctggccctgcagcccctcggcgcggtccgtctcgccgctctgccgggcctgcgtcagctggatctgcaggttggcaagggtgttctcgtacccggcgatctcctcggcatagcgggtgtaccagtctgtcacgacctcacggttcgtcttgccggtgttgccgtccgtggtcatggtgctgtagtagtcgttcagcccgagcctgtcatagtcctgctgggcctttgccagctcctgctgcgcgctggccaggtcggtggcctgatcctccacgctgcgggtatagcttttctcggcgctcgtccgggtatcgctgctgtcaagctcggcattggcgatctgcttttcgacatcggcggtgtccagcgtagcgatgatgtcgcccttgctgaccgtatcgccgaccgcgacattgactgccgtgaccttgtaggtcttgaccgcatccgccgccgtaacgctggcgctgctgcccgacttgactgtgccgttgacattgaccgtatcgctcagcgttgttttgctcagcacggtggtgcgcacatactggtaggccgtgccgccggcctgccgggccttgccccgcacaccggcgatggcaatgcccaccgccagcaaaacagccaaaagggcggtcagttttttgtgctttttgacccacgcaagcgggttgtgttttgtctttgttttctctgccataccggctccccttctttatgcaggtgatatttcaacaaaatgagtatatcctgcaaatgtgttgattttttgaaagaaccatgaaaaaagcggcacatcttccgtaaaagatgtgccgcacagccttctttaccgttcctcgcggaagtaggcaagccccagatgggccgggggctgattttcctttttcttgcgcatcgagaccacgatcagcaccacgatggtgacgacatagggcagcatctgcacaaggtcggtcatatagctggccagcgtgatgccgagcaggctgggcaggaactggtacagccagtagagcataccgaacaggtaggcgccccagatggcattgaggggtttccatgtcgtaaagatgacgagtgccacggccagccagcccagcgcctcgatctggccggtggtggcccagatgccctgattgtagtccagcacatagtacaggccgccgatgccgccgatgcctgcgccgatgcaggtagccagatacttgtaaagcgtgacattgatgcccgctgcgtccgccgtggcggggttttcgcccacggcgcgcaggttgaggcccgcgcgggtgcgggtcaggaaccagtgcagcagaacggccaagacgatcgccgcgtaggccaaaaagccgtaggagaacacggtctgccccagcgcacccagaccggacaggacggggagctttgcgctgaacgccttgttggcaatgggggcggcggagtagctggcaccgttgaggataaagacgccgaagaagtttgccacgcccatgccgaaggtcgtcagcgccagaccggtgacattctggttggcgcgcaggctgatggtcaaaaaggcgtagatcaggccgccagccatgctggcaaggattgcgcaggacatagcgatgaggatgctgacaaagccgttggggttggcggcggtattctcatacgcccaggcgctggcaaagcccgcaaagccgcccagatacatgatgcccggcacgccgaggttgaggttgccggatttttcggtcacggtctcgccgagcgcaccgtacataatgatcgtaccgaacgggatggcacgcatgatccatgcaatcaagctgctgtgcatatcacttgccctccttgtgtgcgccgcgcggaatgacgcggtagttgatgaagaactcactgccgaggatgaagaacagaatgatgccggtgattatgtcggcagcatactcgttcagcgagtatgcggaggcgatctccgaggcaccgcgctcgaggaaaacgagcaggaaggagatcagcgccatatagaaggtattgaactttgcaagccacgccacgatgatggccgtaaagccgcggccgcccgcgctggtggtcgagatggtctggtccttaccggccacgatcaggaagccgcagaggccgcagatcgcgccggagatcagcattgtgcgcaccgtgacgcggcgcacattgataccggcatagcgggcggtgttctcgctctcgccgacaacgctgatctcatagccctgcttggagtatttgaggtaggcgtacatgacaaaggtcagcaccacaacaacgatgatgttgatggtgtagcgctggcccatcagaatggggaaccagcccgccttggtggccttgttcagcgtgcccagactggaggcctgaccgcgcatgatgttggtcatgcaggcaacaatgcttgtggcaacatagttcatcatcagggtgaaaagcgtctcgttcgtgttccagcgggccttgaaccacgcagggacaaagccccacagcgcacccgcggcaatgctgccgccggccatggccacaaacagcagcggcagcggcaggttgttgccctgatagaccatgatgagggcggcggtcaggccgccgatcaggatctgaccctcaccgccgcagttccagaaacgcatcttgaacgcgggggccagcgcaatgccaacgcagagcagcgtagacagatcgcgcagcatccagctgaagcgggtcatgttggcgaaggtgccgccccacataacgccgtagacggcgagcgggttcagccccgtgacaaaaaagataaagacagcatccacgaccagcgccagaatgatggcgatggcacggacggcgatcttctggggcatcgtggtgccctcgcgcttggcaatgcgcagcagcggctcgcgggccgcagcagcagtctgactcatgcctgctcctcctttatcagattggtcatacgcagaccgacttcttccttcgtggtcttgcggccgtcgaggatgccgttgaccttgccgccgcaaagcacgacaatgcggtcgcacagctccagcaggacatccagatcctcgccgacataaatgactgctacaccgcgctttttctgctcattcagcaggtggtagatcgtgtaggaggtgttgatgtccagcccgcgcacggcgtaggcggtcatcagcacaatggggtcggcggccagctcgcggccgaccagcaccttctgcacattgccgcccgacaggcgggagaccggcgtattcaggtcgggcgtaacgacacccagctcccgcttgatcgtctcggccagtgcaaggggggccttgcggtccacgatgggcgaatggcccttgccgtagcttttcagcatcatgttgtcggtcatgcccatcgagccgaccagacccatgccgaggcggtcctccggcacgaaggagaggtggatgcccgcctcacgaatggccttggggcttttgccgaccagctgcacgggggtgtcggcatcgggggcaaaatactcgatgctcgcgccgctctccgtcggctgcaggccggcgatggcctcgagcagctccttctggccattgccggagatgcccgcgatgccgaggatctcgccgccgtacaccgtgaaggacgcatcgtcaaggacggtgatgccgtccgcgctgcgcacggtcaggtgcgacaattcaagccgcttgaccggatcgaccggctcggggcgctcgatgttcagctcgaccttctcaccgaccatcatctcggtcagcttggcctcatcggcatccttggtggcaatgtcgccgacatactcacccttgcgcaggatggccacgcggtcgctgatggacagcacctcgtgcagtttgtgggtaatgatgatgactgccttgccgtccgccttcatgttgcggatgacgctgaagagcttttcggtctcctgcggggtcagaacagccgtcggctcgtccagaatcagaatatccgcgccgcggtaaagcaccttgacgatctcaagcgtctgcttctggctgacgctcatctcatagaccttctggttgagatcgaggttgaactcatacttctcgcagatggcgcgggccttgtcatggacacgcttgaggtcgaatttatccttgccgcccatcgacagggcgatattctcggtagccgagaatacattgaccagcttgaaatgctggtggatcataccgatgccgaggtccagcgcatcgcgcggggagcggatggtcaccgcctcatcaccgacatagatctcgccttcatcggggaaatagatgccggcgatcatattcatcagggtcgttttgccgctgccgttttcgcccagcagggccagtatctcgccgcggcgcacgcccagagagacatccttgttggccacgacagtgccaaaggtcttggtaacgtgctccaagcgcacagcatattcgttctgcgccattatgcaggctcctttcggattataataaggtaggaacaatttgtagtttgtagggggccgaggaaaggcttccccctcgggggaagctgtctgcgaagcagactgatgaggggcaaccttgccatattgcggccttacggggcggcagccgcagccccgcccctcatccggccttcggccaccttcccccaagggggaaggctttctttctataaccgccaaaagggaaggccgcggtttcaccgcagtcttcccttatagattcagacagaatcaggcgacggggtcagcgtcctcgatgatgccatcgatgcgcagagagaacgtcggggcagcgcgcagctcaccctcatggaagtaaccgtcagagacagcctccttggtctcgccctgatacacggcaacggggctgccggtgctgaaatcatagtaggtcagatcgaccgggcaggaggtgacttccttgccgtcaacggtgaacttgctggtgtcgaacacacgcaggctgccgtccttcagtgctgcctcaacctcggcaaccttggcggcagtgccctcggcagtctcgggtcccagctcggtgatggcaacggcgccatcctcatagcccttgcaccagttctgggggatgctgccgttctgggcgccctcgatcagctccttgtagcagacgctccacacattggtggcggaggtcagcgcggcggtgggggcggtggagagcatgtcgatgttgtaaccgacagagtagcagatcttgccggcatccttcagcttctgggtggcggcgggggcaccggtggagtcggcgtgctggccgatgatgaccgcaccgttggcgatcagggcctcagcggcagcgccctccttgtcgatgtcgaaccaggagttggtgtacatgacctccatctggacatcggggtagatgctctgaacgccaaggaagaaggcggtgtagccggaaacgacctcggcgtagttgtaagcgccgacatagccgatcttgaccttgccgtcagcagtgaagctgtcgggctgggcctcgggggtcagggtgccggactcgaccagctccttgatcttcataccggcaaccacgccggagacatagcggctctggtacacagaggtgaaggcgttgtagaagttgtcgcagtcggagatggcagcaaagtcaccggtcatggcaacaaagttgacatcggggtacttctcagcctcctcgaccatgtaggtctggtggccgtaggagttggagatgatcaggttgcagccctgaccgaccagatcctctgctgcatcggcggtctcgccgccctcggggatcttgtacttccagacgatctggtcattgctcatgcccagctcggcagcggcctccttgatgccgttgatatgtgcggcgctgtagccctcggtctcatcgcccaggacgatgacgccgatcttgacatcaggcgctgcgttcgtgctgctgccctcggcagtggccgtggtgccggcggcactgctggcggcagtgtcagcggtggaaccgcaggcggccaggctgaacaccatagaggcggccagcagaatgcccatcagtttcttcatgtgtgttgttcctccctgtaatatctgcatataaaaggcaaaatgcgccgtttcatgtcggaccgtgccgggaatcgacgcactgtgctatcttgcggaactcattgtagccgctttacacagcttttgcaataagttttaaatttttgtgaaaagtttggcgaaagcggtaaatgttttgcgcacgcggacactgctgtgagcaggacgcacaaagaaaagcagcaaaagtcatactgtttgcacaaaatgtatgactttagctgcttctttccgctgttgtccctgttaccgcttatggataaattttttatccagcccctgctttacggcggcgttcagcaccatccatgtcagaaagacctcaataggcagcatgatggtgtttttcaccgcgccggaggtcatgtagtaaaggtaacccttgccgtagagcatcgccttccagacgctgcccagcagcacattgctgccgtagttgatgatgagccgtgtgatgatgatgcgcggcagcgtgggcttttgccgatagagcatgacgccgtagatcagccccgacagcacagccgagatcaggtagccggggaaatacggctcaccgtagcccgccagcagaaagcccaccgagtcgatgatggcacccgccatcataccggtcaccgggccgtagcacatgcaccccagcgagacagccagaaagctgaaataaatcttaaggcttggccccatcaggtagatgggcatgctttccagcacgatggagatcgcgcagacaagccctgcaaaggccagcacccgcgggtttttcagttcattgcgggcagtgcgccagtaggtgccggaaaagacggacagtttttcttcgcacataaaaaatcctcctttgtgcgttgccgcacaagggaggaggcaatttaatcggatgtgtacaacgccacatccgccgttgcacaccgtcatgcagcagtgggatgcggaaccggcaccgcgggccttacggccgcttcgtcctgccacaactccccgttggtcaggcacttcggggcatgacgccccacgcgcaggttcctactctgcgatatcgcttttattatacacaggttttgggaaaatgcaagagaaagtttcggggtaagcccgcgcaataaggcgccccacgcagtggggagctggccgagtttacgaggcctgaggggctttgggcagctttccccttactgcccgcttgcaccgtagttggccagcacacgggcgctggggtcgctgacatcgcagtgcggccatgcgcggttgggcatccagtagtcaacgatcatgccggcctgaccggggtagtatttctcaaaaagctcacggtagagcaggctttccttggtaaaggggcggcagtagctgtagcggccgcagcgctcggcaaactcgcggtctgtgtagacagtctcggcgtattccttcagatcatccaccatcgagtggcccaccgcatcgctgaaggcggccttctcacgccagaggatgctctcgggcagccagtccccctcaaacgccttgcgcagcaggtacttgcccttgccgtaggtgttcagcttcttttcggggtcgatagccatgacatacttgacaaaatccagatcaccgaacggcacgcgggcctccagactgttgacgctgatcgaacggtcggcgcgcaggacatcgtacatatacagctcccggatgcgcttctggctctcggtctggaaggcggcagcgctcggcgcatagtcggtgtacttgtagccgaacagctcgtcggagatctcgccggtcagcagcacccgaatgtcggtatgctcatggatgtatttgcagacaaggtacatacccaccgaggcgcggatcgttgtgatgtcccatgtgcccagcatcgcaatgacatcctcgagcgcgcgcagcacgatctcccggttgatgatgacctcggtgtggtcagcgtggagatagtcggccacctgcttggcgtatttcaggtcgatggcatcctcgctcatgccgatggcaaaggtgcggatcggcttgccgagttttttggcggcaatggcgcagaccaggctggaatccagcccgcccgacagcaggaacccaacgggggtgtcagcgtcaaggcgcttatcgacaccggccacaagcttttcccggatgttcgccataatctcgggcagctcatcctgcgcataggccggggtgtcggcaatatcgcagtaccgcacaaactggccgttgcagtaatagctgccgatcgggaacggatagatctttttgcacagtcccacaagatttttcgcctcagacgcaaaggcaatatgcccgctctcgctgtagccgtagaacagcggacggatgccgatggggtcacgcgcggcgataagcagctttttgcggctgtcgtagaggatcattgcaaactcggcgtccagatgcttgaacatagcaagaccgtacttatagtagagcggcaggatgatctcgcagtcggagtcagacgcaaaggtgtacccctcggcctccagctcggccttgacagggcggaagccgtacaactcgccgttgcaggccacgcagtccgcgccgcgggtgaagggctgcatcccctccggcgtcaggcccatgatggccagacggccgaagcccagcaggccgaactcggtctcgatgacacgctggtcgtcaggaccgcggctggcggtgcgcagcagatactcggcaaaggtttccttgggcagatcatgcccggcatagcccatgatacagcacattttcggtgacactcctttttacacttccaacaccagttgctgcaaacggcaataaaaaaagacagcccattcgccctgtattaggacgaatcgctgtcttggatccgcggtgccacctaaattaccgcagccgaaatacaggcatacggtcactttttccgtacgcgttcacctttgaaacgctgccgctgtaacgcacggcctgcggcgcaccctactcccctgccgggtttcaggcggcggctccggggtgttccttcgcgccccgtccccgtcccgacttacaccatgcgtcaggctctctgtgcggatcttgggcggtacttttccccatcaacgcttttgttgagtaaagaataacacggtcatgcaatcctgtcaagaataaatttcagatttttgggcgtatgccctgttttttcagcgggtcggcggcgcagctggcgcgccgtgcttcgtcatcttgcacaactttgccccggttccgcaatttttgcaaggttgccgaacgattcttgcaaatattcgtgatgcaaaattccatactatggaacgctattccatctgccgaattttgccgcgcactgccgttccaccctgcggaaccgcaccgttctgccgcccgcgccgtatctaagcaaccgccgcaatggtaaatgccgccgccgcatggtacactgaggatgacaaaattcgtgtgcttcgcggcgcctctacccggccgggagcatcccacaaccagaggcaagcactgcttgcaggaggaaaactatggcaaaaaacgcaatcgtcggtcagtccggcggcccgacttccgttatcaacgcaagtctggccggtgtctatgaaagctgcaagcgccgcggcgcgggcaaggtctacggcatgctgcacggcgttgccggccttttggagcgccgcacctgcgtgctggacgacaagctgaagactgcgctggacatcgagctgctcaagcgcaccccgtccagctacctcggctcctgccgctacaagctgcccgactggcacaccgccgagggcgaggccgtctatgttcagctgtttgacattctgaaggagctggacatcggctacttcttctacatcggcggcaacgactcgatggacaccatcggcaagctggccgactacggcgcacacatcggcagcgacatccgttttatgggcgtgcccaagacgatcgacaacgacctgatggtcaccgaccacacccccggctacggcagcgccgccaagtacattggcgttgtcatgaaggagatcatccgcgatgccacggtctacggcacgaagtatgtgacgatcgttgagatcatgggccgcaacgccggctggctgaccgccgccgccgcactggccaaggctgaggactgcgagggcgtggatatgatctgcctgccggaggtccccttcaatgtggaccactttgtggagaaggtcgagcggatgcagaaggagaagccctccattgtcatcgccgtgtccgagggcgtcaagctggaggacggccgctatgtctgcgagctggccgatgatgtacacgcagtcgatgccttcggccacaaggccctgaccggcacggcgcgctttttggccaacacggtcgcccgccgtctggacaccaagacccgctgcatcgagctttcgaccctgcagcgctgcgccgggcacctgaccagccgcaccgacattaccgaggcctatcaggtcggcggtgccgccgccaaggccgcttttgagggccacaccggcgagatggtcgcgctggaccgcatctccaacgcgccgtaccagtgcggcaccagcctgcacccgatcagcgaggtcgcaaaccttgaaaagaaggtcccgcttgagtgggtcaacgccgaccacaccgccatgaccgaggagttccttgcctacgccctgccgctggttcaggctgagctgaccccgatctatgtagagggcctgccgcatcacatctacctgccggaggcgtaagttactttcttcgagaagaaagtaaccaaagaagctttaaacaaatagcacaacaacgccgcagtaacgggaagcctgcccgtcactgcggcgttttctatatagagattgcaggagccttgcagcagccgccaacattccggctcatcgaggacgccgacccctgcagccgtaggggcggattccatatccgcccgctcctcttcccgtttaatagaacccaaagctcggcagcacttccagtgcgtcggcccaccaagcagggatgggcaggccggagagagccggataatagacggcaaacagcaccgccgctgcggcgcaaagccctgcggccagccagcgcgcccagtcccggcggcgcatacgggccagcacaagggccagcgccgccagacagaacatcgagctggggaaatagtggtacaaaaaggtgcagcgcgtgacaagcatccacgggataagctgcgtgccgtacaggatcagcaccgctgcgccctgacggctgccgcggccgctgacctgatgccagaacagccccaccagcgccgccagccccacgacccagatgaccggcccggccatgcctgcaatgctggccttcatgccgtagggcaggctgccgttgcggtaataccacacggggcgcagccccagcagccaggtgtaccagcggctctcaaacgggtgcgttgccttgagggtggcgtggtagctgtacatcgaaagctggcaccgccaccaatcaccgaggctgaaatccggctggcgccaccagtacggcaggtaggacgccacatagatgcagaggggcagcaccacatagaacagcaccccgcccagcgccgccagacggaattctgcccaaaagccggggcggccctgctgccggcgcgcccaaagcacgcccagataaagcaccgccagcccggcccccgcatagatgccggtccacttggctgcgcagcccagcccgaaggcgatgccgcccagcgccatcggcagcagggcatgctgcacgccatcggtcagcacccgctggcagtaccacaccatgcagtacgcgcccagcagaataaaaaaggtgccgtaaatgtcgatcgtggcaaggcggctctgggaaaagcgcataaagtcgagcgccagcagcacccctgccgttgccgccgccccgggcctgcgggtcaggcggcgcacaaagcaccacgccagcggcaccagcagcacaccgaacagcgtaccggagaaccgccagccgaacccggtcatgccgaacagcgcaatccccagcatgataagatccttgccgagcggcggatgggtcgtctcatagacgggcatccggtgcagctgctcatagccggtgcggccgtggtaaatctcatcaaaatacatgctatttagctggctgatcgcatcgggcacggcgttctgctcgtcaaacagcgccccgccgcccacggtcggcactagcccgcccgccgcatcgcggaaggccagctcaaacatctgggcgttctgcaccgtgacggtcaggctttgccccgctgcggcggtcactgcgttggcagtccagctgaagcaggtgccgtagtccagttctttctcaaacaccgtgtttccctgcgcgtccgtcaccgtcatccgcccgccgaaggaaacgcccgggtagacccatagcgaagcagcgtccccctgcagggtgactgtctcggtcagcgcggtgttcgtggcatcaagcggctgctgcggcgcggtgcggctgccgagataggcaaagctcagcaccgccgtagccgccgtcagggccagcagcgcccccacctcgcggcgggtccaggcgggctgggcatcgggcgttgcagcggcgttgacacacccggcaggcagaggcagcgtgtggccgtggcgggtgatgtcccacactgcaaacagcagcagcacaaagcagaccgcctccccaaggccggtcaggatggcaaccgtagcgctcgttgcacttgtcagccattcgtcctcggtaccggtcagcgagtagactgccgccagattgataaaccctgtcagcgacaggcccacccctgccgcatagagccggatgtcgttccaccgggccgctgccagcagggtcaacagcacgccgggcaccatgtaccgctcatgcatgcagtgggagagcgtaaatacgccgatgccgtagtaggccgccaacagcagcggcgaaaaacggccgctgcggctgctgcataccgcaaaataggcaagccccgccgtgaccagcaggatatgtacccagcccagctgctgccagctcatgccgaacagcgcaggctcggacaagcttttccagttgccgcccagcgccgcaagccagttgaaggcgttgatgctggcgtaggggtaaccggacatcgtagctgtgtatttttctacaaggcgcgggcccagctgtgccaagccgaaaaagggtatgccggtcagcagcggcgccagcagcgccagcgctgcgccgccgaagcaccggccaaaggcgcgcagacggtcctgctccaccgcgatgcccgccaaaaagcaggccgccagcaccgggccaaacagcagcgcctgcggcttgatggccagcgccagaccgaaccagacggcggcgggcaggtagcggcgctgctccagcagcaggaagcagagcagcagcggcagcgtaaaggccccatcaatctgcttccagacggcggtatcaaacagcagcagcgggtcgaacgccgtgaacgcggccagcaccagtgccatctgccgccccaccgtaccgcgccgtgccaccgcatagaccagcgccgccgacacacagtcgcaaaccgacggcaccagcgccagcaggaggtaggtccaccgcgattcatacgcgatgccaagcgcggcgcgcaccacccccaccagccccagcacccagaggtagccgggcgggtaatcggcaaagtacccctcgctgtagaaggcggcgggaccttgggcggccagcttatccccccatgcaacaaagcagctcatgtcataggggtagccctcggtgacaagggcaagcgccaaacgcagtgccagcgccgaggccagcaccacccagagggccgtattcggttttgttcgttgtttcgtcatagccatacaaataaggcaggggcagcccgcacagcctgcggcacacgcgcagctgcgcaaggccgcccctgcgtctgttatcggttacagttttgcaattttcggaccctgtgcggtgtcggtaacgctccagcccatctcggtcagctgggcacggatggcgtctgcgcggccccagtccttggccttcttggcagcggcgcgctcctcgaccagcgccgtgacctcggcggggatgctgtcggtctttttgcggttgtacaaaagacccagcacgccggtcagctcgtcaagggtcttggcggccgtctccagcgtagccttgtcggaggcatcggacagcgtgttgatgtccttgacgagatcaaagatggcagccagtgcatccggcgtgttcaggtcgtcgtccatcgcggccttgaacttggcgcgggcctcctcacacttggcagccagtgccgtgtccgtgccgtgggcatgctcgatagcgaaatcgagattgtcacggcaggtgtacatccgctcaaggctgctcttgcagctctcgatcagctcaacggtatagttcagcggcatgcggtagccggcggtaagcataaagtagcggatcggctcatagccgtacttgtccgcaatttcacgcacggtgaagaagttgttcgcactcttggacatcttctcgttgttgatgttcaagaagccgttgtgcatccaatagcggctgaaggtgcagccgttggcgcactcactctgggcgatctcattctcatgatgggggaagatcagatcctgcccgccggcatgcaggtcgatggttttgccaaggtgcttgcgggccatggcgctgcactcgatatgccagccggggcggccgtggccccacgggctttcccagtagggctcgccgggcttggcagccttccagactgcgaaatcggcggggtcctccttcagatcatcgtccatctggctgcgcagggcacggttgccgctctccagatcatcgaggttgaggtggctcagcttgccgtagtccgagtcagacttgacgcggaaatagacatcgccgttgcgcgccacataggcgtggccggactccaccagatccttgacgataccgatgatctcgccgatatgctcggtcgcacggggacgcacggtcggcgccatgacattcaggccatcggaatccttgatgtactcagcctcaaacttgcgggcaacctcctgcatggaggtcccctcctcctgtcccttcttgatgagcttgtcatcaatatcggttatgttggagacatagtagaccttgttgccgcagtattccagataacggcgcaatgtgtcaaagacgatcatcgggcgggcattgccgatatggatatagttatagaccgtcgggccgcagacataaatgcggtactcgccctccttctggggggtgaattcctctttccggcgtgtcatcgtattgaagatctgcatagcttgcacattccttcctctgtgtagggatatctattccattatagccagcgtgtgcgcaggttgcaagggggattcagccgttatttgcaaattgcacggccagcgcgtcccagacagcactgaaattgtaggggaaccgcgcatcctcctcggccagccagctgcggtaggtgtccagctccgcaacggtgggggccttgatgcggcggtaagcggtgatcgtatagccgttgcccatgtcaaactctgcccccacctcaaacggcgcatacttttcctgattttcaaggaaggccgcgttcagcttttcggtatggttgttggggtcaaacggtgtacaggtcaaaacgacctgcgccgtgaacagctccttcgggaaggcatcgttgccggggttgcaggcaccgtagggcaggatctcgcggatggtttcgtccggcagggccgaaacgcggaacacatccgggctgtataccacaccgtggcagatcatataggccgaattggcgccgctgcagttttgccgcagccagtcattgacagccgccacctgcgcaagatcgctgcgggggctgtcaacataaaaatacagcccgctgttgactgcgtttggcagaatgaccggcaaaagctggctgcaggccccaaagttgaggccgcacagcacacccagcacagccgccgcagcgcggcgcggccacacccacggcagctcgcttacaagcaacgcgcagagaaagcagcccagcaggtagaacggcgcgaccgccagcgactggtggtcgtccatattctgcacccgggtgacaagcagcaccgtcagaaccgcacccaccgcagacagcacagcgagggagcgcgtctgctttttatacagtccgtatagtatgccgatcagcataatgccgaacacgagccagcccagatagatgcgctggttgtcaagctctgccaaaaagccgccggtctggtaggtggcatagcggtcgctgtaatcggcccggacgatacgccagaacatcggcagtagcggcacgccgacacagaacagcgacgctgcggcaaatttcacaaagcgcgccgctgcgccgccctgttttgtgcaggcagcccgggccagcacccagacgccatagagcaaaaagaacgacacaacggtgaacatgtagctgcgccgggtcagcatcagcagcccggtaaaggccgcaaggctgaccagccgtgcgggtgccgggcgggcaaaatcatagccgacacccagcgcaagcagcataaaggcgaacgccacgcccagcagatcgggcatgccgcggtacaatgcaatgtgcaaaagcggcagcagcagcacaaacgccattgacagtgccgtaaagagatccggggcgtccggctccagtttttgacgcagcaccatcagaagcacccatgcgctgtagtagaccagcgtggggatcagcagcgcgcagagcagcgcaaaggtgttggctgtgcgcggtgtgaacataaagaacggctctgccagcaggttgatgacaagcggtgcatagtcattgaaccatgtcttataaaccgtggagccaacgccggtgaatacgccgtctgcaaagttggactccagccgcacctgcaggttgtagtaggtcgcattgtcccagagatacaggctctggcggcccaccatggcgtgcaggtagaaggcggcgctcagcgcgatgcagaccgccagaatgacggcatccgctttcgtcagccttgcgcccacggccctgaccgcgcggcggtacaggcagaatgtccccagcactgccgtgcaggagagcagcagcagccagatatccacggggtttcgcccgctgccaagcatgtcgatgccctgcaggggcgtgatgaaatgcgcggctgtactgaatacgaacttgactgcaaaaatgcacagcagaaacaggacggcccgctcagcccgggtcatcctgcgatagatgcttttaaaacaggtggggaggttgcactttgacaaggtgggaatctccttattggtaatccttgcaaatccgccttaacgcgcactctgtaggggtcgatgcttgcatcgacccgcgggcggatgcaagcatccgcccctacatggacacacattgaggatttattttgcctgcataaacagcttgcggttctgccacaggtaaatgccgcccgaaagcacggtggcggcgccgcacagccagcacaaaatttgggtaatcagtcccacggccatcacatcggtggggcctgccagcgcggcggcaaagtagtagaacagcacggtcagcatctgcagaacggtcttgaccttgccccacatattggcggcgatgacggtgccggtctcggcggcaagcatacgcacaccggccacggcgaactcgcggaacagaatgaccgccagcaccacggggctgcagatgccgcacgccaccatataaataaaggcggcggtggtcaggcatttgtcggccaaggggtccataaacttgccgaaatcggtgacaaggttatttttgcgcgccagatagccgtccaaaaagtcggtaaagctggcaacggcaaagataataccggcaataagcgcaaatgtggggttgaaatcggcggtgccgtagcggctgtaagcggcaaacaccataaagacaggcaccaagataacacgaagcatcgtaagtttattgggcagattcatacatcaatcctccagcttttcttccgcatagccgtacagatcgtaggtgtcggcatcggtgatggtgacattgtagaacgcgccggtctccagcggggtgtcggcgggggtcagcacattgccgtcgatctccgggcagtcggccttggtgcgcagcaggtacatgccggtctcatcgtccaccccgtcacagatacactccagcgtttggccgaccttttcgccctcacgcgcggcgctgacctcggcctgcaattccataatgtggtcggcgcggcgctgcttggtttcctcgtccaactggttttccatgcgtgcggcgactgtgttttcctcggcagagtaggcaaagcagccaaggcggtcaaatttgacggtcttgacgaagtcgcatagctcggcgtactgctcctcggtctcgccggggaagcccgcaatcagggtggtgcgcagcgtgatgccggggatggcggcgcgcaggcgggcgatggcgtcctcaatttccttgcgtccgccgcggcggttcatggccttcagcacggcatcatcgcagtgctggatgggcaggtcaagatacggcacgaccttggtgttgcgcaccatggcggcgataaattcgtcggtgatgcgttccggataggcgtacagcacgcgaatccagcggatgccctcgatcttttgcagcgcgtccagcaaatcgcagatggcgccgggcttgccccagtcctcgccgtaggcggtggggtcctgtgccacaacaatcagctcgcgcacaccctcccccgccagccagcgggcctcggctacgcagtcgttcagctcacggctgcgcagcttgccgcgaatcagcgggatagcgcagtagtagcagccgttgttgcagccctcggcaatttttaagtacgcatagtggcgcggggtcgagataacgcgggcaccgcccagctgcatatcgctcttggggccgtagctttcgacctgagaggcacccgcggcacagacgcggtgcacgatggcgggcagtgcggcgttggagccgatgccgaccacggcgtccacctcggggatttcctgaatgatctgctgcttatagcgctcggccagacagccggtgacaataaccttgaggtcggggttttcctgcttgtactggcaggccatgaggatgttctcgatggcctccgtcttggcagactcgataaagccgcaggtgttgatgatgatgatatcggcctcgccggggtccgccacggtgacatggccatccttgatgagggcatggcagaatacatcggcatccacctgatttttcgggcagccgagggagataatggcaattttcattgggtagtcctttaatataatattgtatgtttgcgtagggttgtagggggcggcgtcctcgacgccccgcagggtggcagatgcttgccggaaattgtagggcggccagccctctggccgccgcggaggggtcaagacccctccctacattgcgaaccggtaaggggatgcaatcgacaggctgagggccgggcatgcccggcccctacggtgcggttttactcgtcgtcggatagcacctcgcgtatgaccgcgtggctgaagccgcgccttgccagtgcggcagcgacctgatcgcgcttaccggcggcaagctttgacgcatactgccgcgcgaccagtgcgcgggctgtttccagctcggggctttcgccgtcctcgttctcggcaaacagctcctccaccacctcggcggcggtgtcgcggtcgatgcccttggccgacaaatcattcaaaatttcccggcgggacttgcgcttgcgcagcagctcagccgcacggcggcgggcaaagcccgcgtcattcaaaaggcctagctcccccgcccgcgccaccgcgtaggcggcgctgtgggcgtcaaacctgcggcagagcttttggtacagctcccccgccgcatggtcgcgcagggaaaggtagtccatcgccttgtccagcgcacggcgggtctcgcttttcttacgcagcttctcgatctgccagtcctccagcaggtcatcctgatggagcgcggcatcggcaaaggtttgctcatcgagggagaaggcaaattctccatcaaaaaacagcgcaaggcggcctttttttgtctctttgatctgtgtcaggcgcggcatttcgatcactcatcgaccatgatatcaaggtcaacctcgctgcccgttgtcttggcagccggggcggcaggggcctcgcccggggcaaccggcttgacgatctcactcgggtccagcggcttgacgctacccttcttgccggcagccagcaggcggtcagcattggcgcggacgatcttttcgatctcgtcggagacctcggggtgctccttcaggaactgcttggcgttgtcgcggccctgacccagacgcatctcgccgtagttgaaccacgcaccgctcttctgcacgacacccagcttgacgccgaggtcgaggatctcgcccagcttggagatgccctcgccgaacataatgtcaaactctgcctcacggaacgggggcgcgaccttgttcttgacgatcttggcgcgggtgcggttgccgatgaacgcgccggtggagtccttcagaccctcgatgcggcgcacatcaatgcggacgctcgagtaatatttcagtgcgcggccgccggtcgtgacctcggggttgccgtagacgatgccgaccttctcgcgcagctggttgatgaagatacagacggtgtttgtcttgccgatgacaccggtcagcttgcgcagtgcctgactcatcaagcgggcctgcagaccgacatggctgtcacccatctcgccctcgatctcggcgcgcggcaccatggcggcaacggagtccacaacaacggcgtcaatcgcgccggagcggacaagcgcctcgcagatctccatggcctgctcgccggtgtcgggctggctgaccagcaggctgtcaatatcaacgcccagcgcggcggcgtaggtcgggtcgagcgcatgctcaacatcaataaacgcgacctcgccgcccatcttctgggcttcggccaggatctgcagcgccagcgttgttttaccggaagattcggggccgtagacctcaacgatacggccacggggcacgccgccgatgcccagcgccagatccagacccaggctgccggtggggatggcatcgacctgcatcgtgacattggcgcccagcttcataacggcgcccttgccgaattgcttttcgatctgggccagcgcggtttccagcgcggcctttttgtcagcggcagggcctgccgtcttgggggtagtatctttttttgctgccatgttgcggttctccttttatatacaagtaagtctaggatttgcgtttgcctctattatatacgatttacgaacagattacaacattttgttgtgcgttttttgtcccataaatcggattttcagcagcttttttcgggtttttggagcagcacggcccggtcattgccgccgtagtccttgcggcagctggtgttgacccagccgcaggcggcccccagcgccagcacggcggggccttgggcatagccgatctccagcacaagccagccgcccggccgcacggcgtcccggtacttttcggtcagcagacggtaaaaatccagcccgtccgcgccgccgtccagcgccatggcaggctcctgcgccgtttccggcatcagcgcccgcatctccgccccggtcaggtagggtgggttggagatgatcaggtccgccccctcggcgggcagtgttttataataggtaaagacatcggcctgcacggtgcgcacaccggtctgttccgtgttggcggtcaggtactgccatgcctcctggcttttttccacacaggtcaccagcgcgccggggctgtggcgcgcaatgccaagccccaagcagcctgtccctgcgcagaggtcatacaccaccggccgttccctgccctgcaaaagcgtgagggcgctctcgcagacgatctcgctgtcagcccgggggcacagcacgcccggcccgaccttgagcgtaaaatccataaagtcccactcgcccagaatgtactgcagcggctcgcgggcagcgcggcgttcggcaagcgcgctcaggcgggcttcctcggcggcgctggggccgtcatccagccggggatcgcggccggtcgcaaggcggtacagctcggccgcgtcaaagcgggcatcgggcacaccggcggccgtcagcttggcgcaaagcttttgaaatgcagcgttcaccagcgggcatcctcctgcttttccggcagaacgggggtgacggcggcaatcgcaacctcgatcatcgagtcgtccggctcaaaggtcgtcagccgctgcatccaaagccccggctgagagatgagctttgccgccgcgctgtcagagcggcccgcccatttcaaaatttcatacgatacaccaaccagaagcgggaacatgcaaagcttatacacgaccctcatcgcggtgctggtccaaggcagcaccgcatacaggaagatgctgatgatgatgacgaggatcataaagctggtgccgcaccgcgggtgaaagcggctctggcggcggatgttttccaccgtcaggggcagaccggcctcataacaggcgatggtcttatgctcggcaccgtggtactcaaatacgcggtgcagctccttcatgcgggtgcaaaggaacatgtagccgaggaagatgaccatcttgagcacgccctcgaggattacgcgcggccagcgccccagcggcacggcgcgcatgacaagaccggtcaaaaaagtgggcagaaaggtaaacaggaacagcgccagcgccacgcccacaaaggcggcgcaggccatcagcgcgttctgcacggcgggggtggcgtgcgcctcgaaccatttgtccagcttggactcagcgggctcggtctcgccctccatggcgacgtcggccgcgtgcatcaggtagcggtagcccttgtaaaggttttccgccatgttgcagacgccccggaccagcgggaccttattgtaccagtgggtcgtgacggtgtcatagctcaggtcgatggtgccgtccggcttgcgcacggcgcagcagattttttccggaccgcgcatcatgatgccctccatcagggcttgtcccccgacggaggtgcggaattctttggacataggcgttctccttcgtcatttttgccttcccctgagggggaaggtggccgagcaaagcgaggccggatgaggggcggatgtatcgctattgcccgttaccgggttgtcgcggaaagtttgcccctcatcagtccgcttcgcggacagcttccccctcgggggaagccttaaattttttcatgcagatgctcctgcccggggtggtagacgggcagggtcactgtgacggtcgtgccgcagccgagggcggaggtgatgtcgaaccggccgccgagcgtctggacgatctcgtccacgaccgcaaggccgatgccggagccgcgcaccgagttctttgccttgaagaacctctgcttgaccttttccagatcatcgggcgcaatgccccggccctgatcgcggatcgacgcgctgaccgtgaccggtgtgcggcgcagggtcagaaagatcgtaccgcccggctcggaatacttgatagcgttgtcaaacaggttgacaaacacctgccgcagccgcgccgggtctgcccagaccgggtagggctcgggcggctcctgatagacaagctgcattccctcctgccggatgcgggcctcgacaaagagcgccgcatcggtggcctcggccacaaagtccagcacctgacagttcatcttgatgccgttctgcatacgggagaagtcgagcagctcctcgaccatcgtgtaaaggcggtcggtctcggtgccgatgaccgccagaccgcgccggtagttctcgttggaggggtcgtcaatgttgctgatcgtctcgacccagcccttgatcgaggtcaacggcgtgcgcagctcatggctgaccgaggagatgaactcgtttttcaaccgctcggtctcggccagatcctcggccatctggttgatggtcttgcacaggcggccgatttcgtcatcgtaccgggtgtccggcaggcggaccttcatgtcgcccttggcgatccgggtggccgttgcctcgacctcgccgaggggccgcacgatggagcgcaaaaaaaacagtccgctccagaccgtgaagcacagcacaagcaggcccagccccacacagatggccacggtgcgccaccagaggttgtccaccagcacaaggctcgtcaccatccgcatagcggcgatgctgcccgccgcgtagggcacaagcatcgtcactgccatgacacgctcgccctgcggcgtggtaaagatggctgaccccagcccattggcggcggtcagcgcgcggccgtaatcggtgccgttggtcaggtcgcggttcatcgtgccgctgctggttgccagaatcacgccctgattgtccagcagcataaactcaaacttgtccttttcgtcaaactgctcaaccacgcggcgcaggacctgcccgcggctttcggcggtaacggccacatcccctgccgtgccggtggcctgcaggcggcccaccacggtggagaaacggttttccacagcgcgctcaacgccgccgtacaggtcgttatagctgtaatagaggaaaagcccctccgccagcaccagcaccagcacggtgataagcaggctgccgcgcacccatcggcggatgatactgctgctgttcggctgcataggggttcctcctttcgcgtttttctaaggggccgccgtcacacattccagcggtagccatagccccagacggtcatgatatgccgggggttgctgggttcgtcctcgattttcatccgcaggcggcggatgttcacatccacgatcttgacatcaccgaagtaattcttgccccagacgccctccagaattttttcacgcaccagcgcggtagccgggttgcggaaaaacagctccatgatctggaactcgacctgtgtcaggtcgatcggcgtgccggatttgtagaggatgcggctcttttcgtccagcacaaaggggccgctgacaagctgctccggctcctccgcgggcttggcggcgctggtgccgcggtggatgcgccgggtcagcgcctccagccgggcgatcagctccgacaccgagaagggctttgcgatgtaatcgtccgcgccgatggacaggccgcggatcttgtcgccctcctgccccttggccgatacaatgatgatgccgatgtcgctgtcatcgcggcggatcgtttcacacaggctcagcccgtccatgccgggcagcatgatgtccagcagggcagcatcgcagggttcgccgccgtgcatcagctccagcgcacgctcggcgctgggggcctcaacgacctcccagcctgccattttcaggttcagggctaccatttcgcggatgctggcttcgtcctcgactaccaaaactcgtttcataagcctttcccttccttatcaatttgaccccagcagcacggtattctggctgatggaatcgagattcaagccgtaatagggcgtaacgacccgcgcctgcagctgttggctgccgatattggcgatgcgcagatagttgccctcgccgctggctgtgtctgtggtcgggtcaacgacccgcatctcgcagtagacggtgtttccctcagcgttgcagatcagccagccggtgccgccctgattggcgcggatgagcacgctgccgtgcattgactcgggcagctccataaacagatcgtactcactgtcgtagatgccgaaccggctgttgccgcccgcggcggaggtgtaatccttccagagcaggaagctcagccgcttgtccatcggcgtctgcagggtgccgccatcgtcgatctccacggggatgtccaccgtgccgttgccgtcaatgtcgcagctgagcagggtgtcgttgtagcgcagcgtgctgcgctgaatgtcgctcatgccgccggggcggtagggctgcagaaagcctgtaccgccatcgtacaggataatgtccgacacaaggctgcttgccccggtccaggcgtccatcacaaggtacatggcgtcatcgctgccggtcccggcatgcagggccgcacagctgctgtaaaccccctcgcccagattcagcgtctgggtcgagcggaactcccccgcgttggcggtcagcagctgcagcgtcacgccgccaagctcagtgtccggcggcagggccagcacaagatcctgtgtatcgcccttgccggtgaaattggccacgatcatatcggtgtagcttttgctgatgacggtggacagtctgccattgtcgtactggtagacggccagatactggtccccctgcggggagatgtacccggtcagcagctgcttgctggccgcgtccttcaggctggcggcggaaaagctttccacctcggaggacataccctcgatggcctgactgacacgccagccgctctcgccgctcggctccagcaccgcaagccagacattggagctggtggtgtcggccgtgtacaggactgcggcctcgtcaacgccgtcaccgtcccagtcaccaaacgcaaacggggaaagaaaatcaccgctggcgggatatttgagggtagcactgccgcccagatagttgttcagcgccttctgcagggccgcgctctcgccggaaagctgcggggcgcgcagcagggtctcgacatcgcccgccgcactgcagcctgccagcagcgccgccgcagggagcagcgccgcaagtcgctttctcatgggtggcacgctcctttcctgcgcaaaaatacagatatagtataccacatttacggcagcgccgcaatgcctaacagcatcagcaatgtacctgcggcggcgcccaaaatgccggcggcgcgatgtttaaaggcaaacgcatcgggcaaaagctgggcaaaggacacccacaccataatgcctgccgccagcacgactgtgccgttcaaaaagccgggtgtaaaaagtcggcgcaggaacagccacgccagcacagcccccagcggctcggccagccccgaaatgagcgccgccagcacaccggccgcacggctgcgggttgcgtaggcgaagggcaccgccacagcaaggccctccgggatattgtgcagcgcgatggccgccgccgtgcgcagaccgagcgccgggtccgctgtccccgcgaagaaggtaagtacgccctccgggaaattgtgcagcagcagcgccgcgcccgtgataagagcggtgcgcatagccgccgcacgggcggggtcacggccccggccgaagcggacggcaagctcggattcctccggcagaagattgcccagcagccccgccgctgccatgccaagcgccgtcagtgccgcaagcgccccgccgcacgccagaggcggcagatagccgccgtaaaaatgcagtgcctcaggcagcagatcggccagcgatgccgtgagcatgaccccacccgcaaagcccgccgaggcggccagaagcttttctgttggtttgccaatcaccgccagcaccccgcccagacctgtagacagaccggcgagggcggtaaggatcagtggtgaagtttgcatatcggtacacccccaagctttagacttataaatgtatacggtgcgcaggacggcatatgacaagggcgcaggggtgtacttttgcgggtgggcatggtatacttgctttagtatatcaagtcgaaatttgcaggtgtgattgatgagaattgtagaagtttcagaaaacaaaaaacaatatcttgatttgctcctattggcggatgagcaagaagatatggttgaccgttatctctgtaaaagtaaaatgtatgttctcgatgatgacggagtgaaatgcgagtgtgtcgtaacggatgaagggactggaatacttgaaatcaagaatatcgctacagttccctcatttcagcgaaaaggctatgccaaagcactgattgaatttcttgttgaaaaataccgtggacaattttcgatactgcaagtgggaaccggcgacagcccattgacgatacccttttatgaaaaatgtggctttgtacgctcgtatatcgtgccaaatttctttacggatcattatgatcacccgatatatgagtgtggtgtacaccttgtagatatggtgtatttgcaaaggcctctataaaa

SEQ ID NO: 14017 - DNA, 17429 bp, Unknown
  gut microbiota DNA sequence
acgaggccaaggagctgatcttctccggcggtttgcgcatctactccaccgtggaccccaaggttcaggagggcgtggaaaaaacgatgtacaacgaggacgacctgatccccgccctgtggcatgaggagccggtctgcctgcgtgattaccccgccgacagcagcagctgggacgaggtccagtacgatgaggccaccggcctgcccatcacgaaggacggctacgcggtctacgggcaggaggcaatccccgtctacgctgacgaggaaggcacaacgctgaagacgggcaagtccaccgaccccgactaccccaacgacacgaccgtctacctctgcgtctatgagagggtccgcactcaggctgccatagccgtgctggactatgacggcaacattttgggcatcggcggcggcatcggtgagaagaaggttgacctcggcttcaaccgtgcgacctcgccccaccagaccggttctacgatgaagccgatcggcgcctacgcgctggcgctggactacaagctgatcagctattcctcccagatcctcgatgccccgtactactctgcggaggacaagaaggtcctgaaggatcagtatatcggcgtgatgagcccctattccgaggcagcccagtcccgcaccgatgtctggcgtgcatggccgaccaactataacggtgtcggcggtcagggcaacccgatgctgatctacgatgccctgcagcagtcctacaacacggtggctgtctgggtcggcgatatggtcggcgtggattacctgtacaactttgtgcatgatacgctggaatgcagctacatcagcgcagagaacgatatggaccttggccctctggtccttggctcgcagagcaatggtctgaccgtggtgcagctggcgggtgcctacacgatgttcaacaccggcagctacaccacgccgcactactacaccgaggtcaccgactatcagggcaatatgatcctcgacaacaacaagtatatcaacaccacgcaggccatcagcgccgacacggcctatatcatgaaccgtatgctgtggaatgttctgcacagcgccaagggtactgcctacggcagagcccccgatggcgagatggattccgtggccaagaccggtacgacgagcaactacaaggactacacctttgcaggcttgacgccgtactatgtcaccgccatctggtggggctgcgaccgcccgaccgagatggacaagctgggcaaagcgggcggcagcggcaagcccatccagctggcatggaaatacctgatggaggatctgcaggcagacctgccggtcaaggaattcgccaagggtgagaatgtcgttgaaaaacggttcgacacctccacgggtgccatcgtctccggcggcggtgccgtgggctactacaccgaggataacctccccgacagcagctataccgtcacgagtgaagaggacccctttgccgcgctggcacaggccgccgcagaggcggcggcaggggctgaataaacgccttcccccttggggggaaggtggcgcgaagcgccggatgaggggcgcgcttgctgcagcgacccattcccgggcaatagaggcaaagctgcccctcatcagtcaccttcggtgacagcttcccccgcgggggaagcctttataacaaaaccaccccaaccacaaaacggttggggtggttttgtttttgtgtgagatacagttgtacccgcacaaaagatgctggcttttaacggctgcgggctgtgcaatctgacaaaatgcacaaaaaccgccccaaaaggcttgcaacctgcccgtaggcgtggtattatgggacacattgagaaacacttgtacacaagggggaaacacaatggccgagaggcgttttctgctggtagatgcggatgttctgccggaggtttttgtcaaggtgctgcaggccaaggagctgctggcttcgggtgcggtgagcaatatctccgccgccgccaagcaggcgggcatttcgcgcagcgccttctacaaatataaggataccgtctttgatgccgagaccgggcgcgagtccatcaccgttgtggccacgctgctcgacaagaccggcgcgctgcagagcctgctctcgggcatttcggcggcgggggcctcgatcgtcaccatcacccagtcccgcccggagaacggcgcggcgcaggtggaggtcacggtccgcaccggcacgatgcagatgccggtcgatgagatgctgacccgcctgtcccaccagccctgcgtggtgatgatccaccgcggggcatgatgcaggggcgaggtatgccttgcccgccgccctgccgaaattgcgctgtggcgggaaagctgagggccggatatgcccggcccagtgtaagaacaggggaagatagaatggctaaaattgcaattatgggctttggcacggtcggctccggcgtgctggaggtctgccgccgcaatgcggcatccatcgcccgccgtgccggtgagccggtagaggtcaagtatatcctcgatgtgcgggatttctctgattccccggacgctgcgctgtttacaaagtccatcgacaccatcctgaatgacccggagatccgggtcgtggtcgagacgatcggcggcacgaaatttgcctacccgtatgtgcggcaatgtctggaaagcggccgcagcgtctgcacctccaacaaggagatggtcgccacctacggtgccgagctgcttgcccttgccaaggcgcacaatgcagcgttcctgtttgaggccagcgtcggcggcggcaccccgatcatcaccccgatgcaccagtgtctggccgccaaccatatcagccagatccgcggcatcgtcaacggcaccacgaacttcatgctcaccaagatgaagcgcgagagcatgggctttgacgaggcgctcaagatcgcccagcagcttggctatgcggagacaaaggaccccggcgatgatgtggacggccgcgatgcctgccgcaagatcgccattttggcaagcctcgcctgcgggcatcatgtctaccccgacaatatcccggcgcgcggcatccgcgatatcacggtggccgacatcaaggctgcggaaaagctcgacagcgccatcaaacttatcgcttggtatgacgagggcgagaacgggaatatggccgccggcgtggagccgatgcttgtctccaatgcaaaccagcttgcaggcgtggatgatgtgttcaatgccgtgctgatgaagggcgatatgctcggtgatgtggtcttttacggcaagggcgcgggcaagctgcccaccgccagcgccgtggtggccgatgtcattgatgcactgaaggacggtgcaaaggtccatgacagccttttctggaagcccgccgaaaagccggagggtcagctggtggacaaaaatacctacccgtggtacatccgggtaacgggtgtggcgggcgcgctgctgcccagcgtggccggtgcgggccatctggtctttgaggaaaacggcgaggccgcctacctgatcaacgccgccacggctgccgaggcggccgccgtcacccggaagatcgaggtgctgggcggcaaggtcgcgctggccatgaaaaaactggaagagtaagagggaacagggaatatgataacagtaacagtcccggcaaccagcgccaatgtaggggccgggttcgactctctgggcctggccgtctcgatgcacaatgtgttcacctttgaggaatccgaccgtatccagatcacctcggtggacggcacccatgtcccggcgggcagcaacaatcttgtctaccgctcagcccgggtcgtgtatgatcagcttggcatcccgctgcgggggctgcgcatcacccagcgcaatgatatcccgatggcgcgcggcctcggctccagctcggcctgcatcgtggcgggcatcatgggggccaacgccctgctgggcgataagctgaccgagcgccagatgctgacactggcaaccgccatcgaggggcatcccgacaatgtcgccccggccatgctgggcggctttgtaacgagcgtcattgatgagggtcaggtctacagcgtcaaaaaggacatcgacccggagctggcctttgcggcctttgtgccggatttccgcctgctgaccagcaaagcgcgtgcggcgctgcctgcgatggtcagccataaggatgccgtttacaatctgtcccgcgcggcgctggcaacggccgccttctgcgagggcaactacgcgctgctgggcgtggcaacaaaggatgtgctgcaccagaaataccgcctgccgctcatcgagggcggcgatgaggtgtttgagctggcacaggatctgggtgcgcaggctgtgtacatctcgggcgcagggccgaccatcatggccgttgtgcataaggatgatacagagttctttgcccgtgccggggcggcgcttgcggcggacggcccgctgcatcattttaccgtgcatcgtctgctggccgacaatgtcggcgcagtggtgagctgatatacgaaggaacaggggagagggatactaccaatgggcttgatcgtacaaaaattcggcggctcctcggtcaaagaccggaaccgcatcttcaatgtggcgcgcatcgtcatgaatacccgcaacgctggcaatgatgtcgttgttgttgtttcggcgcagggcgacaccaccgatgacctgatcgccaaggcggccgagatcacctcggacccgtcccaccgcgagatggatatgctgctggcggctggtgaggagatctcgatctcgctgctggccatggcgctgcaggagctgggcgtctctgccatcagcctgacaggctggcaggccggcttcaacaccgaccgcgcctactccaaggcgcgcatcaagcgtctggacaccgagcgtgtggagagtgagctggcccgcaaccgcgttgtcgttgtggcaggctttcaggggctgaaccgctccgatgatattaccacgctgggccgcggcggcagcgatacctccgccgttgcactggcggccgcgctgcatgcggaccgctgccagatctttaccgatgtggagggcgtctacaccgccgacccgcgcaagatccccaaggccaccaagctgaaggaaatcacctttgatgaaatgctggagctggcttctctgggtgcgcaggtgctgaacaaccgcagcgtggagctggctaaaaagtacaatgtcgagctggaggttatttccagcatcaatccggtgccaggcaccgttgttaaggaggaatgcaaagtggaaggtatgctcatcaagggtgttgcaaaggacaccgatgttgccgttctgactgtcaaggatgtgcccgatgtgccgggtatgtcgttcaagatcttcagcctgctggcccagaagaacatcaatgtggatattattctgcagaccaccggccgtgacggcaagaaggatatgagctttaccgtgcccctcggcgatgccgagagcgcggtggccgccctcaagaacgccaccaaccgcatcggcggcggcgatatcaatgttgacaagggctgcgccaaggtctccatcgtgggcgccggtatgcagagccactccggcgttgcctccaccatgttcgaggcactcttcaaccagaacatcaacatcaagatgatctccaccagtgagatcaagatcagcgtcatcatcgacgaggccgacgccgacaaggctgttgccgccatccatgacgcattcatcaactaagcgcttttgtaaagcaatatagagggatatgggtaggcccccgtacacagtgtggtgtacgggggccgttggtgttgtataaaggcttacagcagctttttgccctgcgcaaactttgcgctcagcgcgcccctgccaaggtaggcgtaccgctccaaacgctcggcgggggtgaaggtacgcatgtttttcagcgaatcatcgtccagcacaagggcgtcaagggcgtagccctcctcaaacaggccgaccttctcgccgaaatcggcccagaaatcaccgccgccgaccgtagccatatacagcgcctcggtcatcgtcagcggcttttcgcgctggtcaacataccgccagcgcagcttgctgacctgcacggcggtggccatgacggtgaacagatcaagcgtgtggccgcccgccacatcgctgcccagcccgatgcgccagccgccgcgcagataccgggcggcgggggcgataccggcaatgacattctcattgctggtggggcagtgggcgatcatgacgcggttttgcttcatcagtgcgtcctccgcatcggggcagtagatgcagtgggccatgacggtcggcacactgccgccgaacagtccgcaccggctgtagctctcgccgtagaagcttgtgtcagggcaaagctcggccacccatgcgatctcgccgggattctcagacagatggctctgggcgggcacgccgtattcggctgccagtgcgcccagcccggccatataggcatcggaggtgctgggggtgaaccgcggggtgatcatcggccgcacggcccccgcgtgcagggtgttctcggcccggcaggtatccagccagcggcgggtctccgccagaccggcagctgcatcgggctcccggtagctgtccgggctgttgcggtccatgcccagcttgccgacaaaggcggatagcccggcatcgcgcagctggtgcatcagctccagcgtggcatcggtgtgcagcgttgcaaagatgcaggcgcgcgtggtggcgctgtttttcaaatcgcgcacaaagtaggcgtagccaagctttgcatacgccgggtcggcgtagtgcgcctcctcggggtaggtgtactgctgcagccagtccagcagctccagatccatggcggtgccgcagtagctgtactgcggtgcgtgcaggtgcagatcgaccagaccggggataatgattttacccgtatagtcgagaatttcgaccccggcaggggctgcttcggaaaaaccggcgcacaggccgttttcacacagcaggtatccgtcccgcacccgcagggtatcgggggtgggggtgtccaaaaaagtgcctttcagggcgaaacaatccatagaaatgacctctctatataaaattgctttgtaggggccgggcatacccggcccgcaagtgtacggtggataccccttttcatgggggtgtagggcggggtgccctcaccccgcggcggccagagggctggccgccctacaaatcgggctttcataatctctattataaacaatatatagcatctgttgcaagttttttgtttactttatgtcgctaaagcggtataataccaatatctattgatgtttgaaaggaataacgatttggaacgtaaacaactcgcacccggcgtatacatcacaacgctggatgctgctaaatttaaccgctgccgcatcacgctacatctgcgtttcccggcccggcgggaatctgccaccgatgccgccgtgctggcccttgtgctggagcgcggctatgcggcctgccccgatatgaccgccctgtcccgccgtctggccgagctgtacggcgcggacctcggcgttgaccttgccagcgcgggcaccgaccgcgtgctttccgccgacatctgcggcatcaaggacgcttacgcactggcgggggagaatctgaccgatgcctatgccgacatcgtgttcggcacgatctttgacccgtatcttgtggacggtgcctttgaccccgaggccgtgcgcatcgaaaccgaaacgcaggcccgccgtcttgaggcggagttcaactccaagcggctttactgtgtgcgtcaggcgcgccgtaaattctacggcgataccccggccggcatcgagctgggcggctaccccggcgagctgctccatgtgaccccgcaaagcctcaaggctgagtatgaccgcatcctctccaccgcatccattgatgtgatggtgcagggcgtggaggaggcccgcgtggccgatctgctgctgaaaaagctggagggcctgcaccgcgatccgcagccgtttgctgcccccactgcgatgcccgccacgccgctgcgccattttaaggaggagatccccggcttgacgcaggccaagctgtgtatgctgttcacgaccggcgaggagcaccccaacctgcccagcgtcagcatcctgcgcgttgcgatgagtgtgctgggcggctctgcgaccagccgcctgttccgcaatgtgcgggaaaagcagtccctctgctactattgcggctctgccgcccagcgggccaccggcgtcatgatgatcgactccggcgtcgaaccgggcagggagcagcaggccgaggccgccatctttgccgagttggaggggctgaaaaacggccccatcacgcaggaagaggtcgatgactgccgccgcggcctgctgtccagcatggacgcgctgggggacagccttgctgcgcttgaaaactggtactacggccagattacccgcggcgagccgctctacccgccggagtacggcaaggttctgaccggcgccgtcagtctggacgaggtgcgccagacgctgcagagctaccactattccgtctgttacgccgtgaccgccgagccgggcacgcaggggaaaggaggcagcgaggatgttgaataacgaccacgccgcttttgaggcggcccagagccgtgctgccgccgccgtaaactgtgaaagcgttgtactgcccagcggcctgaccgtgctttgccgcacgatgccgggctacagcagtgtacacgccatctacgccaccggcttcggctcgatccaccgcgccttcaggctggacggcaggcaggtcacgctgcccgccggcacggcgcattttctggagcataagatgtgcgagacgcccaagggcgactctttcaatttttatgccaagaccggtgcctcggccaacgcctttaccagctatgaccgcacctgctatctcttctccgccacgcagaagatcgacgaaaaccttgacattctgctgggcatggtcggcaagccgtggtttaccaaggccaccatcgccaaggagcagggcatcatcgggcaggagatcaagatgtacgatgacagccccgactggcggctgctgaacgcactgttccgctgcctgtatgcggaccacccgctgcgggacgacatcgccggcacggtcgagagcatcgccgagctgacgccgcagatgctttacagctgcaccaaggcgttctacgcgccctccaacatggtgctgagcgtggccggcaagatcacgctggtgcaggcggtcgatgcctgcaagcgcaacgggctttaccgcgcccgcgccccgcatgaggtcgagtgggcgatccccgcgcagagcggcccgctgccccacagggaggctgtctttacaatgcccgtcacaaagccctgcttcggtgtggcttaccgggaggagccgctggccgagggggatataaagcgggagctgctgctggatatgctgggggatctcgttgtcggcggcctgacgaagctctaccgccgcctgtacgatgaggcgcttgtcaacccggagttctcgggcgatttcatcgcggtgcgcggtgcctgcgccgtggcctttaccggcgagagcgataccccgcgcgaggtcgtggagctgctgcaggcagagatcgagcggatgcgccgtgacggtgtggaccccgaggtctttatgctggtgaaaaaccagatgtacggagagctgctgggcgatgtcgaggccgtggacgatgctgccgaggaggccgctgcggcctgcctgaagggccgcacgctggctgacgagatcgctgcactggctgagctgacggtggatgatgcaaacgccctgctgcgcacggccctgcgggaggaaaaccgcgcctatgtgcagatcgacccggcagaagcgtaaagaggggaaagataaaaatgatctatcatgtgcaatttcccgggttgggccttgacctgaccgtgaaccgggtggcgctgtccatcggcgggttcaatatctattggtacggcgttatcatcgcggcgggcatgctgctggcgatgctctacgccttccgcaatgccgtggactacggcattgactccgaccggctggtcgatgtggtggccatcggcactgtgatggccatcgtatgcgcccgcatctactatgtggctatggcgccctttgcctaccagagcatctgggagatgatcgacatccgcaagggcggcatcgccatctacggcgcggtcatcggcgcatttatctttggcgggctggccgccaaatggcgcaaggtgccgctgctgccgttgtttgatcttgtctcgctggggttcctcatcgggcagggtatcggccgctggggcaacttcgtcaatcaggaggcgttcggcacaaacacaacgctgccctggggcatgtacagcgaggggactgaggcttatctgcgatccgtgcaggtcacgctgcctgcgggtatgacggtggaccccacggccccggtgcatcccacatttttgtatgagagcatctggtgtctggtcggctttcttgcgctggcagcgttttacaaaaaacggcgcttcaacgggcagatcttcctcgggtatgtcatctggtacggccttggccgcgcatggatcgaggggctgcgcaccgactcgctgctcatcggcagcacggggctgcgggccagccagctggtggccatcggctcggtgctcgcggcagctgtgctgatggtcatcggcctgcgcagcgccaagggaaaaacgctgaccgtcacgctggctgtgagggacattaaaaagcaggccgaggcaggggagcggttcaccccggataccctgcctgccaatgcgccccacgccgagtttgtcaaggccaccgatgctatgaacgcgcgtctcgatgcgctggatttgaacaccgtggagatcgaagaaatagaaggaccgcaggaataaccggcaaccgcttgcagtacggcgataggtgctgctggtgtaagggctgacaccgctttgcccgccctgtgcggacaaaaatagatttgaaagagggaaagtatcatgggagcaaccatcattgacggcaaggcattggccgcagccacgaaggccgaggccgcagaaaaggtcagggagctgaaaagccggggcatcaacccctgtctggcggtcattctggtaggcgagaaccccgccagtcaggtctatgtccgcggcaagatcaacgactgcgcgcagtgcggcatcgagagccgcagcatcaacctgcccgccgataccacgcaggaggcgctgctggccgaggtgaaaacgctggcggaggatgccgccgtccacggtattctggtgcagctgccgctgcccgcccagatcgacgagaaggccgttattgacgccattccgccggagaaggatgtggacggcttttcgcccgtcaatgtcggccggatgcagatcggtgagccgtgctatctgccctgcaccccggcgggctgcatccggatgatcgagtccaccggcactgagatcgcgggcaagaacgcggtggtcatcggccgctccaacatcgtgggcaagccggcggcgctgctgctgctggccaagaacgccacggtcacgatctgccactccaagacggcgaacctaaaagaggtctgcgccgccgccgatattctggtggccgccgttggccgcgagggctttgtgaccggcgatatggtcaagcccggcgctgtggtcattgatgtgggcatcaaccgcggtgcggacggcaagctgcacggcgatgtcaattttgccgaggccgccgagaaggccgcctacatcaccccggtccccggcggtgtcggcccgatgacccgcgccatgctcatgctgaacacagtcgaggccgcagagcggcagggccgctaataaaggcttcccccccttgggggaagctgtccgcgaagcggactgatgaggggcaaccttgccattgcagcccactgatgggatacaaccgcagacttgcccctcatccggccctgcggggccaccttcagtctacgcgctaagagccgcctacggcggttgcgctccgacacgcgccagcgggcgcagcccctcgtgggaaggtaaaaattttaaccttcccacgcccgaaacccccttgacaactgcggtggttatatggtaagatactagagccgcatggtatgggctgtataagtgtgtgcatttttcggcacaccgccctacagaccagcgagacttattgaaagaggttatcacatgtacgcagttatcaaaaccggtggcaagcagtacagcgttaaggtcggcgacgttgtttatgtcgagaagctgaacgctgaggacaacagcgaagtcaccttcgatcaggttctcgccgttggcgaggagggctctgtcaaggtcggcgctcccgttgttgagggcgcttccgttgttgccaaggtcgtcaagaccggcaagggcaagaagctcaacatcctgacctatcgtcccaagaagggcagcatggtccgcaagggccatcgtcagccctacaccaaggtggaaatcaccgcgatcaacggctaaggaggtaaatcacaatggcacataaaaaaggcgtaggttctaccaagaacggccgtgattccgagtccaagcgcctcggcgtcaagcgcggcgacggtcagttcgttctggccggcaacatcctggtccgtcagcgcggcacccacatccatccgggtgagggcgttggcatcggcagcgatgacaccctgttcgctctggtcgatggccgcgttcacttcgagcgcatgggccgtgaccgcaagcgctgcacggtcaagcagtaaaaaaaccggtacgggcgggcctttgcggctcgctcgttttttgtagttatcagagaggtacacaatggcaaccagtaattttattgataccgccacgatctggctgcacgccggcaagggcggcgacggcgcggtgaccttccaccgcgaaaaatttgtggcggcgggcggcccggacggcggtgacggcggccgcggcggcgacatcatctttgtggcggacgataacctgtccaccctgatggacttccgctacaagcgcaaatacactgcacccgacggcgagaacggtcgtgccaagcggatgagcggtgcggacggtgatgaccttgtcatccgcgtgccgcgcggcaccgtgctgaaggaggctgagaccgacctcgtcgtggccgacctgaccggctctgagccggtggttgtggccaagggcggccgcggcggttggggcaacagccactttgccaccccgacccgccagatccccaagtttgccaagcccggcctgcccggtgaggacatgcacctcaagcttgagctgaaggtcattgccgatgtgggcctgatcggctttccgaatgtgggcaagtccaccctcatcagcatcatctcggcggcgcgccccaagattgcgaactatcacttcacgacgctgaccccggtgctgggtgttgtccgcgtcggtccggagcagagctttgtctgtgccgatattccgggtctgatcgagggtgcggccgagggtgtcggtctgggccatgactttttgcgccatgtcgagcgctgccgcctgctgctgcacgttgttgatgtctcgggctgcgagggccgcgaccccaaggcggactttgagcagatcaaccacgagttggccggcttcagcgctgagctggccgaccgcccgcagatcgtgctgggcaacaagtgcgacattgccaccccggagcaggtcgaggagttcaagagctatatcgaagccaagggcctgaccttcctgccgatctccgccgcgacccgtcagggtgtggacggcctgcccgcgctggtctacaaccgcctgaaggacctgcccccggtcaagatctatgaggcagagtacaagcgccccgacaagaacgcccagcccacccgccccttcacggtggagcgcaccggcgaccacgagtttaccgtcgatgccccctggctggagcgtatccttgccggtacgaatgtcgaggactacgagagcctgcagtatttccagacgcagctgggtgattccggtattctggacgagctggtcgcgcagggcgttgaggaagaggataccatcaagatcggcgaatatgagttcgattatctgtattgattatgctgtttgaaacgaaatctgaagttgacattcatgagatgtcgccgctggcactggcctttgtgggcgatgccgtgctggagctgctggtccgcgcccgtctggtgggcacgacccgcctgcagcccaaccggctgcacactgtggctacgcattatgtaagcgcccacgcccagaaccgggagctggagctgatcgagccgatgctgaccgatgccgaggccgccgtgctgcggcgcggcaaaaacgccagcaaggccacggtggccaagcacgccaccgtgcaggagtaccgcgcctccaccggctttgagtgcctgctgggctggctctacctgcaggggaagaatgaccgcattgaggaattgttcaacgcgatgtgggatggatataagccggagtaaaacaaaaagccttcccccttggggggaaggtggccgaggccccgcccgagggcggatgagggaaaagcctccgcaatttgcccggtaacgggttgtagtggcaaggccgcccctcatcagccgcctgcgggcggcagcttcccccaaggggggaagccttaggaaacccgcctcacttgcggctcttgctgttggtggtgttggtgctgttgttggtgcggctgttgctgctctgctgggtgcggttcgtggttttctgggtgctgtcgcttgtgcggttggtcgaattgtttgtctgattctttgccataggtggttgactcctttcgcaagtaaaaaagcgatctgcggcccttctgggctgcacaggtagtttgcccgcccatggcttttttatgcaaagggggccgttttggaatttccaaaggattttacggcgcgggaaaaaacgctgctgggggaccgctttgaggagctgtatacctacgccacggcgcagcccgcgcgcggtgtgacggtgaatacgctgcgctgcacaccggactggtttgcggcacacacggattttgccgcagaaccgtcaaaattctgccgtactgcgttcaccacggcggcagacttccgcccggggcggcacccgtggcaccatgcggggctgctctacgcgcaggagccgagcgcatccgcccccgccgccttgctcgacgtgcgccccggcatgcgggtggcggatctctgcgctgcgcccggcggcaaaaccagccagcttgcggctgccctgcaggggcagggcctgctgctggccaatgagtttgtggccgcccgcgccgagatcctgcgccagaatctggagcggatgggcgtgacgaacgccgtcatcaccaacgaggacacagccagccttgccaaagccctgcccgggcagtttgaccgggtgctggtggacgcgccctgctccggcgagggcatgttccgcaaggaggcggtggctgccgcgcagcacagtgatgcccttgttgcgcactgcgcggagctgggcgcggaaattttagaaaatgctgcggccctgctggccccgggcggcgtgctggtctactcgacctgcacctttgccccggctgaggacgaggcgcagatcgcagccttccttgcgcggcaccctgagtttaccctctgcgacctgtccggctgcggctttggccgcccgggagaagaaaaccgcgccccggctgggtttgcggcaggctgctgccgccgcatctggcctgccgacggcggcgaggggcattttatggcgaagctgcaaaaagccgccgatgccgaggttccgaacccgcccaaggtcaagcctcccaaagcggtaaagcccccggcggaatggctggaatttgccaaggcctatttcccggcgctggtatcccgcccgctggccggggcgggggagtggctgctgctgcccgcaccgggcagcgaggggctgaacaccgcaaagctgcgcattgtgcggggcggtgtgctggccggcagtgtgctgaaaaagcggttccagccggcccacgcgctctttatggcttatggcgcggactgcacgaaccgggaggagctgacgctcgccgacccgcgcaccgccgcatggctgcgcggcgaggagatcgacgctgccaccgcgcaaaacggctggtgcgctgtgctggtggacggcttcccgctcggcgggggcaaggtcagcggcgggcgcatcaaaaatcattacccaaaagggctgcgcaacctgcaataaagcgtgctgcccctcttgaaaagcacggcctgttgtggtatactattttaatggtaattatcggctttactgccgttgccttgtgaatacaaattagggggattttccatgtccggacatagcaaatggaataacatcaaacgcaaaaaggaaaagactgacggcgcccgcgccaaggttttcaccaagatcggccgtgagatcgccgttgccgttaaggagggcggcggcaaccccgcctccaactccaagctggctgcgctgatcgccaaggccaaggcaaacagtgtgcctaatgacaacatccagcgtatcatcaagcgcgccgagggcggcgataagacggagtatgaggcaataacctacgagggctacggccccggcggcattgccgttatggtcgagacactgaccgataaccgcaaccgcacggctgccaacatgcgccactactttgacaagttcggcggcaatctgggccagatgggctgcgtcggctttatgttcacccagaagggcgtcatcgttgtcgatctcgaggacaaagatcctgacgagctgatgatggacgcactggacgccggtgccgatgacttcgatgcaggcgaggaggccgctgaggtcaccaccagccccgagaacttcaccgccgtctgcgaggcactcgagcagaagggctacaagttcgtttctgccgatgtggcacaggtgccctccaccaccaccacgctgaccgatcccgatcaactggtccagatgggcaagctgctggatgcgctggatgacgatgacgatgtccagaacgcatggcacacccttgagaacgaggaagacctcgaccgctaaaccacagaatgcaaaaagagagtgaagggcgacttttgctctctttttttaatactgtaggggcgggccttgcccgccaagc

SEQ ID NO: 14018 - DNA, 4486 bp, Unknown
  gut microbiota DNA sequence
gcatgcccccatgccgccgttttgcctcccctttactcaaacacattttctgtatcttcggcttcgtgttctaccgggttgccctcgctgtcgatgccgcgcttatccagcgcgtagtgaacaaactcctgcgccagaccatagagggtggcaaagaccggcacgcccacgaccatgccgacgatgccgaacagatcgccgccgaccacgatcgaaaagagtatccacagtgccgagatgccgatggacgacccgaggatcttggggccgatgaagttgccgtccagctgctggataatgaggatcagcacacagaagatgaccgcctgcagcggatctatcagcagcaggataaacacgcttgggatcgcgccgataaagggaccgaacaccgggataatattcgtaatgccgataaacacgctgatcagcacggcaaaatcaagccgcaggatcgtcatggccgcaaaggtgataacgccgatgatggcagagtcgatgatcttgcccacaaaaaagcccgtgaagtttacattggcgtagtggcagatgcgcagcgtgttggaggccacctgctccggcaggaaggcgtgcgccagcgtgcgcagctggtgcagcagatggtccttgtccgccagcatgtagatgctggccgcgattgaggtaaagatcgccacaaagttggacgccacgctgccgatgctcgccacgatctgcggcatggcttcggttgccatcgcatagatttccttgaccattgcctcggaatcatcgagcattttggtggcctgctgcaggtcgatgccgtactcattctggacatagagcagcatattctgcacgccctgtatgtagctggggaagttcgtaaccagcatgacgatgctgttcacgatctgcggcacgaccagccagcccagcagcacaagcagcaggatcgccacggcgtaggccagcaggatggcaaagccgcgcgtgcccttcttctccttgaacagcctgatgtagaagaatttgaccatcgggtcaaggatataggcgatgacgatgccgcccgcaaacggcgacagaatcttgataaaaatgccgatgcgcccgaggaaataccccagattgttcaaaagcaggtaaaatgcaatacaggccccgaccacgcagaaccagtccagcatagactccggccttttggaccagatgtgtttttcgttcaaatgctccgcccctctttgtcataagatctgcggaatgaccgcattattgacattgtatgctatacacgggcgtattgcaatagataaggtgtgaattttcttcgggcggcagggctgcacccgctattgcgggggtgggtccttacgggcgggggcaccgtctgcatcaagaccgcgtgcggtcagcccggcccccaccgcctgccgggccagcgccgccagcacagccagcgtcggcacgcccagcaccatgccggggatgccgaaccacgccccgcccaccacgatggccagcagcacccccagcccgggcaggccggtggcgccgcccagaatacgcggcgcgataaagttgccgtccacctgctggactacaaagatgatgatggcaaactccgccgccttccacggggcctccagcagcaaaatcacaatacccggcaccgcgccgaggaacggccccagcaccggcacaatgttcgtcaccccgaccagcaccgccagcagcggcgcatactccagcccgaagatcgacataagcacaaaggtctcgccgccaaccagcagggcatcgaccagctgcccgccgagatagccgctgaagatatggtttgccagccggcagactgaaagcacccccgcagccgcaccgggcggcagggcggcccgcaggcagcaccgcgccgcctgcagaagctctgccttgccggacagcagatagatgctgacggccagcgtaacaaaggcatccgctgccgcccccgccgcaccggatgcagccttggccgctgactgcgccgccgtgcgggacagcgcagccagccagccctgcagggcgcgccccgcagcctgcaccagccgcccggcggtggccgtgtcgatgccgaaggttgcctgcacccaagccagcagacggcgcagcgtttcctcatatgcgcccagccgcccggcaaaggcggtcaggctctgcaccagctggggcacgaccagcgccgccagcagggccagcaccccaaacagcagcgcatagctgaccgccagcgccccgccgcgccgcccgccgaacagctttgccgcaaaaaagcgggtaggaatgtccagcacataggccagcaccagcccccagccgaacggcgcaagcagtgccagcagtcctgctgcggcgcgcagcagccccggcagctgccctgccgccgccagcagcagcgccgtgcctgccgccagtgccagccaatcgcccatggtgcggggcgtgcgctccaaccagtttttcattgcagtccctcccctttttatgctacactgtctgtaacgcatattatacggaaagccggtgcttttatgaatatcctcgtcagcgcctgcctgctgggcatcgcctgcaaatactccggcggcgacaacgcctgccccgccctgctgcaggccctgcggcagagcggccacaccctgattcccgtctgccccgaggtctacggcggcctgcccacaccccgcccgccggccgagcgctgcggcgaccgtgtcctgaccgaggccggaaccgatgtgacggcgcaataccgccgcggggccgaggctgccctgcagctggcccggctgtacggctgccgcaccgccatcctgaaggccaacagccccagctgcggcagcggcacgatctatgatgggaccttccgccaccgcagaatcagcggggacggcctgaccgcagcacttttgaaggccaacggggtgcaggtgtacaacgaggacacctttgcggcgcttctgtaaaattttttgcaaaatcttgacaggacaacggcagaatgttacagtgttcacaagatgatcctgcagaagggagcgttttccatgtggtttgatacaatactctggctggctgccatcgtcgcctttatctcggtcgaggccgccaccacggcccttgtctcggtctggtttgccgtgggcgcggcggcagccatggtcgtcagcctgttcaccgtcagcttcggctggcagctgctggtctttgccgttgtgtccgccgtgacgctggcgctgatggtgcccggcctgctgcgccgccgcggccatgcgcagccccctgtcacaaacggctcgccgctgaccatcggtaagcagggcgttgtgctggtggacattgagcccggcatgccgggccgcgtgcgggtggacggccttgactggcaggcccgcgccggtgtgccgcttgccaagggcacgcgctgtcaggtcaccgccgtggacggtgccgtacttatcgtagttcccgtgaccgccgatgcggccgcggtttaaaaaaggaggagactctatgctgttcatttttgcccttttgctcatcgttattcttgtggtgctggtgcgctgcatcgtcatcgtcccccagtccaacgcctatgtcaccgagtggctcggcgtctacaaggacacttggggcgcgggcctgcacatccgcaccccctttgtggagcgcatctcccgcaaggtttccctgaaggaggaggccgccgactttcccccgcagcccgtcatcacccgcgacaatgtcacgatgatgatcgacaccgttgtcttttttcaggtgttcgatgccaagatgtatgcctacggcgtcaaccgcccgattcaggccattgagaacctttccgccacaacgctgcgcgacatcatcggctcgatgacgctggacgaaacgctgaccagccgcgacctcatcaacacgaagatcacggccagccttgatgaggcgaccgaccgctggggcatcaaggtcaaccgcgttgaactgaagaacatcgagccgccggtcgagatccgtcaggcgatggaaaagcagatgaaggccgaccgcgagaagcgcgcatccattctgctggccgagggcgaaaagcaggccgccatcacccgcgccgagggcgagaaggagtccgccattctgcgcgccgaggctgtcaagcagcagcgcatccgcgaggctgagggcgaggccgaggccctgctgaccgtgcagaaggcgcaggctgatgccatccgcatgatcaacgaggcgaaccccaaccacaactatctggccctgcgcagcatggaggccatggagaaggttgctgacggcaaggccaccaagctgatcgtgcccagcgacatgcagaatctggcggcaacggtttccgccatcaaggaaatttccggcgaagtgaccgaataaaattcagcatcctttttccctgcctgcggtgttctgccgcgggcagtttttattgtag

SEQ ID NO: 14019 - DNA, 8475 bp, Unknown
  gut microbiota DNA sequence
tgaggttggcggcaatgaatgtaggggacgcccccttgacaaaggcagttagtctatgctatcttataactggttagaaaaaactaaccaaatagtatcgcaatgtcccattccgggcatactggaaaagagtattcatagaaaggattttgcaccatgagctatctcgaaattgaaaaggtcattggccgtgagatcatcgactcccgcggcaaccctacggtggaggccgaggtctggctggcggacggcaccgtgggccggggcgcggcccccagcggcgcatccaccggcgagtttgaggcactggagctgcgcgacggcgacaagagccgtttcggcggcaagggcgtcagcaaggcggtggagaacatcaacaccgtcatcaacgcggcgctggtcggccttgatgccgccgacacctacgccgtggatgccgccatgctgcaggcggacggcacaaaggacaagtccaacctcggcgcaaacgccatactggcagtgtccatcgcagcagcccgcgcggcggctgcctcgcttgagctgccgctctaccgctttttgggcggtgtgtccggcaacaagctgccggtgccgatgatgaacatcctgaacggcggcgcccatgccgccaacaccgtggatgtgcaggagttcatgatcatgcccgccggtgcgcccaccttccgcgaggggctgcgctggtgtaccgaggtgttccacgcgctgcaggcgctgctgaaggacaaggggcttgcgacctctgtcggtgatgagggcggctttgcacccgaccttgccagcgatgaggaggccattcagtatatccttgccgccatcgagaaggccggctaccagcccggcagggattttgtgctggctatggacgcagcttccagcgagtggaagggcagcaaaaagggcgagtacaagctgcccaagtgcggcaaggtgttcaccagtgaggagctggtcgcacactggaagcagctggtcgagaagtaccccatctactccattgaggacggcctcgatgaggaggactgggagggctggcagcagatgacgaaggagctgggcggcaaggtacagctggtcggcgatgacctgtttgtcaccaacaccgagcgtctggccaagggcattggcttgggctgcggcaactcgatcctcatcaagctgaaccagatcggctctgtttccgagacgcttgaggcgatcaagatggcgcacaaggcgggctataccgccattgcgtcccaccgctccggcgagacggaggacaccacgatcgccgatctggccgtggcgctgaacacctgccagatcaagaccggcgcacccagccgcagtgagcgcgttgccaaatataaccagctgctccgcatcgaggaggacctcggcgccgccgcgcagtacccgggatttggggcgtttaacatcaaaaagtgagcgtcagcgaggggagaaagtgcaggggccgatgcttggcatcgacccgcagaacggcggaaaagcggcggcagcccctatctccccacgcatctttcctgatttttcaaaaaatgttgccaaaacaacacacaaaatcctaccaatctggtataatatcttgggtcgggtgaaacgcacccggctgtccataacttaaaagaggtgcataatgacagatttcaaacagtgggaaggctttgaaggccgcatttggaaagaggaagtcaacacccgtgacttcatccagaagaactacaccccttatgacggcgatgagagcttcctcgccggtccgactgatgctaccaacaagctgtggggcgctctgcagaagctgcagaaggccgagcgtgccaagggcggcgttctggatatggagaccgaggtcgtttccagcctgaccgcctacggccccggctacatcgaccccgagctgaaggaccttgaaaaggttgtcggcctgcagaccgacaagccgctcaagcgcgccttcatgccctacggcggcatcaagatggcggagcaggcctgcacgacctacggctaccagcccagcgagaagctgcacgagattttcaccaaatactgccgcacccacaaccaggctgtgtttgatgcctacacccccgagatgaagaaggcccgccacagccatattgtcaccggtctgcctgacacctacggccgcggccgcattgtcggcgactaccgccgtgtggcgctgtacggcatcgactacctcatcaaggccaagcagaatgactttgccaactgcggtgacggcaccatgaccgaggagatcgtccgccagcgcgaggagatcgccatgcagatcacggccctcaagggcatgaaggagatggctgccgcctacggcttcgacatctcccagcctgccgccaacgccaaggaggctgtccagtggctctacttcggctatctggccgccatcaagacccagaacggcgctgccatgtccgttggccgcgtgtccaccttccttgacatttatatccagcgcgacctcgaaaacggcaccctgaccgagagcgaggcgcaggagctgatcgaccacatggtcatgaagttccgcatggtcaagtttgcccgcatccccagctacaaccagctgttcagcggcgaccccgtctgggcgacccttgaggtcggcggcatcggcatggacggccgttccatggtcaccaagaacgacttccgcttcctgcacaccctcgagaacatgggccccgcccccgagccgaacatgacggtgctgtactccagcgccctgcccaagaccttcaaggactacgcctccaagatttcgattgagacgtccagtgtccagtatgagaatgacgatgtcatgaagcctgtctggggcgatgactactccatctgctgctgcgtttccgccacccagaccggcaaggagatgcagttcttcggcgcgcgtgccaaccttgccaagtgcctgctctacgccatcaacggcggcgtggatgaaaagctgggcgagcaggtcggccccgcttacgcccccatcacggccgagtacctcgactacagcgaggttatggccaagtacgatgtcatgatggactggctggccgggctgtatgtcaacatcctgaacctgatccagtatatgcacgacaagtactactacgaggctgccgagatggccctgatcgacaccgaggtccgccgcaccttcgctaccggtatcgccggcttcagccatgtggtcgattctctgtccgccatcaagtacgccaaggtcaagtgcatccgcaatgagcagggccttgtcaccgattacgagatcgagggcgatttcccgaagtacggcaacgatgacgaccacgctgacgacatcgccgttgagctgctgcgcagcttcctcgagaagatcaagcgccgccacacctaccgcaactccgaggctaccacctcgatcctgaccatcacctccaatgttgtctacggcaaggccaccggcgctatgcccgacggccgcaaggcatacactccgtttgcccccggcggcaacccgagctacggtgccgagaccaacggtctgctggcgtccctcaactccgttgccaagctgccctaccactgggcgctggacggcatctccaacacccagaccatcaaccccgatgcgctgggccacagcgagggcgagcgcgtgaccaaccttgtgcaggtcatggacggctacttcgatcagggtgcccaccacctgaatgtcaatgttttcggcaccgagaagctgattgacgcgatggagcaccccgagaaggaggagtacgccaacttcaccatccgtgtctccggctacgcggtcaagttcatcgacctgaccaaggagcagcagctggatgttattgcgcgtacctgccataaggtcctgtgattttctaagctgaataaagcccgcagccgcggctgcgggcttttttgtggtatactattattgcaagggggcgtccccgctgccccgaaagcccctccggtcatcgcttcgctcgaccacctcccctgtgaggggaggctttctcgcgggcggagcccgcgcaaaaaggctccccacgcagtggggagctggccgagcttgcaaggcctgaggggctctgccgccttgcctttacactccccactaaaccaccccaaaaacggaggcaaacactatgtccgaaaccttaggctacatccattctgttgagaccttcggccttgtcgatggtcccggcgtgcggtatatcatttttttgcaggggtgcgccatgcgctgccaatactgccacaaccccgagacatgggcctttaccaaggacaccgccaagactccgcaggaggcctttgctgccgcctaccgctaccgcaactactggcgcagcaacggcggcctgacgatcagcggcggcgagccgctgctgcagatggattttgtcagtgaggtgttccggctggcgcacgccaaaaaggtgcagaccgcgctggacaccagcgcccagccctttgcgcccgacaacgccgactggatggcccgctttgaccgcctgctggaaaacactgacctcgtcattctggatttgaaagaaattgacgatgaaaagcacaaaaagctgaccggccacagcaacaaaaatattctggccatggcgcagtatgtggcgtccaagggcgtgaatttgtggatacgccatgtgctggtgcccggcctgaccgatgacgccgacggcctgcgcgcactggatgcgtttatcaggaccctgcccaccgtgcgccgggttgagatactgccttaccacacgctggggcttttcaagtggcagaatctggggctggcctacccgctggacggtgtgcgtgtgcccaccgccgaggagattgccgcagcggagcagctgctgcatgtccgcgactaccccgatgcgcccaaggattaaactctacaaaaatagtgggaattatttttgggaaaacgcttgacattacagcattagtatggtaaagtatatgtgtggttagcaactactaaccataaccaacctcgagcccgccggctgtttgcctctccggcgcggttcctgccaataacaggctgcgcctccgtttcggcgttttgctctgcgccttttgcggtctgcttattgcgttttgccccatcgttccctgctccggacgatggggctttttttatttgtgcgccctttataaaagggatttgtagggaggggtcttgacccctccgcagggcgtcggggacgccgccccctacaacatacaaaaattgggcgacccgaacagggtcgcccgttgctgtttatttgctgattctgtcgatctccgccagttcttcggcggtaaacctcgtgttctgcacggccttgatgttatcgagaatctgctgcgtcttggacgcgccgatcagcactgtcgtgatttcctcatggctcagcagccatgccagcgccatctcggccagcgtctggccgcgggcggcggccatctcgttcagcgcccggatcttcgccagcttttccggtgtgaggtccgtctccttcaggaaccgcccgtcggtgtgtacgcggctgtcggccgggatgccgtgcagataccggtcggtcagaaggccctgtgccagcgggctgaaggtgatgatgcccttgtgcaggcgggcggcggtatccttcaggccgttgctctcgatcgtgcggtcaaagatcgagtagcggttctggtttatgatgaacggcacatgcagctcgtccagaatggccgtggccttttccagcgtggggccgtcatagttggaaagacccacatacagcgccttgccgctgcgcacagcctgcgccagcgcgcccatcgtctcctccagcggggtgttggggtccatgcggtggtggtagaagatatccacatagtccagccccatgcggcgcaggctctggtccagactggccagcaggtacttgcggctgccccagttgccgtaggggccgtcccacatcacatacccggccttggtggagatgatcagctcatcgcggtagacgccgagatcatcgcgcagaattttaccaaaattccgctcggctgcgcccggctcggggccgtagttgttggcaaggtcaaagtgggtgatgccgttgtcaaacgcggtgcggcagagcgcacgcatgttctcatagggcgctgtatcgccaaaattgtgccacagccccagcgagacagcgggcagcagcaggccgctgtcgccgcagcggcggtagggcagcacatcatagcggttttgagcaggttggtacatggttgcggttccccctttgttttcggtatggttttgtctacattataaaagcggcggcccgcttttgcaaggcggcagcgggaaaaaatctgtgcaaaaatgcgcacaaatttttgggggattgacaaaaatccgaaatcggactataataatatccgaaatcggattttgaaaagaggcatcctatgcaggagaaacagcggcaggtatatgacctgcttgaaataacgaaccgccagttcaatgagtgcaacgccctgtaccacgcggtggcgcagcggtgcggcttgtcggacgcagcattctgggtgctgtatgcgctgcgcactacgcatgagccgcagacccagaaccgtatggcggtagagtgggggcagcccaagcagacgctgaactccgccgttgccgccatggtaaaaaagggtctggtggagctttgcccgggaaaaggcgcacacagcggcaagctcgtgaccctgacggacgaggggcgtgccctggccgcccgcacggtggagccggttatagcagccgagcagcaggccatgacccgtcagggccttgccgaggtcgagcagaactgccgcctgacccagcggcatctggaatgcttacggcaggagtttgaaaaaattgcgcggtaggggccgggcatgcccggcccgcagcataacggaaacagagaggtaaaggcaaggtgcagggccggacatgtccggcccctacatgcgtgtctgccgcaaaaacaggagcatttatgtcaaaagcaaaccagattcaactatccgaccattttaccaccgggcggctgctgaaatttacggcatcgcccattatcatgatgatctttacctccatctacaccatcgtggatggcttctttatctcgaactatgcaggtaaaacggcgtttacggcgctgaacctcatctacccgtatcttcagatactgggctgcctcggctttatgatcggcacgggcggcagcgcccttgttgccatgacgctgggtaccggcgatgaaaagcgcgccaatcagctgttcagtatgttggtggtcgcaaccgccgtgctgggtgtgctgttcaccgctttcggccttgcgctgttggagcctgtggccctgcggctgggcgcaacgccggagctgctgcccagctgcctgacctacggccgtattttgctgacatttcagacggcgttcatgctgcagtatctgttccagagcttttttatcgcggccgaaaagccgaagctgggcctcttgttcacggtggcagcaggtgcgaccaatatggtgctggacttcgtgctcgtcggcgtggcgggctttgggctggtcggcgcggcatcggccacggtcatcagccagatggtcggcggcgtggggccgatcttctattttatcaagcgccgccccagctgccggctgtatttcacaaaaccgctgttcagcctgcgggagttgttcaaggcctgcacaaacggtgcgagcgagctgatgacgaacatctcaatgtcgctggtcagtgcgctgtacaacatccagctgctcaagctgttcggtgcggacggcgtcgcggcctatggcgtccttatgtatgtgggctttgtgttcgcggcggtgttcatcggctatgcgcagggctgtgcgcccattgtcagctaccactttggcgcgggcaataaggacgagctgaaaaacctgctgcgccgcagcctgaccatcatcgccgtggcgggcgttgccatgctggtctcaagcgagctgctggccgggccgctggcaaaaatctttgtcggctacgatgcgggcctgctggcgctgacgatacacggcatgaagctgtactccatcagctttattctgtccgggttcaacattttcggctcggcgttcttcacggcgctgaacaacggcgcggtgtcggcggccatcagctttttgcgcacgctgctgttccagatcgtgtcgattttgaccctgccgctcctcatcggtgtggacggcatctggctggcggtcgttgccgccgaggccatggcactggtgtgtacggctgggtttgttgtgtggggacggaagaggtacgggtacctgtaaaaagataatagataaaagataatagataaaagaaaaggtggagtttgcgccc

SEQ ID NO: 14020 - DNA, 78374 bp, Unknown
  gut microbiota DNA sequence
gccccctgccgccctgcagccgctgtgcgccatcgggcgcagcacgctgccggtgtacatgctgcaccagccggtgctgtacggcctgctctgggtcggccacgctgtgacgggccgactgtgaccttgcagccctgcaaaccgggattcacggtttatttacaataaaattttcattttagcgaaaattgttgttgacagcaggggtgttaatatagtataatcttgtttactggttaatagtatttgaccggcaaactcctgtctcaggtcaagggagggaagaagatgtcggagatccgtgtcaaagagggcgagtccctcgagagcgctctgcgccgttttaagcgcagcactgctcgcagcggcgtgttagctgaggtccgcaagcgcgaggcttatgagaagccttccgtgaagcgcaagaagaagtccgaggctgcccgcaagcgcaagtttaagtaaggtatcttacaacgaacgactgtgcaggttcgcgttacgcgcgggcctgcacttttattttatcgccgcaaccaaccgctctcttaaaaaaggtcatatctatgattttaacccccgaatatatctttaaaaaaatcgagtgtatccacccggatttcctcgcggcgcacggcatccgggcgctggtgctggatgtggataacaccctgaccggggacaacagtcaggtgctggagccctccgtgcaggcttggctggacgagatgcgcgcggcaggcatcagcctgaccatcgtctccaacaacacgcccaagcgggtgcgcccctttgccgagcgcgtgggccttgcctgggtgccgctggcctgcaagccgttcaccatcggcctgcgggtggcgcgccgccgtctgggctgcaaaaaaagcgagatggccatggtcggggatcagatcttcgccgaccggatggccgccgggctttacggctgcccctgtctttacctgatgccccgcacgagccacgacaaaaacaaatttgtgctgctaaaacgcaagtttgaaccgtactggattgacaaatactatcagaagggcggtacgctgtatgaatgacaccccccgcttcggcacagccgggctggccgacagctacacggtaaaaaagttcgaccctgccgccatcgccgcctatacggcggacttcggcctgacggcgtttgagtaccagtgcgggcgcggtgtgcggctggcccacgacaaagccgccgcgctgggtgccgcctgtgcagagcgaaacatcgtcctctcggtccatgcgccctactatatcagcatgtcgagtctggaggaggacaagcggctgcacagcatcgactatctgctgcggagctgcgctcttgtcaaggcgctgggcgggcggcgcgtcatcttccattccggctcctgcggcaagcagagccgggaggccgcactggaaaaggcgctggacacgatggagcgcgccgtaaaggcctgcgatgcagcaggctacggtgactgcatcctctgcccggagacgatgggcaaggtcaaccagctgggcacactggacgaggtactggcactgtgcgccgtagacagccgcatcaccccctgcatcgactttgggcatctgtacgcccgcagctgcggcgcacagtttgccgaggccactgccgccgcggattacgccgccctgctcgacacactggccgagcggctgggtgatgaccgcgccgtacacttccacgcgcatttttcccgcattgcttacaccaagggcggcgaaaaatgccacctgacctttgcggataccgcgttcggcccgccccatcttccgcttttgcagctgctgaaggcgcgcggtctggcccccacgatcatctgtgagtcggccggcacacaggccgaggacgccgccgcgctggcccaaggctatgcagcgctgtaaatccggcaaaaaatatcaaatttcacgcaaaaatatctgtacaggacttgcaaaattgctttccatactgtaaaatataaacaggtatgtataatttatttatggaggaatttctatatgatttctgcaggcgaattccgtaacggcgtcaccttcgagcaggacggccaggtccttcaggtcgttgagttccagcatgtcaagcccggcaagggcgctgcctttgtccgcaccaagaccaagaacgtcatcaccggttctgtcgttgagaccagctacaacccgaccgccaagttccctcaggctttcatcgagcgcaaggaggtcacctactcctacgaggacggcgatctgtaccacttcatggatgttgagacctatgacgacatccccgttggtgccaacgatgtgcccgacaacttcaagttctgcaaggagaacgatacctgcaagctgctgagctacaagggcaaggttttcagcgttgagatccccaactttgttgagctggaagtcaccgccaccgagccgggtgtcaagggcaacaccgccaccaacaccctgaagcccgccaccgttgagaccggtgccgagatccgcgttcccctgttcatcaacgagggtgacaagatccgcatcgatacccgcaccggcgagtatatggagcgcgtgaactgatttaggttcttttttgccgggcatggccgtaccgccgcgcccggcatttttgataatagggaggattttgactatggctatggatctgaatgcaaaggccgcctacattcgcggcctgatgaccggtatggaatttgacgcagactccaaaaacggcaaggtcattgccgccatgatggatctgctggaggagatggccgccaccgtcaccgagcatgacgatgcccttgatcaggtgtatgacgagctggaaacgctcgatcaggatctggacgatgtcgtcagcgacatctacggcgatgacgaagaggatgacgacgaggacgaggaggagcacggcgctctgtacgaggtgacctgccccaactgcggcgagatctccaccctcgatgaggagaccctgatggaccccgagggcgatctggtctgcccccactgcggcgccacctttgacattgagctggagggcaccgaggaggactccgccgaggagaccgacaagcaggatcagtaatttttaaagtatgccaaaaggctcggtggataagcaccgagccttttatgctgaaatcaggagaatttcaaatgcctgaaccaatcaaaacagccttatccctggcagccgctttgctgtttctctggtctgccgtgtggtgcataaggcgcgtcttttcctcggagcccgccccgcactatacggagccttcatcgcgcagcagatgctgggccgccattgccggggccgcctttatccttgtccttcatctgatttttgccgtcacggcccatataaactatcccgaggctgattttcgtcaggcgatagaatggcagttctacggcaataccgattctcggcactaccttgacctttccatctatggctacggcacgcaggaggctttcccggaacagtatctccaaatcgtgtttttccctctgtatcctgcgctgctgcacattctccacttcgtgacccgtatcgacgccttctggctgggttttgcagtgcagttgccgctctttgcagcggccacagcatccttctacacagtaatcgcccgccgttggggcgagcagacagccgcattgtcgctggcgcttctattggccagcccggcatccgtgttttttgcagtgcccatgacagagagcttgttcctgctgcttacggtgcggtatgtgctgacgctggaacgcgaacaatggtggcgctgtgccttgctgggggtgctcgccggtctgtgccgtgcccccggcggtctgcttttggggctgaccggcctgtatctctttatgcggtggcggcgcggtacgcggcccacgataccgtccttgcttgctatgttgtccccggctgccggacttggcctttattttctgctgaactacctcgtatatgggcggtggaaccagtaccagatataccaatggaacaactggaaccagaagctggggctgttcaccaatactgtgcgctaccacatggactacatggcgcagtggtgggacagcagccccaaaagcgcccttgcgctatgcctgactgcggtgctctgcctgttgacaattttggcactgctgtctgccacggtgcgccgccttccggcgcactggctcggcttcggtcttgcctattttgccgtaacgatgggtaccacctggctgatcagcgccccgcggtacgcggtggggctgttctgtctgcccattgccttggcgctgcttttgcagggccgcccacggctcacaaagggtgtattggtaacgcaggttgtcgtaagcgttatctacacaatgcaatttctatacggctggcctatctattaaaaaactgcctgtctcccaaatgcggagacaggcagttttttgattcagccatttcttacttcttctgcagtgcgccctgcagcataatgtcaccgaaggacagtgcattgtacaggcctaccttgttagcctgacgggcgatgcgctcaggcaggggcttcgactcatcggtggagagcagcacaatatgaaccttatcggccacatccacaccattctccttcttggtgctgagcacctgcagatagacaacgaacgggtccttcatcgagccatagtaaatatcgttgccgcagcgcaccagcgggcggcccttataggtcagcttcggggtataagccatatctgaaaccttctttctgtttaatcaatactttattatagcatatattcaaagggattacaaatttttatcgcaaatgctttctgccggagaaagcattttttacagatccagcttgtcccgctcgaccttttcctcgttcagcgccacctgctctgtcaggatgcggaccttgctgtccagctggctcagccggatcgacataaaaaactgcttggccagcaaaagaaagatgatgacaacataaacaaagttgatggggctcatgaagcccaacaggtttgcagcccaataggcgatgccggggaagatggccagaatcagcagcgccgcgctgaacagcagccagaagattgtatcctcgatctgtacctttgccagccggacacgccgcaggatataccccgccgtgataaggctgcccaaaatcaggcagatgcgaatgagcgtttgatcgaacatttcacaggctcctttcggggtagggggtctcggtgtcgcgcttgcggaaccactggatcagcaggatggagatagccattttgaccatatactgcacgctgcgccagaaggtcaggtagctttggccggccatccgctcgcccatctcgacctgcacctcttttacagtcgcgccgttcttgatcaggtagctgatggtgtccggctcggggccgtagttgaggttctgggcaaactcctcgaccatggcgcggttgaacatccgcatgccgctggtggggtcgcagatggcgcggcccgttgtcaggcggatggaccagctgatgatatagctgcccagcatccgcagcgtcttgggctttttcacggtcagaaaacggctgccgatgacaatatcgctgccctgctcaagctcgttgagcatcgcctcgatatactgcggcttgtgctggccgtcagcatccagctgcatggcgcagtcgtagccgttctccgccgcaaagcgcaggccggtctggaatgcccccgccagccccagattgaccggcaggtcgatcaggcggtagccgcgggcgcggcagatggctgccgtcttgtcgcggctgccgtcattgacgaccacatagtcgtactggggatagtcggtcgtcagttcctcaacgacctgcacgatattggcttcctcgttatgggcggggatcacaatgagtaattttgacatcttagctccttttggcagactttacgacttccatcattgtagcaaagacagcctgccatgtaaagtggctgcaaaggttttggtaggcgttctcggcacgggcctgcgcggcggccgggtctgccagcagggcggcaagcccggcgcggatcgcatcagtgccggcatcgggcaggaagatcgcgtagttctccccgggcagcagctctccggtacccgccgtgcgggtcgtcacgatggggcagcggcaggccaccgcctccagcagcgtggtagggaagccctcggcatactcggtgggcaggcagtaggcatctgcctgtgccagcagctgaatgatcgcatcgtgcggcagcgcgcccagcgcatggacccggccgcccagtgcggccagcacggcctcctccgggccggtgcccgccacagccagtgtgcaccccggcagggcctgcacagcctcggcaaggcgcagcgcgcctttttcggggatgagccgtccgataaacgcaatgagctttccgtccgcaggcaggtgcagcttttcgcgccagtttatggcaccctccgcatgggccagcctgtccagctcaacagggtccacagcgttcggcaggcggccagccgcccggatgccgaaggtctgcagccaacgacagacatccccggacacgccgtagaacgggaacccgcagcggcggatgctgccgcaggcaagatgctcatacatccggcccagcgccccggtcagcccgccgtgcatcatatagccggtcgagtggtcgatgaccagcgccgggatgccgcgccgcttgcactggtgcgcagcccagatgctctgggggtacatgcgggtctgaatgaccgcaaagtcgatgtcctgcgcccacagcgcatcggcgggggcaaagggcttcagcaccgggaagcgcccacccatgaccggccatgacggcagacggaagatctcgatgccgtcggcatcggtctgccgcgcgggcaggcccggcagcgccgccgtaacaacaagcgccctgtgaccggcggcaacgcaccgccgcgccagattccatgtgtaccgctcgactccgccgggggtggggagatattgggttgagaagaagcaaataaccattaccgttggccttttcaaaataacagataatagataataaatactgtggcgttttcgcctgaaggcgaaaacaaaatttttgccgtgccgcaaggcgcggcttattttttatttgcaggattttaccttgcaataatcgccagcatactattcaccaccacgcccgcctgtacaagcgcgattgcaatcgtcagcttgtcctgcgcggcgccctcatcgggcaccgtagccaagcggcggggcaggcaggccaacagcagcagcggcaggatcggcaaaaagtaccgtccctgcaagccgtacagcgtttcatagcggatcggtgtccagagcagacagcccgctaccgtcagcaggcagcagagtgccgccgctgcgcagcaccagccccgggccctgcccgtgagcagctgctttgcgccctgcaccggcagggctgcgtaggccagcagcagatacagcacagcgacccagccccaggccagctccaccgtgtaatagctcaggctgccgccgaccagcgtgcggatatagtgatccccatttttgacggcactgcgcacaaacagcagtgccgtggctgccgggtgccgcaggatatatcccggcgtataggtctccttgtcgcccgcatccaccgtgctttgggtagcgcgggtggcgcgggccgcctcgacctgctccgcaagcgccgtgcggtcaagcgggatgcggtcatccatcgcgccgacctcaacgcccagcccggcaaactgctcctgacagctgggcaggctgaacagctgcttgtacgcctgcaccgcgccgccctcagcaaaatagggcaggtaggcatctgcattacccaccgtcacatcggtgccgaacagcacgagcgatgcctcggtatagaacgcctgcgcgtccgtgtaggtgttggccttatccgctgcaaaaaggaagctctgtcccagcacggcgggagtcacatccttctcgcgcagagcctgcacccagaagtccacctcgctcttggcgggcgcggcgttatcctccacataatagtatagccgctttacatagttttccagcgagttctcgttgatttgtgcctcatactcccagtcggccggtgtcggcgtacccttggcggcgcggtcactgccggccggctcggccgctgcggctgcaggctcctgcaccgtaccggtgcgcagcgtgtcggtcagcaggccgctgttcagcaccagcgccagcagcaggcagacagccagatagccgcattttttcgccttggcatggcggcccagccgcgcggcgggcaccagcagcagcagcgctgccagcggcagatagacaagcttgcccggggccagcaccacgccgcagagcagcagcgccgccagccgggcaggggagagcgccttgccccggtcggggccgaaggctgcatcgagcaacagcgccgtaaaggcaaagctgcaccccagcagcggggcatcccggctgaagctggccgccagatgcagcgtcatcggcagcagtgctgccgccgtaaacacccgcttgccgaagggcgccgccctgacagccagcgccgccagcgccgcaaacagcagtagatttgccagccggcccagcagcagcgcgggggcgaaccccaggtgcagcaggtaggcgagaaagaccgccgccgcgctggccagatagagcagcgggttctggtcggtctgcagctcgttgtactcctgatggctgtcaaacggctcctcggtcgtggtcaaaagctgcgaggtgaacgcctcccatgtaaacacggtcgtgttttcgttctgcaggtcggcgtcctcgtcccccacacggcggaaggtcgttgtcgtggggacccggcccatccgccattcctcgcgggacagatcattggcccagcgactggcaagggtgaagctctggttgatatggtatttctcatccggtgcggcgtagggcggcagcacaaagctgtacagcagcccaaagcccagcaccagcacaaacacaaggcggtgcagcgccagttttttgccaagcactgcccagacagcgaacgccgccagcacggcagcaaggcccgccacaagcaggaaaaaccgcgtcagatagccgccgatgcgctggtaggtgatttgcatcgccatcgtgccgtccacagcgcggccgctgaccgacatctgctccttccagagtgccacgccatcgctgtggcccacagcaaggatcgcatcggtcgtgtaatggggcgtaacggtcagccggtagcggcggccctcctggccggtcactgccgggtccagccccagggtcgtatactggtcaggcacaatatagtccatcgtgcctaccgagcgggacagctctgcgccggtatcggcgtcatagagcaccacctccagcgcaccgctgggctgctccccgggcaggtaaaactccagcccgatcgtcagcagatccttgtcgtaggtaaacacctgctcggcggtctcgccgtcatggatcagctctgcgcgcagaaaatctgtaatgatctcgctgcggcccttcgccacctgcgggcgcacctcggccagccagagcagcaccaccgctgccagcagcacaatgagcgtcgccagcgcggccaacaagggggtatattttttttgttttggatttttcatgcaatctcccgcaaatgcgaaatcacaacgccgcgccgaacgccttttccactgcagccttccagcgcccgtcgctgcgcaaaattttctcgacagcgccgcgcacggcaccttcgccgccgcgctggaggcagatataatctgcgcgggcctttacctcctcggcagcgtccgccgggcaggccacaaagccgcacagcgccatagccgccagatcgttgaggtcatcgccgcagtaggcggtctgcgcccgggtatagccgttttccgccataaatgcctgcagaaatacggctttctgcccgacattctggtatacatcggtaattttcaaatcggtggcgcggcggcggacggcctcgctctgccgcccggtgcagatcatcacgcggatgcctgccgtgcgggccagtaccagcccggccccgtccttgatggcaaacttcttcatctcattgccggtggcatcgtagtaaacgccgccatcggtcatcgtgccgtccacatccagcaccagcaagcgtatcatagtcaggccctctcatactcactgggggtgatgaaccgcaccggcagccccgccgcacggatggcaccggccatctgggcattgtaggctgcaccgcggcctgtgtgggtgtgcaggcccgcatcggcataggccgccgtgcctgtgcggtagccatcggcaccggccagcagcacgcccgccgcgccgcactggcgcagcagccgcagcagcatcagcacactgttgccgccctgcgcatcggtggcggaaagccggtcataattcacaacagcggcatccttatcagcgcgcaggttgctggtcaggatcagcgggcaggggtaggctgcggcctcatcaaagcgttttgcgttggtaaagaaggcgtagtccggccgcataaagtccggcacaaagttggcagataccgtcacatcggcagctgcagccgccacagcggcacggcctgcctctgcagcaaggctggcaccgggggccagcaccagcaccgtcttgcccgcaaaggcagcctgcagggcagccagcgcggcagtatcatcggtgcggcggttcttgtactcggtgtacagggcatcagcgtaggccgcatcgaacaccgtctttttgtcgggggcaatgtccgccagaatatggttgatgtcccggttggtcagatcgcccttgccgaggtaatgctccgcatagttgcggtgcagattgaacttggccgacaggaaatacgccggtgtatagccccatgcgcactcccccttgatgggcgcaatgtgatcctgaatggcgtccatcaaatcatcaatgttgtagtggctgccgaaatactcgttcatataatcggcgatcagctcgatcggcaggttgccggggatacggcccatgcccatcaggctgccgtccacagccagatcgcggcgcaggtgcttatccaaaaactcctgcgccagacagaagctcagggccatgttctcatgcagatgcagcgccaggcggatgtccggggccaaattgtggtccgccatgctgacgatgcgctccagatcgcggcggcgcatgctgccgaaggtatccacgatggagaactgccacgggtggatggcgttgacctgctcaaagatccagagcagatctttatcgctgtagcccatgatgttgatggggttgatggagaccttgtagcccaactccttgatgcggcgggcaaagtccatgccatctttaatgtcgtaatcgtgcgcggtgatgcggatgatctcgatgccgtgtccatcgtagggggacagcttttcgatgtcgtagttggagcgcatcgccatgccggagtacatcgtgcggccgcgctggctctcgtcaggcagcaggcggttcagctcctcgatggtgttgcagaccgtgacatcgggatcgtagccgtccacattgcgcaaaaagcccacctcgaccacatcaacgcccgcgcgggtcagcgtctggatgatgcgccgtgcctgcccgaagccccactgccagtcattgacatagccgccgtcgcgcagggtgcaatccagcaatttgatatcagccatgctgcttctccttcagaatttcattgaccagcgccagatccttgggcgtatccacactgaccgtcttgtatgggctgacaatggcatgcaccttatgtccattctcgataaagcgcatcatgtcgttttcctcggccttttccagaatagatttcggcgtatcatggtaaaatttcagtgcctgcttgctgtacagctggataccggtcaccttctcgtactcaaaatccagcgtgcccttcgggtaggggatggggctgcgggagatcagcaggatctcccgcgcggcgttggtcacgaccttctggttggaaaaatcaatgacatcagccgggtgctccataatattggtcagcacagcgacataataagggtcatcgggcagggtgccgggcagaatcaggtcaaaggcagccgggttcaccagcggctcatcacccatcagctgcagatacaggtcggcgtcctccacagtgctgacctcccagatgcggccggtgggggtgtcgtggtcgggactggtcatcagatatttcatagtatacttcttgcaggcctcagcaatgcggtcatcgtcggtggcgatcagcacatcgtccagcttcgggcaggccttggcggccttgtacacccaccagatcatcggcttgcccagcacatcggccagcggcttgcccggcatccgggtactcgcataccgcgccgggatcacagcgattgttttcatatgtgtacctcgcttacacggcggcctgaacagccgcctctatcgtttggcatacgccgtcaaagcggcggtctatgtccaaattggtgaaccgcagaaccctgatatggttctgtgcgaaaaactctgtgcgcagactgtcggtctgctgttgctcgggcgtgtaatgctgtgccccgtccagctcgatgacaagccttgcttttgcgcagtagaaatcagcgatatagccgccgatgggcttttggcgttggaagcgcggggtgaaggtgcggagaaagcaataccacaatttacgctcccatggggtcatatctctgcgaagctgctttgccagcggtacgttttttcgattgtagtaaagcattgcgcatatcctttcacgggtgcctttgggaaggttctctccctccggcgctccgcgccacctccctcgcagagggaggcaaggcgccttggccccctctgtgagggggctccgcccgcaggcggtgggggagagaacctcccggccggatgccgttttccccgcacatcagaccagtttcctcgcctcgtccagtgtcagcaggattttttcttcggcggcggtaaagccgcgcaaaacaaagctctgtaccgttacggcgcgggcaaaggtaaacggcaggcaaaagttcagcacctcgctgggcattgtgcgctccagcacgaccgcctcggggaaaagcgcctgataatcagtcgcatcgcgcgggtgcgtcttgataaacagcggcccggctgcatattttgccgccaccgccttgaacatcgcgtcctgctcgttttgggtcatcaggccgtccgccacaaagctgcggggcagcaaaagcgtggcaccctcggccttttccggcaggggcctggtcagaaacacgcggcgcaccattgctttttcgtcctcggtcaggctctgcagcagcgcagccttgctgtcggtcaccatgcggtcggcagcaaacagcgtacaccgcgcggcgtcctcactctccacgcagcggcaccacgggctgtcaccccagtagaggtagccttttccgcgctgcttcgcggcgaaatcggccgccgcgcgctggtcagtcaccagatgctggtcggggccgagcgtactgccgaaggtgtcctcacagaggatatacccggcgcggcagtcctgcaggtagcggcccagcacactccaatcgttgtggatgtagacattttcatacgctgcacggtcaaatttccatccacacagcttttcaaacgcccgtgcggcccgccagtgagcaaagaggccggtcacagtgccgggccactttgtttcctcgacaatgaccgtcttgacaacaccggtcgcgtccagacgtgccgccagcgcggcggtgtcgggcacagatgcggaaagcaccatcgtatgcggcccattttcacaggcgcagcgcccggcccgcagcaggtcaacaagcacctgataggccgtgtggcagacgtaaagattcggtttcatgcgttactcctgcacgagcttgacgggcgggaagtggatgcgtccccagccggacgcccattcgggcatcgtcaggtcgctgttggtcacttcaaaggcgaactcggtcacaggcttgtccagacagaccgcatgggccagcgcgccgtcaaaaatatcgagatagaagaaatactgtccctcacccagcaggctcgggtcaaactcaaacactgaggtatagacccggcccggctcggcagggccgaggtcaaccgggtgggtgatgcccacgggggaggagtcccgcgcgtggaggttcatcttcatgtggatgcccgcaaacggctccgacacgcgccatgtgatcttgacgcgcatcttctcggtgtccgcaaagacgctggactccttatccacaaagtcgagcgtttccagccggaaccgcttaccggcgctgccggtcatgcgggcaacctcggccaggtcgtagtggaccacattcacatcggtcgtgtccatatagacggcaatggcctgctccacatctccgtcaaagatgaccttgcccttgtccagcacgacacagcggctgcagagctggcggatggtggacatattgtggctgacatacagcaccgtgcggccgtcctgattggcaacatcgctcatcttgccgaggcatttctgctggaacttcatgtcgccgaccgccagcacctcgtccatgaccataatttcactgtcgaggtgcgcggccacggcaaaggcaagtttcacgaacatgccactggaatagcgcttgaccggcgtgtcgataaagtcaccgcactcggaaaattcgatgatctgcggcagtttggcgtcgatctcggccttggtcatgcccagaatcgcgccgttcatatagatattctcgcggccggtcatctcattgttgaagccggtgccgacctccagcatcgaggccacgcggccgcggattctgatctcgccctcggtgggggccgtgatgcgggacagcagcttgagcagggtcgattttcccgcgccgttgcggccaatgatgcccagcgcctccccctgatagaccgtcaggtccacgccgttcagcgccataaaggtctggccaaacagccgctggtcggtgccgatgacggtgttcgggtcctccttgccgcgcacgcgcgcccaccagctctgcaggtcgtgcgtcagcgtgccgccgccgatctggccgagcttgtactgttttttcaaccctgtaacctcaatggcagggcgtttttcggttatcgacataatacgccctccctcagacggtatccataaaggttttttcgatgcggctgaacagcacgacacccagcaccagcgcggcggcggtgaacaccagactgtacacgatgccgaagatcgtgaccgtgccggtgcccagcgtggccatgcggaagatttcgatcggggaggtcatggggttcagctggaccagcacgcgcagccgggggctggcgtccagcatcgacagcgggtagacaacgggggaggcgtacatccaaagctgcacgccgaagcccacggcaatggcaaggtcgcggtattttgtcgtcagcgaggatacgatgatgccgacaccgaggccgagcagcatgacctccagaatgacaaagggcaccgccagcacccacagcgtaaaggccacgccgctgccggtggcaaaaaaccacacccagaaaatcagatacattgctgcctgaatgccaaagttgatcaggctggtcagcacctgactgaccggcatcgtcaggcgggggaagtaaaccttgccgaagatctgcgagttcatcacaaaggtgttggccgtgttgttgacgcagtttgcaaaaaaagtccagaccgtgttgcccgccatgtagaacaaaaagccgggcacgccatcggtaggcatgttggccatgccgccgaacacgatattgaagatgaccgtcgtgatgagcgggttcaggatgatccacgcagggccgaggatcgtctgcttatacagcacggtaaagttgcgcttgacaaacatcgtgatcaggtcgcggtaacgccagagttcctgcagatcaatgtcgaaccagccggtccgggggcgtataacggtggtccagccctcctcggccgggcgggtggtttgcaaattttcagccataaaaatacctgttccttgtgtgtatgatcgtgtttgcacagttatccataataatagtgatattttaccacatttcgcgcaaagaatcaacttgccgcggcgtttataataacagcagcatatagttacgcggtgaaaggcaaatgggcgtttcccgcaaggctgcgggccgcacatgtgcggctcctgcagggcagcaataaagcggcctgccgaaaatccatcggcagaccgcttttatacatgcactattttacagcaccttcgacaggaaggccttcaatctctcgttttcggggttggcaaagaactcctgcgggggcttatcgaccttgacgatgccctcatcaataaagatgatgcggttggcaacctcgcgggcaaaacccatctcatgggtgacacagaccatcgtcatgccgccgcgggccagctccttcatcagctccagcacctcgccgaccatctcagggtccagcgcactggtcggctcgtcaaacagcagcacatcggggttcatcgccagcgcgcgcacaatggcgatgcgctgcttctggccgccggacagcatattggggtaggtgtctgccttgtcggccagaccgatgcggtcaagcagctccaatgcctttttatcggcctcgctctgcttcatcagccccagacgcaccggtgccagcgtgatattcttcttcaccgtcaggtgggggaagaggttgaaatgctggaacaccatgcccatcttctggcgcacatggtcaatgtcgtggtcggtgacttccttgccgttgaagatgatgtggccgccgtccggctcctccagacggttcaggcagcgcagaaaggtagatttgccgcagccggaggggccgaccagcacaacgcagtcgcccttgttgatcgtcagatccacgcccttcagcacctgaaggccgccgtagttcttctgcagtcctttaacgtctatcactttgcgccagcctcctctcaaattttgccaacagcgcgctgaacagcatgaccagcaccagataggtcgcagcaacgccgagcagcgggaacatggcctcataggtacggttcatgatgccctgcgcggcatacagcagctccttgccgccgatgaccgtgatcagcgaggagtccttcagcagcatgatgaactcattgcccagcgcaggcaggatggagcggatcgcctgcgggatgatgatctcaaacatcgtggtcatatagttgagaccgaggctgcggccggcctccatctggccgggatcgaccgccatcagaccgccgcggatgatctccgacacatacgcgccggagttgatgcccagcgccagcgcgccgaccatcgtgaagttgcggctgctggcaaagatgaccatgctcatgataagcagctgcaccatcatgggcgtgccgcggatgactgtgacatacacctgcgccactgcgttgaaaattcccagaatcgggttgcggtggtggggcttctgctgggcatagcccacgcggatcatggcaacgatggcacccagcacaacgcccaacaccagcgcaatggccgtgaccagcagggtcgtgccaacgcccttgatatactgctgccaccggtccgcatacaaaaatgcctgatagaattttacgaagaagtcctggccgaagctcagctgctggccgcttttggccaactccgagagcgcttcaaactgcgcctccatccgcaacacaacctttcttttttgggccgctcctgtaggggccgggcatgcccggcccctggctttccggcaagcttctgcctgccggagggttgcgggccgcacatgtgcggcccctacaaagcggcaatgattttacatgatattgctgattataccatacttatgggaaaaatcacagcataataaaagaaaagcgcgccgggttccggcgtgcctttcggtaaggtacaaagcgcttattcagcggtgatgtacttgcccacaatggcctgcagggtgccgtcagcctcgagctcctcgagcgcgccgttgatggcattcagcagctccgtgttgcccttggcaacaccgatggcgtaatcctcctgcgcataagcggtgtcgaggatcttcaggccggggttggccttcacgaactccttggcgggagcgttgtcaatgaccacggcatcgacctgaccgttgaccagtgcctgcacggcagtcagaccgctgtcatagggggtgacatgatcgtcaccgaaatcatcggagcagtagatgtagccggtggtgccgcgctgggtgccgatcatcttatcggccagatcatcgggagaggcaatgggggagtcctccttgacgatgatggactggatgccctcagcgtaggtgtcggagaagtccattaccttcaggcgctcatcggtgacggtgacgccggccatgaccatgtcgctcttgccgttctgggcggccagcagggctgcgtcaaagtccatgtcatcgacctgcagctccagaccgagcttctctgcgatagcggcggcgacatcaatgtcgatgccctccaattcaccgctgtcggtcgtcgtctcatacggggggaactcagcgttggtggacatcgtcagcttaccggcgttgacagtggtcagctcggcagcctcggcgccagcctcagaggtggcctcctcgctggagacagcctcggaagaagcggcctcgctggaaacagcatcgggggaagcggaaccgccgcaggcggccagactcagcatcatggcggagctgagcatcagagcagtaatctttttcatgatgatctcctcgattcattgtatctcaagtatctcaatgtttgtaccttcccaagccctcacttggttgatgtatacagtataactgcataaatatgtaaagtcaatgtatatttagtaacttcggcattttacatgggcaaggcaggggagtggaaagttttttgtgcaaactggcggaggtatgtatgtagggctgggaatcaaagcatccaaaaattccctcttgacttcaaaacgcacttgtgctataaatatcttaacttcatcctgtacaaagccatgaggcagacaaacgggatgcggtgccttgtataagagagaaccgccgcggatcctccgcgtggtgcaagcggttttacagcggcccgcagccttaccactgccgagcgcgggggcgaacctccgccgggtacggcccgttacagccggcttgagcggcgctttcctttattaaagcaaggcgcaatttgggtggaaccgtggagcttttcaatgcttcatcccttgtatgtcgtaagggatggagcattttttgtttgcagctatgcaaaaggagcgtacaaccatgaagatcatctacaaggacggcaccgttgccgagtgcccgcaggaagaagaactgcatgttctgcgccacacggcagcccacatcatggcccaggccatcaagcgcctctacccgcaggcggactttgcctttggccccgcgaccgagaacggctttttctacgatgttgatctgggcgacaccaagctcagcgatgaggatctggccaacatcgagaaagagatgaagaagatctgcaaggaaaatcttcccctcaagccgttcatcctgccgcgtgatgaggctgtcaagctgatggaggagcgtcaggagcattacaagatcgagcatattgccgacctcgctgacgagaccgagttcagcttctatcagcagggcgagtatgttgacatgtgcatcggaccccacctgtgctacaccaaggcactcaaggccttcaagatcacccagcagtccggtgcttactggaagaacgacaaagagaacaagatgctgacccgcatcaacggcgttgccttccgcaatcaggaggagctggacgcctgggagaagcagcaacaggaggcccgtgagcgcgaccaccgcaagatcggcaaggagatgcgtctgttcatgacggacgacctcgtcggccgcggcctgccgatgttcctgcccaacggctacaccgtctggcagcagctggaggagtatatcaagggcaaggagcgcgagcgcggctacctgcacgttatgaccccctgcatcggcaccgtgaacctgtacaagacctccggccactgggatcactaccgcgagaacatgttccccgccatggagatggagggcgagagctacgtcctgcgcccgatgaactgcccccaccacatgatgatctacgccaaccagccccacagctaccgccagctgcccatccgcatcggcgagatcgcccatgacttccgctatgagtcctccggcacgctgaagggcatcgagcgcggccgtcacttctgccagaacgatgcgcacctgttctgcacgccggagcagatcaagagcgaggttgccaatgtctgcgcactgatttttgatgtctacaaggacttcaacatcacggattaccgctgtgtgctgtccctgcgcgaccccgccgacaagaagaagtaccacgacgacgacgctatgtggaaccatgctgagaacgccctgcgcgaggtgctgaccgagctgggcatccacttcaccgaggagatcggcgaggctgccttctacggtccgaagctggatgtcaatgtcaagcccgccgtcggtgccgagtacacgctgtccacctgccagctggacttctgcctgcccgccaagttccacctgacctatgtggacaaggacggcagcgaaaagacccccgttgtgctgcaccgcgcgatcctcggctctctcgaccgctttatggcttacctgattgaggagaccaagggccgtttcccgacctggctggcccccacgcaggtcaaggtgctgcctgtcagcgaaaagacgctggactacgcgaaggatgtcaccgccaagctgcaggccgccggtgtccgcgttgtgctggatgaatccaacgagaagatcggctacaagatccgtcaggcccagcaggtcgaccgtgtgccctacatgctggtgctgggtgccaaggaggtcgaggccaacaacatcagcgtgcgtgaccgcaagggcgacaccaccacgatggagctggacgccttcattgctcaggtcgttgacgagatcaaaacccgcaagaacaatagctgagtaagctgaaacaacaaccccgccgccaccctgaaagcaagggatggcggcggggtttgtttttggtgccagctgtttacccgcccgctgcccggcgcgcctttcggcgatactctgtcgggccgcagccgtagacctgccggaacgaccgcgcaaaatagctgccgtcctgaaagccgcactgcccggcgatctcggtcacgctcagaccggtgccgcacaaaagctctgctgcacgctgggcgcgccggtcccgcagatactggttcggcgttgtaccgatcatatcatggaagcaccgcaggcactcactggcgctgatggaggcgctggccgcgatttgatcgaccgagacatcctcggcgtagtgatcctgaatgtactggagcatccgcttgatgcggtcggcactgcgcagcgcctttttggggataggccgggcggacggcgcatgggtcaccagctgccagatcatctccgacagagcggcccgcgccttgaactcatagcccggcacctcattgacgacggcgcggtaggcctgctccattgcctccagcgcctgccgctgccacgggatctcccggtgcagcaccgcgcaggggcgggtagggtcggtcagcagcggctgcagatacttctgccagaatacactgtcggcgctgccgcccaccagccgcgggtgaaacaccatgctgcgcagcctgcaggggacggccgatacctgccagtcggcatgcagcacccccgcattgataaaaataccgtcaccgaccggcagcgcgcacttttcgccgcctgcggcggccagcaccgtgccctcggtcacgaccagcacctccaggtcctcatgccagtgccatggcaccgggtcaatctcaagctgatcatggtagcacgcgaccggaaacgccgccgtgccgtgggcgttcagctcacgcccgttttcgtccagctctgtgcagcaggggctaagcgccatccctattacctcccttttgacggaattgtaccggaatctcggcggattcctcgcattattccgccgcttttgatggtataatcatagtgttctgatttcaaattgtcaagaggtatttgtatggtttctttgcttttaccggtcatctatctggcgttcatcagcctcggcctgccggatgccctgctgggtgcggcgtggcccaccatgtacccccaacttggggctggtgtttcctgggcgggtatcgtctcgatgattatctccgccgggaccatcgtgtccagccttgcaagcgagcggctcaacacccgcctcggcaccgggcgggtcacagcgctgagcgtggccaccaccgccgtggcactgctcggcttttccacctgcacagagttctggcagctctgcctgtggggcatcccctacgggctgggtgccggcagcgtggacgccgcgctgaacaactatgtggccctgcactatgagagccgccacatgagctggctccactgcatgtggggcatcggcgcggcgggcggcccggtcatcatgggctgggcgctggcgggcagcacctggcagagcggctaccgcatcatctcgattttgcaaatcgtcctgacggctgtgctgatattcagcctgccgctgtggcagacccccgccgatgccggggcaggggaggactttacccccgagcatcgcacctttccgcagctgatgaaagtacccggcgtgccggaagtgatgtgctgcttcgcgctctactcgggcgttgagacggtcaccgggatgtgggctgccagctactgcacgctggtacgcggtttggatgccaccaccgccgccagctgggcaagcctgttctatctgggcatcacgggcggccggtttttgagcgggttccttacgatacggttcaccgaccaccagatgatccgtctggggcaggcactcattgccgtgggtattgcgctgctgcttctgccgggcagcgctgcgctgccggtgggtcttgtggtcatcgggctgggctgcgcacctatctacccctgcatcatccacgagactccgtccaacttcggccgcagcctgagcatgtccatgaccggcatccagatggctgccgcctacaccggcaccaccttcttctcgccgttttttggcgttctggcgcagaatatcacgatgcagctctacccgtgggcgctacttgccatgctggtgctgatgtttatcctgtcggagcagctgcataaaaaaacggccgcaaggcgggcggggaattgctaagccttcccccaagggggaagcctttccatttatttttcccacccactgttattttcctgtcgaatcctgtataatgagtaaaaagaggaggcgataccatgcaaaaatgcagtctgtgcggcgggcgggtcatcaatggccgttgtgaggattgcggcctgcccatcccaccggagcgccgcgataccctgcggggcgaaagcgcccattaccatcgcgtcaatgacgaggatgtgcttcatcgggtgcggccccgcggcagccgccccgccgtgagcggctacgccgaggaggagcgcaccgcccatgtacacgagagcggcagcgaccgccacgcagcaccgcgccccgcggtgcgcacggcccgggtggagcaccacatcgaggcaccctccagacgcagccgcagtgccaatgtcgcgtggcttatcatcgttgtggcgctgtttttgattttgcccatgctgcaggtcttgctgcagcgtgaaatcggttcctcggtttccgagcccgttcccgaattctccgaagaacaggccatagaggccgacagcaacgcctatgacgatctgcgcggcactgtacccgccgcaggtacggactgggacggcagcctgactgcgggcctgtacaccgtagggcaggatctgcccgagggcacctacaccatccagtgtgccgagagcaatacatccattgacctgcacatcgtcagcgatgagcacggtgttgaaatctacgaggatctgtccacaaacggctatgacaccagcgacagtgagcgggacgatgtgccgctgccgtcaggcactgtgctgtttctgaccggcaatggcacactgtacttccacagcagcaacgcccaggtcgatgcgctgcccgctgagaccgcccccaatccggtggtcggcgatgtggcatacaccctcagtgacagcgatgagagcctgtatcttctggtaggggaggacattgagccgggtgtctacgatgtgacctgcacggcgggcaccggatatttttccttcgtcctgccgatggagaacacccgcacaatgtactgcagcgcatggctctacggtgaccccgactatgtcgatacgctccgccacatcaccctgaccgaggacaccgaggtcactctctccaactacagcgatatggattttaccgtgacgctgacccccagtgaaacggtgtatgtgcatgaataaaaaaacggccactcaaaaatgagtggccgatttttttatagcgttgcaggggccggacatgaccggccctgccgtgcggtggaaatcacaccttctgccgcaatttctccacttcttcctccgtcagctcccgccattggccgggggccagtgcggcatccagcgccacgccgccgatgctccggcggtgcagggcattcacacccgcgccgtagacgccgaacatccgcttgatctggtggtacaccccctgccgcagcgtcacaagtacggttttgccgtcatcggtcagcggctctgcccctgccggggccatcgtctcaccgtccgcaagcgtgacgcctgcggcaaagccgcggcgcatctcctcggtcagtgctgtgtcgagtgtaacaacatattgcttttcaacatggtgcgcgggggagaggatatcgtgcgccagcgcgccgtcatcggtcagcagcacaaagccggtgctggtcttatccagccgcccggccgggaaaagttcccgccggggaaagtccgccgccacaaggcctaccaccgtggtatcccgcttgtcccggcttgcgctcacgaccccctcaggcttgttcagcatgatatagacaaacgcctgatatgcgcccgccagcggtgtgccgtccagcgcaacctcggccgtatgctcgtcaagctgggtgtccgccttgcggcaaaccatgccccccaccatgacgcggccctttgtcacggccttgcggctctcgctgcgggtcataccggtgcgctcggccagatacttatccagccgcatcatgcttcatgctcctgcgtgatggctgccgttttgccgcgcgtgaccttgataaggtcagcgggtgcgcactcgatctgggtgccgatgcgcccgcccgacacaaggatcgtctgctggttcaggcagctctcgtcatacaccgtcacaaactgctttttcatgcccacagggctgcagccgccgcggatatacccggtgaccttgttgatgtccgccacatggatcatcgccacgctcttgacaccggcggccttggcggcctttttcaggtccaactccgccagaaccggcacgacgaagacatagtagctgcggtcagcgccctgcgtgacgagggtcttgaacaccttggccgggtcctgcccggtcaggcgcgccacattggcgccgtccacagcctgcccctcctcatgggggtattcatgcgccgtgtaggcaacctttgcccgctcaagcatccgcattgcgttggtttttgcttcttttgccatatctgaaaacctctttatcttttctttgccttcccccttggggctgcgcccgcaggcgcgtgtcggagcgcaaccgccgtaggcggctcttagcgcgtagactgaaggtggccccgcagggccgccggatgaggggcgcgtgtttctggcaaccctctgttgggcaataatggcaagggcgcccctcatcagtccgcttcgcggacagcttccccaagggggaagcctttgcgttcctattatataacccctaaacaatttccgcaagggggcttgactttagcactttaaagagttagaataacggcattgacaaaaacacctgcgtgtaagacaatagaagcagaaaagacaggagtataccaccatgattatcgtactgaaacagcacgcccccgccgacaaggtcgaagccttctgcaaggaactcaacggcatggggtatcagatcaatgattccgtcggcagcgacacccacattctgggcctgatcggcgataccaaggcccttgccgaaagctgggtgctggccaaccccgtggttgagacctgccgccgcgtgtccgagccgtacaaaaaagccaaccgcaaattccacccggacgacaccgtggtcgatgttagcggccacaagatcggcggcggctactttgccgtcatgagcggcccctgcagcgttgagagcaaggagcagatcacctttgtggcgcagcgtgtgcaggccgccggggccagcatcctgcgcggcggcgcgtttaagccgcgcaccagcccctacagctttcagggcctgcgcgccgaaggtctggagctgctgcaggaggcccgcgcagtcaccggccagcccattgtgaccgagctgatgaacaacgaacatatcccgctgtttctggacgccaaggtcgatatgatccagatcggcgcgcgcaacatgcagaactttgagctgctcaaggcggtcggcaagctggatgtgccggtgctgctcaagcgcggcctttcctccaccttggaggagctggtcatgagcgctgagtacatcatggctgagggcaaccccaatgtcgtgctgtgtgagcgcggcatccgcacctttgagacgagcatgcgcaacacgctggacatttccgccgtgcctatgctgaaaaagatgacccatctgccggtcgtgatcgacccgagccacgccgccggcatcgcctttatggtgcccgcactggcacaggccgccgtggcagtcggcgcggacggcctgatgatcgagacccataacgaccccgccaaggccaagagcgatggtgcccagagcctgacccccgaccagttcgacacgctgatggccaccatcaagccggagcttgcgttctttgggaagaaactgaactaaggcaacgccccctataaaaaagcccgctgtccggcacagacagcgggctttttttatttctggtacaattttttcttctgctggtgggctgcgatcttgatatagaccggcctcggcagaaagcgccccagcgtcataccggccgccacaagccggctgggtacaataaccgtcttgcggcgggcaatgccgtccagcgcacagcgcacgcagtattccggcgtgatgccgcgcagggcgaactcaacattcgccacggcgttgaactccgtgtccaccgggccggggcagaggcagcctacatacaccgggctgtgtgcctccttcagttcctgcgcaagggcgctggtcaggctgaccacataggccttggtggcgtagtaggtcgccatataggggcctgcgggcatcaggccggcgcaggagccgacattgagcagcgcgccgaagccctgcttatacaacttttggccgatcttcttggtcaggatatgcaccgcccggatattgacggacagcatatccagatccttgtccagctcggtctgcaaaaacggcccgcagtcgccaaagcctgcattgttgataaacagatccacccggcgctcctccaacgccttggccagccgcagacactcgctctttttggacagatccgccgtcatgatctcacagacggtcgtaagatggtcagacagtgcttccagccggtcagcgcggcgggccaccagcatcaggttatacccgcgggcagacagctgccgcgcaaattcggcgccgatgcccgagctggcaccggtgataactgcaaacttaggcataggtatctccttcttttatcggaaatcgtgcggtatgcggcattcgcctttaatggtgccgccccacaccgccgccgcgtgtggagccgccgcccgagcggaacccgccgcccgagggacgcgaactgccaaacccgccggagggacggctgcggcctgcaccgccgccgctggtaaagccgccgcctgcgcggaatccgcccgaaggacgcggcccaccggagggtcttggcccgccgggacgcgggccgcccgggccggggccgaagccgccgtagggcggcgggggaggcggcggcggacggcggggccgccgggatgcgcggcccatgccgtaccagaacatattgctgccgatgctgccgccgcgccgcgggggacgcgggccgcggggacgcagcaccaccgtggtgatccagatgataaggatcaccgcaaagatcagaaggatcatgcccatcacatccaccccgccgcgtgtatccgtgttggcggcgtagccgctgtccagcgtcacaccgtagatgctgcacagccggttggccagcgcctgcacggtcttttgggtgccggtgtcataatcaccggtagcccaatagggctccatgtactcgtccagaagggaacccagtgtactgatggacaggcggctttccagcccggagccgcgcatgatgtagtagtcgccgccgtcggcctcatagggggccagcagcagcagcacaccgttgttctggtcggcagagccaagctcccagtcgttaaagacattgtaggcaaagccttccattgtcgtgttgcccagcagctcatcgaccgtgtaaacgccgatctgcgcgccgcaggcatcggacaagctgattgaaatgtcgttgatgtagctttccgtttcggcagaaagaatgtccgcgtggtcagccacggcgtttttcttatccacctgcacgcggggtgctgcccagacgggcagcgccgccagtaccagcgccgccagcaccgcacctgcggccaccgcgcgcccggcaaatgttttcagtttcatagcgtttccttttgttgtacgcttatccaagcagtgtgaatgtcggcatcgtctcaaccccccacagggcgccaagctgcgctgtggggaaggcggtggaatttacaacagcggcatacttgttgtattttgtaagatactcccgcacgatgatattttcgtatgaggtgaactcatcgtgcgcaaggtccagctctctgcggtcctgcttatccctttgggcctgcgccgttttataggccagttcaaccgcattgaccatctcgctgtgtacggtcggctgctgacggctgatgtctccgatatactcgtttaccgccttctgcgcctgctgtaccgctgcgttatcctcacccaagattgttcctgcctcggcaacgacttgtgcggcggcctgcgccagtctgcccgtatcggttctgccgctgttggttgtacacatctcggtataggcggcaacggccgccgtttgtgtccctttcagccttgccccgccgatgccaaacaccgacacaagcgccagcgcgacaagcaccagcgatgccacaccacgctttttggcgggtgcaggcagctttgtctcgacctcgccgagaatttccagttgcgggccgtggatggtaaaggtttcctgttgttcgagttgcatttgtttaccccatcatgtcatagtaccggatatacgcagggcggccgggaagcagatgccaattacggggcgtcaattacgccgcccccgcggcaattttcagctgttgatctcgagcatcttctggcgcagctcgccctcgatgcggcccagctcctgctcggcattggcgcgcttggccttgccgtcggcacggatcttgttcagctcgtccagcgtttcgatcagctgcttgttcgtctgctgcagggtctcaatatccacaatgccgcgctcggactccttggcgatctcgatggtgccctgcttgagggtggcggcgttctttttcagcagctcgttcgtggcatcggtcacagcgcgctcggcctgcatggcctgctggctgtgggcaatgcccagcgccagcaccatctggttcttccacagcgggatggtgttgacgatggtggtctggatcttctcggccatcatcgtgtcattggactggatcagccggatctgggggcccatctggatcgaaacattgcgggtcagctccagatcgtacagctttttctcaaaccggtcgcagagatcggccagatcgcgggccgcctgtgcatcctcgggcagctgggtgcgctgggccttctcctgcgcagccttcaggtcgttggcgcggacctcggccagcttctttttgccggccagaatgtacatcgtcagctccttgaagtagacaaggttcaactcatacatcttgtccagcatcgtgatgtccttcatcagggtgacctgatgatcctccagctgggccttgatgcgctcaacattcttgtcggcgctgtcgtagcgggtcttgagctgctcgatgctgttggtggtctttttaaagaagccgaagatgcccttgggctgctcagcaccggcatcaaagccctgcagctcggaaatcaggctcgtgatcagttcgccggtttcccccatgtccttcgtcttgacgcgggagagcgccgtctcggaaaaatcgctcagttttttctggctggcagcaccgtactgcagcaccatctgggagttggtgatgtcgatcttctcagcgaagtcattcaccatcttctgctcctcgggggagaggggggtatcctcaacctgcatgggggtcgcctttttgctctcctcgatgaccttttcatccgcagcggggtccagcgtcagcgtggggggcaccggggcggcgtcaagggtcagggaaggggcggcggggacattcagttcattgttcagatcagccattgggtttcatcctttctcatatccattatttcgcaaggttctggctcttcaggatactgtccagcacctcaatatcagtagaaatatccattgcctctgcgctgtacagcgcgtcaagctggttttcaaaggcggtcgcggtggtcgcggcgttgcggcgcagctccgattcgatctgggcggcattctcccccttgacaccgttttgctccagcgcggcataggtggccatcagctttacggtctccggcaggtaatagcgcgcaaagcggtcgatggcacgcgctttatcgggcgttttttcgaccacagcggcaatgctgcggcccgccttttccatccgctccatcgcagcggaaagctgcgggtcagggatcgcttcgttcagcttgtgcagtgcatccagattggcggcaatgccgttgagcatcgcgtcgacgtcctcgctgcccgtggcgtaggggatcagcgtgcgcaccacgcgggtggggcagagctttgtccccactgcgtaggcgatcaggctcagccccgcaagaatcagcaggttggaaaggcggtacggcggcagcagcagcgccccgaccggccacaccagcgccgccatataaatgggcagcaccgggcgtttggttttttcctgccatttgctcatgcaggcacctcccgtattttcattccgcaggggcggattccctgtccgcccctgcgggagtctggcacaaattcattatagaacaaaatccgttcacttgcaaccatccgcgtgcaaaaatggtgccagcgccgcgccccagaccgcctgcaggcgtgcaggggaccaggcggcgttggcggggctggtgctgggcagcaccacagcgggcaggtgggtcagaggctctgcatatttggcgtagatacggccggatgccgcgccgttgcaaaagaccgcctgcacccccagctgccggatcagtgccgccacatcgttcggcaccgcgttgcggatggacgcatctgacgccccgcgtatgtcgcaggcgccgatggtatcccacacggccagaccgtggcgcaggatgatgcgcttcttcgcctcaatgtccgcccaatcgggcacaggctcgccggtcacagcggcaagcatcggccaaaagcggttctgcgggtggccgtagaaaaagccctgctcccggcttttgaggctgggaaagctgcccaaaatcagtgcgttggcctgcgccccgtgcagcggcggcaggcccggccccacatgggtgtactcagccattcaaaacgcctccggccagagggtacggcacagctccgcaataccgtgcggctcggcatcggggccgatgcggtctgcggcggcctttgcggcggcgctgccgttgcccatggcaatacccagccccgccgcctgcagcatcgccacatcgttgtccccgtcccccacggccacgcattccgccgggtcaagaccggcgagccttgccagctcccgcagacccgtgcccttgtcgatgccctgctgcaggatgtcgcagccgtcaccgccggggtaggagaacagaaatttcagccccagatagccgtatttttcctgaaaccggtcggccatctcctgcgaaagaaagccgaacgcgccgaacggcatctcctgcagatgctggtcttgatcctcgccgtccacgatgttgagcgcaaggtttttctcccgctcacggcgggcgaactcctcatagccgaggtaggcatagttcgcatcatggaaggtgaagcgcaggggcagctcatgatcctcaaaaaaatccaccagcgcgtacatttcctcgcttgtcagccggtgcagggccagatcgcagcccttgtagtccaccagctgcgcaccgccggcgcagacccagtaatcggggcggatgctgcgcagcagccccttgcccacgccgatgcgcccgcgcccggtggcgattgcaaccttgacacccactctctgcacggcgcagacctcctcggcgttttccttcggcacgcgctcacagctgccggggcgcagcgtaccgtctatatcgagtaaaagaagcttgtattgcataaaagttgacctttcttgattttccctgaccccatctgcgagggaggcaagtatttgattgattctattataccaaagtctaaccccgtcccgcaaggcatattctgccttggggtgatgtttgtgcagctggatctatcgcgttcccgcaggcggcggcgctggtggcttttgccgctggttccggccgtgctttggctctgcctgccgcggctggcggcagccctgcccgcagcagcggcccgggccgaccgggtcatcggggcgcggtacactgcgcggctcgatgccctgcagcaggaaaattttgcgctgcatcagcgtcttgcagccagtgcagatgcacttgccaagaatgaggccctgcgcagcctccttggcagcgggcgcgccgtcggctgcgtcaccccggcgcgggtgctggcccggacgccgggcgggcttacgctggcctgccaagatgccgcccccggtgccgccgtgttggacgcgggcgggcggtacgcggggaccgtgaccagctcggacggtaatcgctgcaccgcagcctttaccgcagcagccgggctgtgcggcagctgcgttgggctggctacgccgggaaggtgggtgctgaccggcctgcccgccgactgcacgctgaccgccggggagatcgtgaccaccccgggcggggactggctgggtatgctggcggcagccccggtccccgatgcggacgggctgacggcatccgccccgctgaccgataccgccgacctgcacgccgccgtatattttgtgcacaccgattgatattttgtcgaaattccgctataataaatgtgtttgaaatccacgacatgaggtgatcccatggccaaccacaataaatcacaccgccgcgcccgcgttgcggtgctgatggtactgtgcagcgcggtatttgccgccttttttgcacggctggcctggatgcagtttgccaaggctgactattacgccgacaaggccgccgaggccagctcggccagctataccgtcacccagcacgccgcgcgcggccccattctggacgcaggcggcaccgtgctggcccgcgatgccaccgtatacgatatctacctgcgcataccggccccgcccggcaccgacctgcgcaagaccgtacaaaccatagaggaactgacaggcagcaaggatgtggaaacacagcttgctgccttttgttctgccgcctcggcgggggagctggcggtggcccggaacgcggacagcgccctgctgactgcgctgtaccgggccggtcttgtccagagcggtgccgtgctgcctgcggcccggggcgtgcgcagctggccggacggtgcgctgctgccccacgcgctgggctttaccggccccctgactgccgaacagtggcccgccgccaaacagcgcggccttgccatggacgccgtcatcggccagagcggactggaggccgcctacgatgcactgctgcgcgggcaggacgggcggctgctgatcaacaccggctttgacggcacggtgcgccgcaccgtccagctgcgggaggcacgccccggggccgcgctggtactgaccgtagacagcgcactgcaaaaaatgctgcaggatgccctgctcggccagatcaacaccctgcgcacaacccgggccgccggagccgggcgggaatgccgcgccggggctgccgtagtagtcgatgtgcgcaccggcggcattttggcggcggcaaatgtgccggggttcgacctgaacgcctaccgtgccgactacgccgcgctttccgccgatagcgccgcacctctgctcgaccgggtctgtcaggggctgtacgccccggggtccgccttcaagccggcggttgccgcagcggcactgacagcgggcattgacccggccgccaccgtcagctgcaccggccgttacggcttttacagcggctaccagcccggatgcctgcagtacggccacagcggcccggtcgatctgcgcaccgctctggaatacagctgcaacatctttttttacgatgttgggcggcggctgggggtggatagcttttccgccatggcccggcagctggggctggccgcccccaccggcgtggaaattgccgaggcgcacggccgcctgacatggacgaccgatgaaaactatcaggccggcctgaccctgatggccgccatcgggcaggggaacaccgccgtgaccccgctgcagctggcagcctatgcggcggcgctggccaacagcgggcagcgccctgcgctgcattttgccgaccgggccgtcaattccgccaccggcgaggttctttggcagtatccggtctcctttaccgagataccgggcggcgaagcggtgttcagcccgatccgtgatggcatgaagcgcatggcgcagaccacccgcatcctgcgggaggctcctgtcctgtgcgccgccaaaaccggcagtccccagctggcagacacgctccccgatggcgggcactatgtcaactcggtgctgatcggctacgcccccgccgacgccccgcagatcgcggcggccgttgtgctggaatacggaggcggcggtgcaaacgccgcaccgatcctgcgggccgtgctggatgcggagttcggcggctgaatcgtttccgccatttcggtgccgctgcgccccggttgggcggcctgccgctgtggccgcagcaaaaagtgtcccgcatcgtgattttcttcaaaaaagacctgttatattttacgaaaaagccagttgcagtccggccggaagtgtgttagaataggataggatagtgtaatgcaactgtggagaggagccgacatgaacgcacagtgtatcatggtctgctccggcaagggcggtaccggcaaaagtacggtttctgtgctgctgggtgcctgccttgcacgactgggccgtaaggtcctgctgattgagctggactcaggtctgcgcagcgtggacattattgcaggcgtctacggccgcacggtttacgacatcgaggatgtcctctgcggccggtgtgagggcgccaaggctgtagtgcccagcccgctctacccggggctgtcggtcataagcgccccctacgagggcggcgcggtggaggccgcacctctggggcggctccttgtcgccatgcgcccctattttgattatgtaattctggacaccgccgccggcataggcgcgccgttcacagcggccgccgccgtggcggataaggccctgctggtactgacccccgatgccgtggccctgcgtgacggcaagatcgtggcggaccgcctgttggccgggacccgcccgcagagtgctgtgcggctggtcatgaaccgtgtccggcgggagagcttcgggaaaaacgcctcggtagccgatctggatgaatgtatcgacaccgtgggtgcccagctgctggcggtcatccctgagagccgcatactgcagctggccggtgccaatggcacgataccgcccgccggggaccccgctgtcattgccgcacaggcgatggcaaaacggctgtgcgggcagcgcgtacccctgaccttttgatgaacaattctgctgcgaaggatggtggcatttttatgacgattgcattgatagcccatgacgccaaaaaggaattgatggtgcagttctgtatggcttactgccatattctggaacagcaccgtctgctggcgaccggcaccaccggccgtctggtcgaggagaacgccgggctgaaggtcacaaaatttcttcccggtggccacggcggcgccgagcaaatcgtagcgcgcatcgcttgtgaagaggtggacatgctgctcttcttccgcgaccccatcagcgccaagcccaatgagcccaatgagatgaacctgctgcgcatctgcgatgtccacaacattcctgttgccaccaacatcgccaccgccgaagtcctgatccatggtttggaacacggcgacctcgactggcgcaccatcatcaacccgcagcattgaagtaacaattttgatacagcaagagccgccgaatgttcggcggctcttgctgttttattgcggccagtctgcgctttgggtcgtgcttttgtcggggtgcatccacagggcggcccagccgttccggtccgcaagggtgcggccggtctgctccggcaggcagaaaagcccggtggagagcgcatcggccaaaccgccggcttcggcgcgggccagcactgccacgctgctcacatagcgggcggggtaccctgtggtcaagtcgatcaaatgggcgtagcgcacgccctcatactcaaaatagcgctgatagtcaccgctgatgacaaggctgtccccatcggccagctccaccgcctgaatatacgcagggtcatcgtcccacgggttctcaatacctgccgtccacggctttccgccgggcttggtgccgatggcccgcagattgccgccgacattcagcaacgcacttgtcaggccgcgcgcctgcgcggcccgggcggcctgctccacagcgtagcccttgccgaccgccccgacatccagcgtcatatccgggtcggcaaagaagacagtctgcgcagcatcgtccaaaatcaagttttcgatgttgatgtgctgcagtgcctccgcaatggcgtccgcagcgggcggggcgggggagtcactctcccgcgcatcgtgccacaggcgcagcaccgcacccgccgcgatgtttgtcgcgccatcggtcgcagggtaggcgatgtccttgcaccagcgcaaaaatgcgtatagttcatccccgacccgcaccggtgcggcggcagcctgcgcgttgacatcgtacaggttcacaacctcatcgtaatggttgtagatgtcaaacagctgattatagtgcgccagatcgtcatacagaacagccgtctgccggtcccaatcctgttgactggcggcatagccctgcaccacagccacggtatcaaacaggtcaaaccatgtcgcactgtacaatttttgctgtttttggcaggctgtcagcggcaggcagagcagcacggccagcgtcagcgcagcaagacggcgcttcacactttttctccttgtacagtttcgtgttcagtgttcaattccagcagcagattcgccagcatccagcctttgctggtgggcgtgaccatgctgcgcaccggaatggacgcgccgcctgcctgcacaaggtcaaggaacgcgcccagctcaccggtatcatggcgcagaccgctgataataatggccgggcggtccggcacagcgatgagcggcgcagcagccggggcaggcttgcctgcgcagaggtcacccacgataccgccgaggtcgccatctgccacacggcgcagcttcacctcatatcgcttggccgcgcgctcaatggcggcgtagttggggtagctttcatcaatgcgccacagcagggcgcaccggggttcacggatgatgcgggctttcatagaaattcacctcattgaaaagggagggggtggtcgcgggaacgggcgggcggatatggaatccgcccctacagctctgccactttaaaaaggcatcgcctagaagtaaaggcgatgccttgatgaattacaggtcggggtggtactccttgcaggtgcactttttccacttcagaccgctgccgcaggggcagggatcgttacggccgatcttcgtcacgcggacaggggcggcacccttggcaccggcctgtgcaggggcgccctcaccggtgggcttggctacctgctcgcgcttgggctcggcattctgctggcggatctcgatcgtcagcagcatgtggacggcatcctcgcggatcgaggcgatcatctcatcgaacatggcaaagccctcgatgcggtactcgaccacggggtcatgctggccgtagccgcgcaggcccatgccctgcttgagctggtccatattgtcgatatgctccatccacttggagtcaacattgcgcagcaggcagatgcgctccagctcgcgcatcgtcttttcaccgtagcgcttttccttcgcggtcaggatatccatgccgcgcttgtacagctcatcggcaatgccctcgcgggtcagctcacccagctgctcggtggtgtagttgaagtcggtgggcaggcacagccagttcataaagtggcggcgcagaccggcaaagtcccaatcatcggccgtttcgccgttcaggtagttcgcgcaggcatcatcaatagactggcgcatcatctcgtgcagcttgccggagatatcctcgccgtccagcaccatctggcgctgcttatagatgatctcgcgctgctggttcatgacatcgtcatactgcagcacctgtttacggatggcaaagttggaggcctccagctttttctgggcgctctcgatcgtgttggtgataagcttgttctcgatgggaatatcctcatccagaccgagcgaatccatcaggttctgcacgcggtcaccgccgaagatgcgcatcaggtcatcctcaaggctcaggaagaagcgggaggcaccggggtcaccctgacggcctgcacggccgcgcagctggttgtcgatacggcggctctcatggcgctcggtgccgatgatgaacaggccgcccgcagcgcggaccacctcggcctcgcgcttgacctcgggggcaaactcctcgcacagctcctcaaagcgctggcgggcgtggagaatttcggcgtcctcggtctcggcgtggccgtcgcactcggtcatcagcatctccagcttcgcgtcaatgccggcctccggcggggtgggcagctcggtgccgttggctttggcgcgcgccttggcatgctcgtactcgtccttcagctgggccagatcggcggtcagcgccttggccagttccttcttcagggcagccttggccatgtaggtcacattgccgcccagcatgatgtcggtgccgcggcctgccatgttggtggcgatggtcacagcgccctgcttgccggcctgcgcaacgatctccgcctcgcgctcatgctgcttggcgttcagaacattatgctcgatgccgcgctttttcagcagcttggacagcgcctcgctcttttcaacgctgaccgtgccgaccagcacgggctggcccttcgcatggcactccgccacctgatcaatgacggcgttgtacttgccgttgacggtcttgtaaacgctgtcgggcaggtcctggcgggcgcggggcttgttggtcgggatgctgacgatgttcaggccgtagatctcgctgaactcatcggcctcggtagaggctgtaccggtcataccggccagctttttgtacatacggaagtagttctggaaggtgacagtagccagcgtcttgctctcggcggcaacggtcacgccctccttggcctcaatggcctgatgcaggccctcattgaagcggcggccgtacatcaggcggccggtgaactcatccacgatgatgacctcgccgtccttgacgatatagtcaatgtcgcggtgcatgacgccgcgcgccttgatggcgccgtccacatagtggcgcagcgacatattgtcggcatcggccaggttatcgacatggaagaacgcctcggccttcttgacgccggactcggtcagggtggcagtcttgcgcttttcgtccacaacataatcgccgtcgacctgctcctcggcctcgaccttgtcgtccagctcgacgatgacgctcttcttcagcgtcttggcaaagtcatcggcgcgtttgtacatcacgctggaatcctcgcccttgccgctgatgataagcggggtacgggcctcatcaatcaggatcgagtccacctcgtccacgatggcaaaggcgtggccgcgctggaccatgttggccttgtagacgaccatattgtcgcgcaggtagtcaaagccgaactcgttgttcgtgccgtaggtaacatcggcctcataggcctttttgcggtcatcggattccacgccatggacgaccagaccgacagtaagccccagaaaacggtagaccttgcccatccactcagagtcgcggcgggccagatagtcatttacggtgatgacatgcacaccctcgccggtcagggcgttgaggtaggtgggcatggttgccaccagcgtcttgccttcaccggtctgcatctcggcaatgcaggcgcggtgcagcacaatgccgccgatgatctgcacggggtagggcttcatgcccagcacacgccagtctgcctcgcggcagactgcaaacgcctcaggcaggatatcatcaagggtctcgcccttggcaaggcgctccttaaactcggccgtcttggcctgcagctgctcatcggtcagcttggccatctccggctcaagggcaaggaccttatccttgatagggttgatgcgcttgagctccttgtccgagaaggagccgaacagtttttcaaaaaaagacataacagttcccctgtatcttccgccgcatatcgtagaggtgcggctgattatatagttttacacatgctactataatacacccgggcggggggatatgtcaattcatagttacattaggtttattttacacaaattcctagttcaaaatcaacgccgcagcctcccgcagcccctttaccacgggtgcgccggttttgcgcagcgtttccggcggctggtggccgccggactgcaaaacgcagcccacgccgagcgcctgtgccacctcaaaatcatggaccgaatccccgatcatcaccgccctggcggggtcaaagccttcctcttttaaataggcaaggccgatctccaccttgctcttggcgtagatgtcgctcaggcccagcagccggttaaaataccgggtcacgccgcgctgcccgacctgttggcagagggtatccctcttgctggctgataaaatgacctgccgcagcccggcgctgcggaatgcctgcagcgcctcggccgcgccgtccatcagcgggcagacctcgctggcggggacatagatctccatataccgcgctgccagctcggcaaagctgtggcgggagaagtcaaacccggcgcgggtatagtattcctcgatgggaaaaccaaaaatcgcccggtactgatcgcggtcgtaccgctgcgggtagccgaagtctgccagcagacggttgagcgcgtccacgcagagttcgacatcatccagcagggtaccgttccaatcccacaaaatcagttccgggcgcatagaggttacctcgtttttattcttctgtaaaaatctttttcaggctttcgttgctctcgatcagcttgacgagcgccacacccagcacggtgcagctgatcagttcgccgatggccacggccacggcattgaagcaggccagcgccagcgtcggggccgtgtccgagaagaagaaggtaatctcgaacgcgcccacgatgaacatattgaaaacaacaggcggcagggatgccggaatggcaagacccttgatgcggatgtcacgcagcttgtaggtcacaaggcaggccagcagcgtggccagcgtgccgaacaccacatcaatgacggtggagcccagcaggttcgccagcaggcagcccagcgtgacgccgatgatgtactccgcgccgaaaacaggcagcaggcacagtgcctcagccacgcgcacctgcaccgccccatagctgaacggggcaagcgccagacagaccaccacatagacggccgcaatgacagcgcagcgcaccagacggttgacagacatttttttcatattcatacaatactccggcggatagattttgaccgcacgcaagaccgccagccttgcggggtttgcgccgcctcccgcaggggagacggcggagcctaaaatcctaagttgctcaacaaatttgtattatagcaaaccccgcaggccgttgcaaggcctgcggggaatttcttttttcttatttgccttcccccttgggggggaaggtggccgaaggccggatgaggggcggctgtgccgctgccgcccgtgaaccggaaattacggcagctgcggcgcatacgcctcaaggttgcgggggtgcccctcatagacgatggcaatggcatcggggccggtgttggcgctgacaacgccgccaagctggaacacgatcagcggcggatgaccgaacgcctttctgcaaagcttagccagctcatcccgcttggcggtgctggaggtataggccaccatgtagggggtgtccttcatcgaatccacgcggctctcgacccatttcagcatggcagcaggcacggcggcatcgccgcgcacctttgcctcgaccttcgagataccggcgttcaggctgatgatggggcggatgcccagcaggtcgcccaccactgcggcggcggcgctgatgcggccggacttcttcatctgcttcaggctgtaggcagcaaggcagatctctacgcagtccagcttctgcttcagctcacccacacaggcggccagctcgccgccgttgcgcaccttgcgggcgcactcgcagaaataccagccgtagggcatcgaataattctggctgtcgatgacctggatcttcattgtgaagccggggcgctcctcctcgagcagttcaatagccttgacggcgttgttataggtgctggagccgccggcgttgatgctcaggtaaaccaaatcggtgtagccctcatcgacatagcgggcataaatatcacagaactgcagctgggtaatggccgcggtggtcggcacgccctgcgcatcgcgcatcatctggtagaactggtcgttcgtaaagtccttgcgctccatgtactcaacaccgtcaaggttgatgggaaagcccacgacctcgatgccgtacttgtccgcaagctcctgcggaatatcggaacaggaatccgtcaaaaaaccgatcttgctcattttacatcctcactccattcatagcgggtcaactgcccgtgggtttccaagtcggcaaaatcccattgccgcagcgcctcgtacacacccaccgccaccgcgttggacaggttcaggcagcgctcgccccggcgcatgggcatacgcacacaatctgcttcatgggcggccagcagttcctccggcagcccggcatcctcccgtccaaagacgagataggcgccgtcggggtaactcacatccacatggcggcgcggacctttggatgtaaaataaaaaaacgggcctttgtttttggcaaaaaactccgccagatcctgataatatgttatatcaagctggtgccagtagtcaagcccggcgcgcttcaattttttgtcgtccacggcaaagcccatcgggcctaccatgtgcagccgtgcgcccgtcaccgcgcaggtccgcgcaatgttgccggaattctgcgggatctgcggctcgaccagtacaatgtttaaggttggcatacattcacagtcctgtttgtttattttttactcctgcctcaatttcggcaaggcggtttccagccagacgccaagtcgttcatccgcaccctcaggggtctgccggatgcactctgccacaaaggcagcggcagcctgcacggcagcctgcggcacattgccttgcaggatgcgccccaccagcaccgaggcaaaaatatcccctgtgccgtggaacatccgcggctgcagcggcgtcttgaccgcatagccctcgccgccgcgggatgcacccacgcagcctatgtaccgccctccgcctaggcccgccacccccgtgacgaccacctgcggtgcaatgcgggtcagccgggccgcctgcgccgctgcctgttcggcactgcccacgccgggcagcggatcgcccaacagcagcgcagcctcggtcacattgggcacgatcagatcagcgtggctgcatagatcgtacatggcggggaccatatccgcccccagaccgctgtacaaccggccgccgtcccccagcacggggtccacgaccttgaaggcgcggggccacagttcaaaggcctgctgcaccagctttgcctgcgcggcatcggccagatagcctgagtagatgcagtcgaacttgatcccaagctgatggtaatgggccagcgccgcagggccgtaggccgggtccgccagtttggcgggggcacccagcccacccgtgtgggtggacagcaccgccgtgggcagcgcgaccgcctgcacccccagcgccgaaagcaccggtacgatgacagacagcgccgcccggccgaaccccggcaggtcatgtatggctaatacggttttcggcgcattggtcatgatgccgccctcctttttgacttctcatagattttaccataaaaccccgcgcaaaaaaagcagtattggggcgattgggttgatttgtttggtttttgggcaaagacaacaaaaaccgcctgccgggcagcagacggttttatacatttggcggttgttttccggcaggtttacagtacccgcacgcggatcgcagattcgatggcgcgcagctgcaccgccagatcctccgtcacattgccggtcacatccagcagggtgtaggcgacatccttcctgctcttgttgaccatgttctcaatgttcagatgggcctcagtcagcacgccggtgatggccgagatcgcacccggggtgttcttgtggatcatgcagatgcggcggccgccgatgcggggctggctgacatccggcaggttgacgctgtgggtaatgttgccgttcttgaggtaatcgctcagctcggcagcggccatcacggcgcagttcgtctcgctctcgggtgtgcttgcgcccagatgcggcgtgcagcatacacccctgacgcccagcagctcctcggtggggaagtcacagaaatactgcgcgaccttgccgctgttcagcgcgtccagcagggcggcgttatccaccagctccccgcgggcatagttcagcacacggacgccgtccttacacatggccagcgtctgggcgttgatcgtgtggcgggtcgtgggcaggtaggggacatggatggtcaggtagtcgcagcggggcagcatatcgcccagcgtgacgcagtgctgcacactgcgggagaggctccatgcggcatcaatcgaaatgtaggggtcatagccgaggacctccatgcccagcgccacggcggcattggccacgcgggcgccgatggcacccagaccgatgacgcccagcgtcttgccgcgcagctcagggccgacaaatacttttttgcccttttccacatccttggcgatggtgtcgcgccccttgagggtctgcgcccagttgacagcatcgaccagattgcggctgcccgccaccagcgcaccgatgaccagctctgccacggcgttggcgttggcaccgggggtgttgaacaccacgataccggcgctggtgcattcctcgaccgggatgttgttcgtgccggcaccggcgcgggcgatggccagcaggctgtcaggcagcggcgtctcatgcatatcggcgctgcgcaccagaataccctgcggctcggcggcctcgttgtcgatttcaaactggttggcgggcagctttgccagccccaccggcgagatagcgttcaaagttctgattgtgtacatatatataactccctgttccccttattttgcgccgtaggggccggacatgtccggcccgcagccttgcgttgcaagcctttaacaggctgcttccgtgcgtcaagtcaatgctctttgcggaacttctccatgaaatcgaccagcttgtcgataccctccggcggcatggcattgtagatggaggcgcgcataccgccgacaagacggtgccccttcaggttcacaaagcctgcctctgcagcagcggcgcagaacgccttgtcggtgtcggcatcgaggctggtgaaggtcacattcatcatgctgcggtattccttctgcaccgggttgcggtaaaagtcctgcccatccagataatcgtacagcaccttcgccttggcggcgttgattttcttcatgttttcaaggccgcccacctcatgctcaaggtaatccatgaccagcccggtcatgtagatgcaccagcacggcggcgtgttgtacatgctgtcggcgttcagcagggtggtgtaattcatcattgtgggcaggctgtcgggggtcaggcccttggccgcgccgcccagcagatcctcccggatgatagccaccgccatgccggccggggcgatgttcttctgcacgccgaagtagatcgcaccgtatttgctcacatccaccggctccgagcagatcatcgagctcatgtctgcaatcaggggaacgccgtccacctgcggcacatcgcggtatttcgtgccgaagatcgtattgttctggcagatatggatgtagctggcgttggggtcatagtcaatgccgttcacatcggggatataggtaaagttcttgtccttgctgctggcggcaatgcgggccgtgccgaatttggcggcctcctcagcggcctttttgctgaaattgccggtcacaaggtagtccgccgtgccggttttcataaagttcagcggcaccatcgcaaactgctgggtcgcaccgccctgaaaaaagcccaccttatagttgtcggggatgttcagcacccggcgcatggcggcctcggtattgttgatgatctcatcaaaccatttactgcggtggctcatctccatcacgctcatgccggaaccgtggtagtccagcagctccgcctgtgccgttttcagaacagcctccggcagcatcgaagggccggcgctgaaattgtaaactctagccatcttaacttcctcctacagtaaatgaaatgcgacccgctcacggcggatcgcatctgccgcgccgttgcggtatgtcatttattataggagcctgccgccgccccggcaagcgggcaaacttacgaaaatggcgcaaaattccgggtgtgtttttgtgttgtgactaaatgtttttctgttgagaacactatgtcctacatttgtaaaagctttctgcccgtctgtacatttttagccgtaaaatttgtgcaacattttctattgcatttcgttctaccacatatgtaaaatatattcatagatttctgctacatttgtaaaacacatctcatccattccggacaacaccgtccgcagggaggtctttatggaacagctttcccgcagtgaggagcaggtcatggcagccctctgggcctgcagccgcgccgccacccggcgcgagatcgccgcgcagctgccgcccgcatgccgctgggcagactctacactgctcaattttctgctccgccttgaaaaaaagaagttcgtccgcaccgaaaagcagggcaacaaaaacctctacacgccgctggtgcgccgcctgacctactgcggcaccgtcagtcaggcccatctgcagaccctgtacggcggcgatattcgcgccatggtgcaggcgctggccgacaccggccgcatgagctgcgccgacaccgagcggcttctgcgctggctgaccgaatatcaggccgccaacccggagtatgactacgaatagcgcctcacgctagggggaaggcaaatccccctgcatctccaccatatctttccagaaccgcttttgtacatggttcatctgggccttttcattgcgccgctcctcgatcgtaagcgccttaaaaaaccgcttccagagccgttgccagtccaactccccggcatcagtgccgggcgtgtaccgttccatggtcagatactgcacccggccgctgcggcgcaccagcgccgttccgtgggtggcgtcaaagatcaggaaatcgtcatcgggcaggcggctgcagaaatgcccccgcagcagcggcagcacctgatgctttgggtggatgaccgcgcccagcatatcatcccgctgttcaaaccggataaattcaatgcatttgcaggcctcattgctgaccgcccgctcaagggcaaaggccgcagccgcatcggggtttcccaacatctgcgctgcccgggggccctgctcaaagcagagccgtgcaaagcgcagcagcgtcagatccttgccgccctccgtggagagaaagcccgttgtgatgcagtccttcacctgtgcgcccagccgctccagcccggctgccacccgccgcgcgcgctgcgggtccgttgggatgtcccgcgtgccgaaaaaattcagctgtccctcctcaggcgggcagacctccgccgggatttctctgcgcgcgtagctttcaaacacgcagcagaggaagcccgcaaagctgccgtcatagcagtaggccacatcggtcacatacgcttggtaagacattgcagcgcctcctgccgcacggtttttgcggctgtatccgccgccatgccgcgggcggccagcttttgcacggccggggcggcatccggcagcgccttgggtacaaaatcatccagcgaaagctgctgcatccccacgctgaacgccttggggtccagcagggcaccggcgatctcggcgcgggtgccgcgggcagccgccctgccgcggcaggtgataaaatactgcgcccgcttcagcactacgccgatgcgcttcagctctgccatgccgaggttctgggtgcgccgcgcctgcaggatgcggatagcgctcttcgggccgatgcccggcacccgcagcagttcctccttgccggctgtgttgacctccaccgggaaaaattccgggtggcgcaccgcccatgtacacttggggtccagataggggtcaaaattcggttcctcctcggtcagcagctcctgtgccgaaaagtgatagtaccgcagcagccagtccgcctgatagaggcgatgctcccgcagcaggggcggggccgtgtgcagcgcaggcaggcggcggtcctccacaaccggcagataggctgagtaaaacacccgccgcagggcgtatttgcggtaaagcccttccgtcagatccatgatgtggcggtcggtctccggcgttgcgccaatgatcatctgggtgctttgcccggccggcgcaaacgcctttgcgccgcggtaaagcaccatctcctttttgctctgtgcgctctgcactgcgatttgtcccatagggcgcaggatcgcagtttttttcttgtcaggggcaaggttgttcaggcttgcctcgctgggcagctcgatattgaccgacaggcggtcggccagcaggccgatcctttccaccagcgccgggtccgcgccggggatcgtcttggcatggatatacccgttgaagcggtactcctcccgcaggatgcgcagcgcctcgatcatcagctccatcgtgcggtcgggcgtacccagcaccgcgctcgacaaaaacaggccctcgatatagttgcgccggtaaaagccgatcgtcagctctgccagctcccgcggggtaaaggtagcccgcggccggtcgttggagcggcgattcacgcagtagctgcaatcatagctgcagacattcgagtacagcaccttcaaaagtgacacgcagcgcccatccggcgtaaaggcatggcagatgcccgccggcgcgcagcttcccagactgccgtgccgccccgggcgtcccacgccgctggaggtgcaggccacatcatatttggcgctgtccgccagtatctcaagcttttccgcaagatccattctgcccgcctcctgaaaaaagggtataaaaaatacagcccgccgcatatccttgcttagcagggtgtgccgcgggcagcatttttaaaaaacacttctgttttgtcattcaaagtccggactatgggactttgcttatgctacaatatagatacggagcgagaaatcaccacttggccttggtctccacgaccttacctgcgatgtaaaggtgatccaactcctcccccttgatgaccatttcctcataggccgggttaaaggggtgcagcacgaccgagttgccgcgctggatgtactttttcagcgtaccttcgccgtctgagccgtagaccagcacaccaaggtcgccgttgtcgagcgtattctggcggtggacaagcgcaagatcgccatcggaaatgcgcggctccatactgtcgcccttgacaaccaaaaagaaatagttctccgggtccttgacgcaggcgtattccttaccgtagtcctcctcaaaggccagcgcaccgtacccggcgcgtaccgtgcccacaaccgggacctgggactcggtataacggctgaacgcattgcggcccacagcggaggacgcatccggctccttgcgcagccccagcaggacatcggcaggggtgtcgaggatctctgccaggcgagccacggtctgcggatccggggtggaacgccccgtctcccacttaccgacagcctgctgcgtcactcccagcatccgggaaacctctgcctggctgtatcgtttggccttgcgggcctctttcaagcgctctgcaaacatcgggaaaactcctttttcaataggataaagctgtatcttgtggaaatcccatttcattacccccattatacaactacccattgtttttgtaaagaggttttcgcaacttttttcaaaaataagttgtaaattcatcttgacaacaaccgacagatgtattatagtagtctcatcaagcggatcacattcatccgttgttatttgcggcggggcagcctttgcggggcagccccatcaggaggtatcggtatgaactgggaactcatcaaacacaagctttgcagactgatcgcaaccacagccatcctgctggccggtgcgatggtaagtgcggccgctgccggctccatgccgctgtgggcggcgctgctgggcctttttgcgtccgttgtgctgctgaacgccgtatgcggtattctgctgggtgccccgtcccgcaccatcgagaccgtcctgcctgcatcgcacaaccggcctgccgtgcagctgcaggtcgtgcgcggcgggcacgccgcctgacaacacgcctactcctattcgttgtgatacatataactgcagcaagccccgcacgctttttgccgtgcggggcttgctgcaaagaaggctctatgctacaatgaggaaaacaagccaaggatgtgacctgcatgaagttgttggaagtttgtgtggacagtcttgcctccgcccgcgccgccgagcagggcggggcagaccggctggagctttgcagcgcactggccgtgggcggcctgacgccctacgctgatctgctgcgccagatcaaggcggagatcagcctgcctgtgcgctgcctgatgcggccgcgtgcgggggattttctctacacgcaggaggagatcgacctgctctgccgccagatcacagcgctgcgcgccgccggggcagacggctttgtcataggtgccctgacaccatcgggggatcttgatctgcctgccatgcgcgccatgctggacgcctgcggcggcgcccccgtcaccctgcaccgctgtattgatgtctcccgcgatctgtgcggcacctaccgtgctgccgccgcactcggcatcgacaccgtgctgacaagcggcggggccgagagctgccgcaagggcacagcccaactcgccgcgctgctgcgcctgcgggatacgctgaacggtcctgagatcctcatcggcgcaggggtcagcgccgccgtcattgacgagctgcgcgctgcgctgcccggggcgcgggccttccacgccagctgcaaaaagctgctcaacagcggtatgaccttccggcgggagggcgtccccatgggcctgcccggactggacgagtggcacatccagcagaccgatgccgaagccgtgagggcagcgaaggatgccgtgatgcggtaacgcgggcggatacagaatccgcccctgcattaaagcaagaagcaaaacccgcctgccgattttttatcagcaggcgggtttcaattttcatcataagggtcatcaaacagcccgaacatcgaggttttttcaagatccggcacagtatattcccgaatctgccgcacaggctggaatccgccggtatcctcgggcgcgcggcggccatgatgggcgcgggggcggctttctgcggccatagcagccaccggctcgtcataggacggcataccggcctcctcgtaatcgggcgtcagctccagctcctcaagaaggctctggatggcggcgcagtcctcgggcacatcggtcaggctcgcgccgtaatggcagaacagtacggtgccgtcccggtccagaatcagtgtcagcggcagctgctgctcagcgccctttaccggctggtagccctgctttttggcctcccgcaggatgcgccacccctccagcgaatagctcatcagcgtgcttttgcttgtgggtatggcgagatgctcatacagcacgcccgctgcatcgcagagcaggggatagggcagcgtgtccggcccgatgctgcgcgacagcttgtccgcgcgcgagcgaaccaccagcgcaaagccgccgtcatgcagtgctgcgtaggtgtcggcatagcggcttgcgaaggtgcgcgtgatgggatggccgaagttcgccataaagaccaccaccagcggggcgctggcctgcaaaagatcacggaagcgattgcgggcgctgtagggcgtgtcatacaaaaagaaggggagtctgtccccaacgcagatccgctccgccacggccaagcacccctttccaaaaaatcataactcaaaaacccggacaggaagtcctgcccgggatagctctgtaaaaaccccgcacagccgtctgcaaccaatcaaaacctaccggtacaggcaggtgggtaccctacaagagcgttcatgctcccttcttccgccgaagcgggaggtctgcaatccggtcctcgacccgggttcccaaaatttgattagtaggattctataaggccgcaacaaatcgaaccgcgcagggtgaaaaagccgttcggccttttactgcaattcagaatcgtcgatgtcgtacatggcacgcaggcgctcctcgaacaccttgccaacggtgatcagttcctcgtcatcgtccacgatatccatatactcgccctcgtcatcagtaccgatgcgcatcaggatcagctcagcatcctcctgcaggctctcgggatcctcctgataggggataacagccagataacgggtgccgttgacctcggtagcgtcgatcacctcaaaggtgacctccttgccgtcctcatcctccagcgtcagcagatcgggggcagcttcttccagcatttccgggctcagttcgtcagacataagtgacctcctgtggtcgttcgtatttgatgcttatagtgtaccctttttttcttcaaacgtcaagggtgttcaagcgggaagttctgtggtataatagctttaattggatttttacggaggttgccgccatgcacaaaaaactctgtctgctgcccgcgctggcgctggccctgctgtgtgcctgcagcagcggcgaaaaaaagaccccgcccacccgtccggctgatttcgtcagcagtgagcggcaattcaccgcgcccggcagcggcgatatcatcgccatttttgatacctccctgggcgaggtacgcgccgtgctttaccctgatgccgcaccgatggccgtttacaactttgtaggactggcccgcagcggatattacgataacacgacgatctggcgcagtgagtacggctttgccgtgcagggcggcgatgcgaccggcaccggcacgggcggctccacgatttggagcaacaatccctatccgctggaggctgacgcgggcctgaagcactacgctggggcactctgtgctgcgtttgcggtaggcggcgatgcgaccggcggcaacagtcagttttatttcgtgaccgccctgccggacagtgtgagcagcagtgacctgcaggccgagctgactgccaacggctacaccgacgcgcaggtcgctgcctacgccgccgtgggcggcttaccgtaccttgacaacacggacacggtgttcggtcaggtatatgcgggcatggaggtcgtggacgccatggcctgcgttgacacggtgaaggatgatgacggaaacgacaccttccgccccaccgaggaggccgccatcacgatcaaccatgtaacgatcacgacctacacagccgaggtggacaacgatcttgagactgtaggctgataccaacagtatatgcaaacccgcccccgcagagcgttggcagaactgccaaactttgcgggggcgggttgtctattatgctatcttcaaaggcttccccctcgggggaagctgtcaccgaaggtgactgatgagggcagagctgaccaagccgacctgtttacgggcaaccgtagcaaacccgcccctcatccggcctcgggcggggcctcggccaccttcccccaagagggggaaggcttttgaggtttatttcttcgtgtttccgcccatgcgtctgtcgcggcgggcatactcggccagtgccttgtcaaagcactccttggtaaagtcggggaaaagggtatcggtaaagtagaactccgcataggcgcactgccacagcaggaagttggacagccgctcctcgccgctggtgcggatcatcagatccaccgggggcaagtcgcggtagagatgcttctcgatggttttctcatcgatctcctcgggctgcagcgcaccggccttgacctcggcggcgatcgcgcgggtggcatcggtcagctcggcatggctgccgtagttcaggcagaagttgacgatgcccttttcgttgtccttcgtcaggtccatcatataatccatggcgtccagcacgcgctgctgcagcccctcgcggcggccgctgaacagcaccttgcagccgcgttcgttcatctcatcggcgatggtgcggaagttgttggcaaacaggtccatcagatagccgacttccttggcatcgcggctgaaattctcggtggagaaaacatagagcgaaagcacaaagacgccgcggtcaccgaccgcatagcgggtgatttcacgcaggcggtcaaagccggccttatggcccatgctgacgggcagcaggcgctgcttggcccagcggcggttaccgtccacgatgatggccacatgggtggggaagcggggttcagcgggattcggcataacagttctccttttttattgctcggggcgtaccaactccggcggttcctcgccggggtgatgggcgcgccagttcagaaagctttccagaatgacggcggcggagaccgagtccagccgctccttgcgcttggcgccgaaggtatcgttatcggccagaatagcggcggcagagacagtggtgcggcgctcatcccacatcacaacgggcacacccgccgtgttggcaaggcgctgggcaaaacggcggctcttgctggcacggctgccctcggtgccgtccatgttttttggcaggccgcagacaagcccctccgccccgcgggcggcaaagacctccgtcacggcggcggcaaccttgttcatgcttttttcttcgatctgcggcgtgatgggggaggtgatcgtctccccggcatcgcacccggcaagcccggtgcgggaatcgccatagtcaacggcaagccatttcatgggcagggctcctttacattttgtcagatatagatattatagcataaaaaatccgccctgaccagcagggcgggagattttgtttgccttcccccgaagggggggagatggccccgcagggccggatgaggggtgggcttgctacggttgcccgtaaacagatcagcctgatcagctctgccctcatcagtcaccttcggtgacagcttcccccgtgggggaagcccttggggtactgtaggggtcgatgcttgcatcgaccctacaaccgcacaggaaatacgatgcttacaccaagctgcccttcaggcgcttatccagctggattgtcagcatggcggccagaacgatcttcacagcatcgccgggcaggtagggcagcacgcaccagcccagagcgctcacaaggtcagcgccagtcagcgtcatgaaccagatcgtgcccagcaggtagcaggcggcgcagcccacgaccatcgcagcgcagagcgcccagaatttgcggcccagcacccggaccagcagggctgtgatcagcgcagtcagaatgtagccgatggcatagccgccggtcttgccgaagattgcggacgggccgccctgaaagttggccagcaccggcacgccgatggctgccagcgcaataaagaccacctggctggccgtgccccagacggggccgagcatcgtgcccgccatgtagacggcgaacagcgccagattgatgggtacgccccaaggcatcgggacggcgatctggctgcagacggcaaccagcgcggtaaacatggcgcaaagcaccatgcggcggacattgtcagtagttttcgtcatactttcgtactcctcttgttgaatggtaatttatagcattgccgtatcctgcccgggtgccgccgcagcggtttctgacagaatgcagcgatgttttacagcaatcgaacgccggcctcgccgctggtcagggcagcagggcggctttcaccgtcatagcgcacgacaagcctgcattcatcatcaatgcccagcacggcggcggggcgcggtgtgccgctgcgcggcgtgaccagaacacggtggcccgccagcgccagacggctgcggtattcgtccagatacccgctgcgcgggccggtgcggtacagcggccagaactcgttcagaaacgccgctgccagcgctgcgcgggcaccgggcgccgggtcgccgtcaaacagcgcccccgccacgctctgcagctccgcaggccagccttcggccggtgccaccacattaaagcccagccccagcaccgcatagtccagcataccggactccagatcgagcgcggcctcggtcaggatgccgcataccttgcgcccgtccttccaaaggtcattgacccacttgatgcggatcggtgccccgcagagcttttcagccgcgcgggcggcagccactgccgccatggcggtcaggcccacagcctgccgggcaccgatctccgggcgcagcaggatgctcatatacagaccgcccggcggggaatagaagctgtgcccgccgcgcccgcgcccggcagactgtgcctgcgcgatcagcaccagcccctcgggcgcaccggcatcggcgcgggcgcgcagggcggcattcgtaccgggcagccggtccacgacctcgatctgcagcgcatgcagggatgccggcgcaagcagggccgccacggcggcagcgttcagcacatcagcgtccgcagcaagggcgtagccgcggttcgtcacagcctcaatggggattccgtcactgcgcagcgcggccacagccttccacaccgctgtgcggctgacgcccagctgcgcggccagctcctgcccggagatataccggccgcgtgccgcgtccagcgccgccagcacctgctgcttgaccatatccacgcccccctgtaagcccgactgtaggccagtataccgcgccgcggaccggaatgtcaacgcctttgcggtgtcagggttgacaatcagggcaaaaaatgtcccgccgggcaggcgggaacggcaaaagccccgcaggcattgcgcctgcggggcttttgctatgatgcaaacagatttagtgggaaaagtctaacttagcgctggatacggccggaaccatcgccgccggccagcttctcgacctcggagacagtgaccatgttgtagtcgccctcgatggagtgcttcagggcagaagcagcaacagcgaactcaacagcgtcctgcgtggactttccgttcagcagggcatagatcaggccgccgccgaaggagtcgccgccgccaacgcggtcgatgatgtgcaggtcgtacttcttggagaagcagtactcgttggaggcaacatcgtacagcatggcgctccagccgttgtcgaaggcagagtggctctcacgcagggtgatagcgaccttctcaaagccgaacttgtcagccagctgcttggcaacgctcttgtagccctcgcggttgatctcgccggcgtagatgtcggtagcctcggcctcgatgccgaaaacgtccttggcatcctcctcgttggagatgcagacatcgacatactggcacaggtcggtcatggcagcgcgggcctgctcacgggtccacagcttgccgcggtagttcaggtcgcagctgatcttgacgccatgggccttagcagccttgcaggcctcgcggcagatctcaacaacattctcgcccagagccggggtgatgccggtgaagtggaaccagtccacgccctcgaagatggcatcccagtcgaagtcagcggtggaagccagctgaatggcggagttggcgcggtcgtagatgcagacagagccacgctgagaagcgcccttctcgttgaagtagatgccaacgcgatcgccgccgcgggtgatcttgctggtatcaacgccgtagcggcgcaggctgttcacagcggcctgaccgatggcatgggcgggcagcttggtgacgaaggctgcgtcgatgccgtagttggccagagaaacggcaacgttggcctcgccgccgccgaaggtgaactccagattgttggcctgaacgaagcgctcatagttgaacggctgcagacggatcatcaattcgccaaaagtaacgactttcatggtgaactccttttaattcaatattttttaagataggggagcggggcatcgaggccgccgccccctagatttacattgggattacgccaaatcagcgctgaaccagatggaaggcaaagcctgcgatctcgtcagcaaagtagatggcaacggtcttgccgtccttgacattcttactgtccatgtcgaacttgacgccgcgctggctcaggtgatagatagcgcggtcaacgttgttggtcaggattgcaatatggccattggtgccgcggcccggcttcttcatgatctcgaattccttcttgcccacgaagatgctggagttgccgggcttgacagccatgctcagcaggctagcgatggtctcggcggtcttggcggcctcggcctcgttctcgcagttgatgccgatgtggcccagctcaaggcccagcatgacgtcaacggcctcgcggctcatcgcggcgatctcgtcccaggcaccggccttgatcttgtcgctcttgcacatccaggtgccgccgacggcgatgatctggttgtagcccagatagttgttgacattcttggcgttgacaccgccggtgcacatccacttgcaggtcttgagggcagcgccgatgttcttcagcttgtccacgccgccgttggcctctgcggggaagaacttgacgacctcgcagcccatgttcatagcctgctgcatctcgcctgcggtggcggtgccgggcatcatgatgccgcccttgtcgatgacgtgctggcagacctcggggtcaaagccgggggcaacgatgaaggaagcgccggcggccatagcgcggtcagcctgatcaacggtcaggacagtgccggcgcccagcagcatttcgggcagctcctcatggatcttcttgatgcaatcctcggcgcaggcggtgcggaaggtgacctccgcggcgggcaggccgccgtccatcagggccttgcacaggggcagggcctcatccacgctgttgaaggcaatgaccgggataatgccgatctcgtaaacacgctgcaaaacagaattcatagcaattctccttcactcattctgtgcgggtgcccggcaccgtatgccgcggcagggctcgcactcgattacttttattatatccaatgggcgcgcgtgcgtcaatcgggcaaaaacacgcaggaaaccgcacgatttttgtcacttatgctaaggattccgcaattcggaaaagaacttgaaaaatgctgcaaactttgttataatcgttccataatacggaacgcaaagcgacctctgcgttccgtgcgaaattatgaattttttgttaaatttcatcgggaggcctgtggtatggcagaaaaaggcggcgtacaaagcgtggagcgcatcttccagctgatcgagcatctggcggcgcaccccaccggggtcagcctgcagacgctggcaggggagaccgggcttgccaaaagcaccgttcaccggctgctggccagtctggtcgggctgggctatgtggtgcaggacgaggaaaacggccattaccgcctgaccctgaagatgtttgagctgtcgagcggcatcgtagacagcatggacatcatgggtgtggccaaggcgcatctggagcggctgagccagcgcaccggcgaggctgtgcatctcgtcatccgggacgggcgggacatcgtctacatttataagaccgagagcggcccgatgcggatgtccagccgtgtgggcctgcgcagcccgctgtactgcaccggcgtgggcaaggccattctggcgacgctgcccggcgacgagctcgaggacatctggacgcacagcaatgtgcagaagctgacagacaagaccatcaccgatctggaggagctgcgcagccagctggtggaggtccgcgccaacggctacgccattgacgatgaggaaaacgagctgggcgtccgctgtgtggccgtggccatccccgggccggacggccgcgcggagagtgcgttttccatcagcggtctggcgccctacatgacgcccgagcggatccgccgcattgccacgctggcgctggacgcccggacggatattttggcagatttagggttgcggtgaaatagggtgtatttctcacgcccggcaacaggtaaagcccctccggtcatcgctttgctcgaccacctccccactgcgtggggcggcctttttgcggccgcaggccgccagaaaggctcctcacaatgtggggagctggccgagcctgcgaggcctgaggggctttgtcgggccttgccgcggcagcctgtaggggccgggcatgcccggcccgcgacttggcggacattgcagttttccggtttgtctcctttttatattgctttgcaggcaagtgtccagccccctccacggcagccagagggctggccgccctacaaactcccgtttacggcaagggatttatccctcccggggcgtggcaacaatctgcggggcgtcggggacgccgccccctagattgctttcttcactcttcgccacgatctattccccgcagcagttcctccgctgctaccccgtacagcttcgccagcgccagcaagtttgtcgtgctggggtctgcgctgccgttctcccatttggagaccgtctggcggctgacgcctaagctttcggcttcaaactcctgcgtcatatggcagcgggtacggtgggccttcagtgtctctcccagtgtccgcttcacagcctgcttttcctcccgcacctccctgctgccgatgtactttttcagcgcccgcacgatcagcacaaacaggtacacgaccgccgccagcagcgctaccgtcagcacaagattcaaaatcccccaccatgctgcaaatgccatctctatttcctccttcgtggatttttctgcccccagtataccagactgtgccgcattacaccatcaactatcgcgtatattttgggttacattgcaaaaagcggcctgtctgcgttctttccgcagacaggccgcttgctttaaaactgttccagaattgccagcagcttgtcaaggctgcgctcgttgaactccaaaatcagaatatcgcaccccggcgcgtcgacgatgcccgcgtcaaaggtatcgatgtgctcgcgccagctgttcgtgaaccgcgtctgcaggtacggcatgtaatactcactgaacgagtcgccgatgacccgcaccgtgcggccgtccttctcgaacagactggcgtagccgggcacggtgtaagtctcctcggcgggcaggctggcgtaaagcgccgccacattggccatatcgccggtggtcgtgccatcagcctccaccgggtagctctcgggggagagggtcggcatgtccagcgcttcaaaaataccgtccagcccatacagcgcgcccaccgcgttccagtgggtgtccgtcttgtagtagagcagccggtcagggttctggcgcgcctgactgcgcagcagatcatactgccacaccaccggcaccgttgtgtggctctgcaggtaggctgccagcaagtcggtacggttctcctcgttcacgatggggtagccgtccggcatatactcctgataaatgcggtccttgctgggcgtcaggtccagcaccagcgtgcagccgttttctgccagccggtcatttaagatctgcagccccgcgctggcctcggccagcacctcggcactgtcgttcagttcggtcagaccctgatagtttgccatcggctgggcagcgttcggcccgtccttgtagaacagccaccctttcttgccgggcagcacctgatcgctctggcttgtgccgaacagcgcataatccagcccagcgttgaccagcacaaactggtagcggaagggggaattgtccaccagaaagttatcaagattccgcggcagctcccgcagcgggctgtgaagcacctgcggcaggccggtcatcagccggttctcatggctgtccatcgacagttgcttggaaaagatgttgaagatcgggaacgccagtccgatcacggcgcagaacacgccgataaaaccgatctttatcgctttgcgcatcgtctgcacctcctcagaactggaaatagataaacgcgctgtaggtgcccgccgtgacccgcatcaggccaaggaaaagcagcaccagcagcagcaccatgcccgcaggggacggcgcatttctttcgtagagggcctttttcagccgggggctcagcgcctgcagcggcccgcagagcaggaaggacgccgccagaatcagcagcagcttggtatccgcaaaggccgccagcgtatacccgcgggccccgctctgccatgtcaggatgccgcgccacgcggccagcccctcccgcagacccggcgcgccgaagatgatcagcgtggcccagagcgccaccaccgtataaagatgccggaaaaatttcggcagctggttgagcagctgccccagacccagccgctcaaggcagaggatcacgccgtgcagcaggccgaacaccacatactgccacgccgcgccgtgccacaggccggtgagcgtaaagacgatgagcaggttcaggcaggtacggcgcagccggcagcggctgccgcccagcgggatgtacacatagtcgcggaaccagccggacagcgagatatgccaccgccgccaatattcgccgacagagcaggcgagataggggtagtcgaagttttccggcagggtaatgccgaagaattccccgatgccgatggccatatcactgtagccggagaagtcaaaatacagctgcatcatatacgccgtgtagcccagcacaagaatgggtgccggcagcgtggcggcgggcaccgctgcgacctttgcgtagatcagcgccaactggtcggcgatgatggcctttttggcaaggcccagcaccagccgcttgatgccgtagcagaagcggtccgccgaaacgcagcgcgcctgcccgcaggggtcaagctgcggggcctgctgcccatagcggacaatggggccggacggcccgtggccgaagaacgcaagaaacaccgcgaaccggaaggggcttttttcgggggcggtgcgccctgccgcaacatccgcacagtagccgatggccgtaaacacataaaagctgatgcccagcggcagggcaggggccagcaccggcacaaggcccggcgcaaaagcatttacggtctcggccgcaaagcctgcatatttaaagacgcccagcaccgccagatcgagcagcaccagcgccgtcagcagcgggcgtttgtgggccagccgccccagcgacagcccgcccagccagttgatgccggccagcagcaccagaatggccgcgcccttcaaccccgcccaggcaaaaaacagcaggctgaacgcgcccagcaccacattgcgcagccgcctggggcagatccagtagaccgccagcgccagcggcagaaagacaaataaaaactgcaccgaggaaaatgccatatacacacaactccgcgcggcactaccgtggggcagcgccgcttcataaaaattttacatctgtaaacattataaagggtatcccaaaattcggcaagatgtgcgccgcaaaaagttgttttttgcacattcccgctcattttgcagggtatgaccatagacaatcccgccgtgagtgactataataaagatgtatttttatgtaacggaggcgtctgcccatggaaaatctgattttcggcgcgtttgccacgctggaaggctaccgcgagggggacgccgccaatctgggccgcacagtctatgaccgctgcaccgtcacggcgctctgcagcgccaaggcccagaacccgcgctgcaccgtggcgctgctgaccaatgcgcccgtgcccgagcccttccgcagccagcttaccggcggcggggtcgagatctgggactgcccctttgatgcctaccgcgtaccggccggcacaaactgggcgctggcctactataagctttgcgccatggcgtgggtgctggcccacagggattttgcccgcgcctgcatgatcgatcttgacacctacacccagcacccgctggatgatctgtggcgggaatgtgacgaggcggtgctgctctatcaggtgccccacgccgccagccagacgatgaccgcagccatcagccggtgctttgacgcagtggagccggcgggcgccccccacagcctgacccactttggcggggagcttgtggcgggcagcagggcgcggcttaccgcttttatggcgcaatgccgccggtattttgatgagctgcaggcacagggcatcaccccgcgcgagggggacgaggctgtctggtgcggcgccgcctaccgcagtctggccgccgggcagccggtacgcgccgccaatgcctatatcttccgctattggctcggcgggcatttctactatgtatcgaccaattacgcgctcgatcccgtctgcatcctgcatctgccgggtgccgccaaggatcgtcagctcaagctgatctaccggatctacgcccggctcggggccttcccgccgccggaaaggatccaccgcctctgcggcctgcccgccgcacacccgccgctgctgcgcaccgtatggacgcggctgctggcccgcctgtaaggagccgttatgcccaagaaaaagaacgacctcagccagcggctggaagccgtcatcaagacactggtaccccagcaggagcagaaccccgatgacctcggcccgatgatgcgcgccatcaaggcggtacacagcatcagcgaccatacctcgaccacgccggaggatcttgagcgccagcgtgccgggcaggagctgttcgcgcggcttgtcacgccgtcgatcggcatccgcaacgacagcctgacggtggggaacatccctgctgagtggatcagccttgagcatggtcatgaccgccgccacgctgttttgtactgccacggcggcggctacacctgcggccagctgggctacgcccgtattctggccagcaagctcgcccttgccaccggctttgatgtgctgtcctttgagtaccgccttgcgccggagcatcccttccccgcagccatcgaggacgcgctggccgtctgggattatctgatgtatatgggctacggcgcacgggatgtcatcgtggcgggggattccgccgggggcaatctggcgctggagctggcactgaagctgaaggagcagggccgcgcccagccgcgcgggcttttgctgttcagcccctggaccgacatgacggccagcggcaagagctaccgcacctgcaaaacgctggacccgatgctgacgatggagtacatcgccgccgtgcgcgaggcctacaccggccccgatgccgactggacccgcccctgctacagtccgctgtttgccgacctgcgcggcctgccgccgaccttagtgcaggtgggcacgaatgagatcctgaagtccgacagtgagcggctggtggaaagcctgcagaaggccggcgtctatgcccagctggagatctaccccgagtgctggcatgtctttcagcagatgcccgtccaccgcgccgccatggcgatggaaagcgccgggcggttcgtgcagaaaatcatttaaaaaagaggaaaacccatgtccgattcctggtacaaagttgacaatgttgccaaggtgtttctggccacggcatccatgcgggacccgcgcgtttttcgcatctcctgcacgctgcaggagcaggtcgaccctgacacactgaacgaggccctgcgccgcaccgcgcaggaatggccgcagtttcaggtcacactgcaccgcggcctgttctggcattattttgaatccaccgatctgatgcccgccgcccagccggagacgaaggccccctgtgcgccgctctacacgccggagcgccgcaaccgtctgatctaccgggtgacctatttcggcgcgcggatcaatctggagatgttccacgccatcaccgatggcaacggcggcctgctctacttaaaatccatcgtgcgcaactatctggcgctgcgccaccccggcgagctggacagcgtaccctcgcccaacagtgcctcggccggggaccttgcgcaggacagcttccgcaacttttacggcggcaccagacgccgcaaggccgaaaaaaagaccaaggtctaccgcccgcacggctttttgccctacgaccagctgcaattctttgaggggcatctcagcgcccggcaggtgctggaccgctcccatgcgctgggtgtatcgatgacgagctacctcggtgcctgcttcatgcttgccatctaccacgatatgcccgcgcttgagcgcagcaagcccatctcgatcagcctgccggtcaacctgcgcaactactaccccagtgagacagcccgcaactttttcaactccgtctatgtgacccatacgctgaccgaggccgacacgctagagaccgtggcccccgtctttgatgcaaagctgaaggaggtcctgcgccccgagaatatccgcgcccagatggacgagtacgaaaagcttgaacatgtacccgccatccgcccggtgccgctcttcctcaaaaacgccaccgtcaagctgttcaccaaattggaggaccgccatgtcacggctgttgtctccaacatggggcgcatcaccatcccggcggagctgcagccctatatccgcagctttgcggcgttctccagctgcaaaacgctctttacggtcgtctgctcctacggggatgaccttgtgctgggcacagcctcggcgctgcgcagcacaacgatcctgcagcggttctaccgcagccttgccaaggacgggctggatgtcaccctctacgccacggaggtggaaaaatgaatacctgcccgcattgtcatatcaaggtcggcggggacagcacctactgcccgctgtgccaaaaccgcctgccgggcccggcggaggcagcttatttcccggcgactgcgccgcgcatccaccgtgcctcgctcttgtataagatcatcgcttttctgctgtcggccgtagtggtggtggccggggcgtttgatttcctgctgctggacgacacgccccaccgccatttcagcctgctgctggccgtctggtctctggcggcgctgcgggtgctgcgctccatcctgcgccggcgctacaacggcccgcgccagatcttcaacctgctgctgctcgtctcggcgctgctcgtctttaccgactggttcaacggctacacaggctacagccttgatctggtcgtgccgattctctgctgcgttgccttggggtgcaacttcgtgtttgcctttctgcgcagccgattcacggcaaatgcgctggtctatctgctcatgaacatcggcatcggccttttgccgtacatcctgctctttctgcgtctggacggcggcaagctggacgcccacagcatcccgtgggtcatctgcctgatcctgagcatcatcaccttcctcggtcttgtcatcttccgcggcagagcgctgaaaagtgagatcgaaaagcggctgcacctgtaacggccgccctgtaaagcctttatctgcaaacaaatcgccgccgcccgttttgcgggcggcagcgatttgttttgtgttattttttgtcaaacgcctctctgcgcttggttgaaagacggaacatctcctcaagaccctcacggtcatcgttgacgagcttttcccgcatatcctgcagcgcgctgtcaaacatgtcgatttccgagatgaggttgtctttattccagaggaacagctccgcccacattttgtcgttgatgcgtgcgatccgcgtcaaatcacggaaggaatcgccggtgtagttggccagttccgagttatcggacgcgcacatcaggctcacggcaatggcatggcaaagctggctgacatagccgatcatatggtcatgctcggcgggggtcaggatgctgattcgcttaaagcccagctcctcggccagattgcggcaccagtcgatgccggcctgcgtgtttttatcggtgggcgtgatgatgaagttggcgggggcaaagcttacctcggcgctgtgggtgatgccgcttgtctcacggccggccatcgggtggctggcgatgaactcgaccccctccggcagggcggcctgcacaggctccaccacgccgcgctttacgccggacacatcggtgaccatcgtgccggggcgtatcagctggccgtactgctcgacccagtcaagcagtacggtggggtagaggccgaagatgatgcagtccgcctgccgtacaagatcctcaaaatccttatttttcccggcgcggatatagtcatgctgcagcgcatagtccagcgttgactggctgtgggtaatgccggtcacgctgtagcccttctggctcagcacctgtgcgtacctgccgcccagcaggcccagaccgacgatcagatagtttttgcttttgtccagcatataaaatcacgcctttatgtcaaaatcttcttttctgtcgctgctcagctcgatttttgcgccaaggctgcgcagcacattccagaatgcgggccagctcttgtccacggcctcggccccgcagagcagcgcaggcagaccgctggcaatggctgccacggccagcgccatgacgatgcgatgatcgttatggccggacagcggtgcgttgggcgcatggagcgccacgccctgaatgtgaacgctgtcgccctccacatcaatgcgggcgcccatcttctgcagctcgtcccgcatcgcgtcaatgcggtcggactccttcaggcgcagccgtcccgcgttgcggatgaccgtctcgccgctgcagaagcagcccagcgtaaagaggatggggcccagatcggggcagtccgccaggtcgatctcggtggccttcaacaggctgcggtcaaagtggtagccgccctccacgggcttgaacttgccgccgcagcgcttgagaatgtccagaattaccttatcgccctgctggctgtcggggttcagccccgtgatggtgatgccgccgatcacacagcccagcactgccagaaacgctgcctgactgtagtcgccctccacggcaaaatcactggccacataccgctgcggcgcagccacacggtacatcatgctgccgtttttgcgcgcgcgggccgataccttgacgccgaactgctgcatggcatccagcgtcagatccacataggaatggctctcgtagggggccagcacctcgatgctgctctcggactccatcagcggcgcggcaaacagcaggccgctgataaactggctcgacacatcgccgggcagggtaaacccgccggggcgcagccgcccaaagatcgtgatgccgtccgggctttgctcaaagcgcaggccctgccggtcaaacagcatctggtacactgcctgtgggcggtcaaacagacgccccgcgccggtaaactgcaccttctgggctgtcaggctgaacagcgggatcataaaccgcagggtagagccgctctcattgcaaaagaccggccgcgtcaccgtgacaaagccgcccgccgtgccgtggcccttgatggtcagggagtgcggctcctcggtgatctttgcacccagctgggctgctgcgcccagcgtcgcgcggatgtccttgctgtactcaatattcgtaatatggctggtgccatccgcaagggctgcacacagcactgcacgatgcgccgcgcttttgctcggcggcacggtggccgtgccgccaaggcggcttacatgaatcttcgcgtccaatttacatctcccggccgatggcagcggcaaccttgcggcatttggcaatgacctcggcaaacttatccggcttcaggcactgggcgccatcgctccatgcgtgggtcgggtcgttgtgaacctcgatctcaaggccgtcggcgccggcggcgacagcggccagcgccatgctctcgatatacttataatcgcccgtggcatggctggggtccacaatgatgggcagatgggtcttttccttgatgaccggcacggcggacaggtccagcgtattgcgggtcgcgcgctcaaaggtgcggatgccgcgctcgcagaggatgacattctcattgccgccggccatgatgtactcggcagacatgatccattcctcgatggtgttggcaaggccgcgcttgagcaggaccggcttgtgcatcttgccgaccgccttcagcagctggaagttctgcatgttgcgtgcgccgatctgcacgacatcgacatactgctcaaactcatcaatatgggcctcgtccatcagctcgctgacgatgggcaggccggtcagctcgcgcgccttgaccatgtcgagaattccctcggtgccaaggccctgaaaggagtaagggctggtgcggggcttgtaagcgccgccgcgcaggaagttggcgccgcccgccttgacggcctgcgccatcgcaatggtatgcgcctcgccctcgatgctgcaggggcctgccatgacggcgatgggggcgctgccgccgattttgacgccgttgacatccaccacggtatccgcggggtggaacaggcggtttgcgcgcttgtagggtgcagacacacgggtcacattctcgacccaagggttggccagcacatccttctcggcaattttggtcgtatcaccgacaaggccaaagacattgtagtcggtaccgcggatcagcgtgaccgacaggccctgcttctcaaaattatcaacgatgcgatccaactcaacctgcggcgtcccccgcttggtagaaataatcatggaaaacctctttcttatatactttttctctataaaacaaacctttggcttccccctcgggggaagctgtccgccgcagcggactgatgagggcaagctttacaaatactgctttttcacggcaggccacataaactttgccctcatccggcgcttcgcgccaccttccccctcgggggaaggcttttacagcgcctcatccgcttcaaacaattctactgctttgtccacggcttcggtcagggtggtgttgttttcaagctccgccgtggcggcagcggtgtagagcggcgtgcgctctgcctccatctgccggagggcctccccgccctttgagaggggacgcccgcgggtcgccagacggctcagcgggcggcgcacccacagcacagggccgttctgacgcagggcacggctgttggccgggttcttgacgaccccgccgccgcaggcaatgacctgactgttgcccttggcaacctctgccagcacctcagcctcatagcggcggaacgcgtcctcgccctcctcggcaaagatgtcggggatattatgcccggtccggcgctcgatttcagcatccagatcgacaaaccgcttatccagcctcttggccagtgccgcgcccacagtcgattttccgcagcccggcatcccgatgagggagatattcgccagctggcggcgcaggcggcggctgatggccgggatcagggtgtcggtgtccagcgtgctgccggtaaaatgctcggcggcaaacacagcctgcgccaccagcatctcaaagccgcccgcagcggtcacgccgcagtcctcggcccgcagcaaaagctcggtgcggaaggggttgtacaccacatccagcacggcctccagccgggggaacgccttggggtcgatgaggcactggcccaccttggggtacatgccgcagggcgttgtgttgacgatgatctgcacatcgcggcggtgcatcgcctcgctgtagagcagtgcgccgtcccgcccggtgcggctggccgtcaggatctgccgcgcaccgccgtcccggcagaccgccgcgaccgtggaatgggtgccgccggtgccgaggatcagcaccgttttgtctgcaaaatccacgccgtgggccttggccagataggaaaagcccgcatagtcggtgttgtagccgtacagccttccgtcccggttcacgatggtgttcaccgcgccgatggcctttgccttagggtcaacctcgtcgcagtaggggatgacaaactgcttataagggatcgtcacattgatcgccgtaaacgcgcgcgcctgcataaagctgcgggcctctgcctcggtgggcagggggagcaggtcgtaggtgtaatccgcaagctgctcatgaatgatcttggagtagctgtggcccagcttgccgccgatgagtccgtacagtggttgctgcatggtttttcacctcctgttttacacttggggaaggccgtgcttctgggcaagggtgccgtagcgcacggtcagcagatccagcaggccgaaggccgtcagggtgttctgcaccacagcggcgcggggcacaatgcaggggtcatggcggcccctgatctgcagctccgcatcctgtctgctgatataatcaacggtatgttgttctttatagatgctcggcgtgggtttgagcacggtgcggaacacaaggggcatgccgttggtgatgccgccgttcacaccgccgtttttgttggtagcggtggcgatctcgccgccgcgcatcgtgaacgggtcgttggcctcgctgccgcgcagggcggcaaagccgaaccccgcgccgaactcaatgcccttgcaggcgggaatggcaaacatcaggtgggccagctcgctctcgacactgtcaaaccacggctcgccgataccggcgggcagtccggtcaccactgtctcaagaataccgcccacgctgtcaccctcgctgcccgccgcgcggatggcagcctgcatcggctcctcctttgccgggtccagcagggcaaaatgcccgggctgcggcgcgggcatcacaaggcccgccgcactcgaaagcggggcatccttgacgcccgcgcactcggcaatgtgggtgtagacctttacgcccagactgttcagcacggtctcgcagatcgtacccgccgccacgctggccgccgtgatgcgccctgagaaatggccgccgccgcgtgcatcctgaaacccctcatacttggcgtaggccgtgtagtcggcgtggccggggcgcagcagatccgctgttttggcatagtcgccgctgcgggtgttcagatttcggatcctcagggtaactgcggtgccggtcgtgtggccattgtacacgccggagagaaactccacggcgtccgcctcggtccgggcggtggaaagcccatcgccccgggcacggcggcggtccatggcggccgcgatggcagcctcatccaccggcagccccgctgccagtccatccagcaccgcaccaaccgccgggccatggctctcgccaaaaatcgtcatgctgacggtatttccaaaggtgtttttcatagtcgttcacttaaatatctcagtaggggcggggctctgctccgcccgtgcccgcctgcggcagggcaaagttccacgggcggagtagaaccccgcccctacgttatcgttatggtaggggttgatgcttgcattgcgaggttgcgaagcaatcaacgcccttgcagggcgttgaaccgcacgagcgagccagctttgctggctcgcggccatccttttggccgccaagcggtcccgcgggcggatgcgagcatccgcccctacagaaattcattccatgcctaaaagtgtcggcaattcggtcatcggcagcttatcggcgcgccagcagccaaggccggggcacttgatgaccgtgatatgatcgccgctggtctttttgtcatgctgcatgtaggccagcaccttttcccggttggcaccggcacgggtgggcaggcccagcgtgcggtagatagcgcgggtgcgcttgagcagcgcattgtcctcgatcatcggcagcatgcccagcgccacgcactcgccgtggtacaggccggtcgtgcggcggccgcgcacaccgcgcactgcctcgatgccgtggccgatggtgtggccgaagttcaggcaggcgcgcacactgccctcgcgctcgtcctgctccacgatctttttcttgaatttcaggctgcggtagacgatctgctcgatgttttcctcgggatgctcgcactcaaacagcgcaaaaagctgcgggtccccgatcaggccggttttcagcgcctccgccagaccgttgaccacctgacggcggggcagcgttttcagcgtatcaaaatccaccagcacgaccttcggctgccagaacgcgccgacgatgttcttcgtctcgcccagatcaatcgccgtcttgccgccgatggaggaatccacctgcgccagcacggtcgtggggcagttcacaaagtcgatgccgcgcatatagcttgcagcgcagaagccgcccagatcccccacaacgccgccgcccacggcgaccagcagatccctgcggtccatgccgaacgccagcatggcctgcagcacctgcccatagaccttgaggcatttgctgccctcgccctgcgggatggtgtagaccgtggcatccgggcattgggccgctaccgtctgcgcatacgcggcgggcacaccggaatccgtcagcacaaagaccttgcggtgctgcagattcgtgaactggtggaggttggccagacatccggccttcaaaataatatcatagctgcggcttttaagctgcattgtcagtttcatgcttcgcacatcctttttcatggcttatttctccgtaccgtcaagggtgaaggcacccagcagccgcagggtgctgcaaacagaggtcagcgtgtccagcaactgctgacatgctgcgccgctgctgtctgccgggcagacaagctgtacatagaaatagtattcaaacggaacatggggcagggggcggctcttgatgcactccatattaaagccccctgcgccgatccggtccagcgcagtggccagctggccgggcttgtggcgcgccgtaaacagcagcgccagccgctggccctgcccggtcatgaccggcggctccgggctgcgctcgatcacgatgaaccgggtcgtgttgtcaccgtcggcgttgatgcctgcgcagaggatctgcaggccatataagcctgcggtctctgcgctggcgatggccgccacggtcgggtcctttagctccgccacatggcgggcagcatcggccgtgttgccccatgtgccggttttgaagccgtgctgctgcacgaaaacgctgctctgggccagcgcctgcggatggctgacgaccgtgcggatggtctgcagcgttgcacccggcaccgccagcagatcctgccggatcggcaggtcacacatgcgggagatgatgatgtccgggtgggtgtacagcagatccagcacggtggaaacatcgcccgcattggagttttcaaacggaagtacgccgaattgcgcatctccgctctgcacagcatcaaagacctcgccccaggtggtgcaggccgtctgccgcgcaaaggggaacaggcgctgcaatgcaatctggctccatgcgccgggcaccccctgataggcagcggtgtcgcggccaaggcgcgcgcgctgatacgcgcgggaaacggccatagcatcattcaaaaaagcgcgatagtaggggcgcagcgtctcatcggtgatgcgggccgcatttttatccagcacagccgcctcacgcgcggcgtcaaacaccggcttgccggtctcggccttatagcgcgccacatcggccaccgcgcgcatccgccgctcaaacagggcggccatctccgcgtcaacagcatcaatttctgcccgggcctgctgtaataagtccatacacgaggctccttttcccagatgaattttgcatttccgcatcgcggtaggggcggggctctgctccgcccgggccgtttacggcagcgcaaagtgccacgggcggagcagaaccccgcccctacggtgcatcagcatgacacgcgccg

SEQ ID NO: 14021 - DNA, 86092 bp, Unknown
  gut microbiota DNA sequence
cagcccctaaggcgcgggtccgctgcgtcgcaacagcggcaattttctttggttctttcttttgttggcaaaagaaagaataacctcccgggaggctgccgttcccgggcaaagattccaccatccggaacgctatcctataaaccgtactgcaaaacacacaaaaatcggcccggttcgtcattgtggtcaaaatgcacacaacgagtttgaaaatatgtgcaactttctgaacaaaacccctttacgaaacggggtgttttttggtacaataaagctatgcaaaagcgtttatctggaactgtgcccggagcaaaattggggtgcgtgccaggcagacgcgggccttgtgcggccctgacacccgcacagcttttatgcaaaactctataaaaacggaggaaagaaaatgcccagagctaaacagtctatggacggcaataccgctgcggcgcatgtagcttatgcattcaccgatgtggctgccatctaccccatcaccccctccagccccatggccgacaccgttgaccagtggagcgctgcaggcctgaagaacatcttcggcaaccaggtcaaggttgttgagatggagtccgaggccggtgccgcaggcgccgtgcacggttctctcggtaccggtgccatcaccaccacctttaccgcttctcagggtcttcttctgatgatccccaacatgtacaagatcgcagctgagcagctgccctgcgtctttgacgtttccgcccgtaccgttgctacccagtccctgaacatcttcggtgaccacagcgacgttatggccgtccgtcagaccggctttgccatgctggcggagagcaacccgcaggaggtcatggacctgtcccccgttgctcatctggctgccatcgagggccgcgttcccttcgtgaacttctttgacggcttccgtacctcccacgagatccagaagatcgagaagtgggactacgaggacctgaaggaaatgtgcaacatggaggctgtcgaggagttccgtgccaaggcactgaaccccgagcaccccaagatgcgcggctcccacgagaacggcgacgtcttcttccagcatcgtgaggcctgcaaccccgcttacgaggctctgcccgccgttgttgagaagtacatggccaagatcaacgagaagctgggcaccaactacgacctgttcaactactacggcgccgaggacgctgaccgcgtcatcatcgccatgggttccatctgcgacgtcgcagaggaggtcgttgactacctgaccgccaagggcgagaaggtcggtctggttctggtccgcctgtatcgtccttgggtttcctccgctctgctgaaggttctgcccaagacggtcaagaagatcgctgttctggaccgcaccaaggagcccggctctctgggcgagcccctgtatctggatgttgccaccaccctgcgtgaggccggcatgaacgacgtcgtcctgaccggcggccgctacggcctcggctccaaggacaccccgccgtccagcgtctttgcgatctacaccgagctgcagaaggatgccccgaagccccgcttcaccatcggcatcaccgacgatgtgaccaacctcagcctgcctgaggtcaagcccgctcccatcacctccgcccccggcaccaaggagtgcaagttctggggtctgggcggtgacggtactgtcggcgccaacaagaactccaccaagatcatcggcgaccatactgacaagtacattcaggcttacttccagtatgactccaaaaagaccggcggtgtcaccatcagccacctgcgcttcggcgacaagcccatccgcagcccctactacatcaatcaggctgacttcgtggcctgccacaaccccgcctacatccacatgggcatgaagatggtgcaggacgttaagcccggcggcgtctttatgatcaactgccagtggaccgatgccgagctggacgagcatctgaatgctgccgacaagaagtacattgccgacaacaacattcagctctacaccatcaacgccatcgacaaggcaatcgagatcggcatgggcaagcgcaccaacaccatcctgcagtccgctttcttcaagctggctgatgtcatgcccatcgacgatgctgtcgagtacatgaaggccgccgccaagaagagctacggcaagaagggcgacgctgttgttgagatgaactggaaggccatcgacgccggtctggacgctgtccataaggtcgaggtccccgcctcctggtccaaccccgctgccgacccggctccgaaggccctgaagggacccgaggctctggtcaagcagatccgcaatatcatggagcccatcgcccgtatggacggcgacagcctgcctgtctccgccttcgagggcaatgtcaacggcgagtgggagcagggtgcttccgcttacgagaagcgcggcaccgcagttatggtccccgagtggaacgccgagaagtgcattcagtgcaacaactgtgcatttgtctgctctcacgccaccattcgtcccttctgcctgaccgctgccgaggccgaggctgcacctgcctccaccaagctggctgacaccaagcccaaggcaagcgagtacaagttcaccatggccgtgtctcctctggactgcatgggctgcggcgagtgcgtcaccgtctgcccgactgccgctatcgagatgaagccgcaggagagccagtccgagcagcaggctgctttcgactactgtgtcgagaacatccgcaagaaggacaatgtccccggcgttgtttccgatatttccgtcaagggttctcagttcaaccagccgctgcttgagttctccggctcctgcgcaggctgcgccgagacctcttatgcccgcctgatcacccagctgttcggcgagaagatgttcatctccaacgccaccggctgctcctccatctggggcggcaccgcttccatcagcccctacaccaccagcaaggagtccggtcacggccccgcctggatcaactccctgttcgaggataacgctgagcacggcctgggcatgcagatcggttacgagaccgtccgcgccaacctgatcaccaaggttgaggccctgaagggcaagagcgctgagctggatgctgtcatcgacaacttcctcgctaccaagaacaacaccaaggccaacgacgagcctgccaaggctctggtcgctgccctcgaggcctgcggctgcgatgagtccaaggagatcctgaaggacaagcagtatctggccaagaagagcttctggatcttcggcggcgacggctgggcttacgacatcggttacggcggtctggatcatgttctggcttccggccacgatgtcaatgtcatggtcttcgacaccgagatgtactccaacaccggcggacaggcttccaaggcctccaacatcggtgaggtctgccagtttgctgctgccggtaaggagatcagcaagaagtctctggctgagatctgcatgacctacggctacatctatgttgctcagatcgctctgggcgccaacatggctcaggctgtcaaggtcatcgccgaggctgaggcttatcccggcccgtctctgatcatcggctacgctccctgcgagctgcacggtgtcaagggcggcatgaccaactgccagaacgagatgaagaaggctgttgctgccggttactggaacctgttcagcttcaaccccgctgccaaggcagagggcaagaaccccttcaccctgacctccaaggccggcgatatgtccaagtatcaggacttcctcgccaacgagactcgttacagccgtctggctcgcgccttcccggatcgcgccaaggctctgttcgagaagaaccaggctgccgccgatgcccgttacgagcatctgaccaagctggtcgacctgtacaagtaatttgtaaggtagcataaaaattgcgccccacgctgcaaagcgtggggcgcttttttgtggggcggggcgcggggtgaggcggctgctgatggacagcgctgcaaagcccctccgacttcgcttcgctcgtcacctccccactgcgtgaggaggctttctcgcgggcaagcccgcgcaaaaggcgccccacgcagtggggagctggccgagcctgcgaggcctgaggggcttttggcgcctcgcgcccgccgtcccccctacctcacaccggccgcagcaccagctccagcccgtcctttccccagccgaagtcggcggcggcgtagccgcgctccagcacgcgggacagggcggggtcagtcagcctgcagcggcgcagcgggtcgcgccatttggccagcccgcgcgccgagaaaatcagcatctgtgcagcacctgccatcgggcgcatgccgcgcagcgtcagcccggccgagagatactgtgcgcagaggtcatcacacatatccgggtgttcaatatccagcggcagcacagcccagacatggtagctggcgtagcgctcggtagcccagcgcagcgccagacgcagaaaatggcgaagctgcgtgtaatcagcgctaagcacgggcggcgtcagcactgcgccctgcccgtctgccccgtaaccggcggcgcgcaggctggtgggcagcgggtcctcggcatagagcggcagcagtgcggcggcggcctgcagttcgttttggccggcgtagtcaccaacaatctgcccctcctccagcgcggggtgcaggcagggcagcagcggcagtccgcccgggccggtcagggtgcgcagcgcggcggcgttgtcggccgtcagtacgcgggcatcaaaggtgtgggtgcgttccagtgtttgcagcataagtaaagatccctccgtaaaaagtcattacaggacttattgtaaggaggaacgggcataaaaaatgtcgcatcccggggtgagatgcgacattttttaagtgtgctttctctgccgtttttcttcgatcagatcctcaaagctgcgctgctgcgtgaaaaaccgtctgtaggggttgtcgggcagcggcggcgatttcgacttgggaggcttgggcggctcgattttccgccgcagatgccccttcagcggcggcagcgggcggctcattcggcggcggtggaaacggcaccggcggtcagggcgtcccacagcgcggcgcagtgggcgtagttctcggcctgctcttcatcccagacgccgcggcggcccagatacagatgctccagcacgctctggttcgtgccggtcgcatcgtccatcagggtatagccgtcatagctgccaagctccagcccggtcagcacggggcagtccgtccagcggtaaaccatcttgcgccaatcggggtcggcgatctcggggtcatcgtccactgtgccgtccagatattgcagcacaccggtgcttttctcaaagccctcggggtcctccagcaggaagatgtaggtcttgccgccgctggccagctcggcgctcagccgggtgacgccggccatctgatagtaggcatcggtgctttcgttctcggcgtcaaaatcgacattgtaggtcgcaacctgcaccacaaccttgccatccccgttctcgtcctggcagaagggggtcagcgcgtcctgcagggcgttgacggtatcgaccggcagctcatgggtgcccacataggcgatctgcacatcgggccgggtctgaaagaccgtgtccttgatgatccaaccgccgaagaaaacggcggcagcgccgagcaccacggcaacccaatggtagtgccaccagttagcggccttttcggcttttgtatattcgcgcgggggctccggcgtctggttgtaggtttccgtgctgtccttcgtgacccatgccatagtgtggatacactccttttataatatctttcctattataccacaaatcgaccgggaaaattgtaaacttattttgaccacgccttgcaagaggaagggaaagagggtatgataaggagggaaaaagggcttcccccttgggggaagctgtctgcgaagcagactgatgaggggcggtccgcccattgctgcccgttaccgggctgcccggcacacctgcccctcatccggcgctgcggcgccaccttcccccagagaggggaaggcaaagaaattaccaacagggagaaccaccatgtccaaccaacctgaaacaaacgaaacaccggccaccggctatacgcctgcgccgcgcaaggtcgggctgccccgcttttttgagctgctcggccgcgacctctggccgctgtataagtccagcatactctgcgcggcgggctttctgcccggcaccgcgctggccattctcggcatgatgggcggctccgccctgctgaccgtggtgggcggcgtgctgggcggccttctgggcgggccgtttttgtccggcatgatcgacacggtgctgcgcgcactgcgggacgagccgggctactggtggcacacctacaagcgcgcatggaagcagaactggaagcagagcctgctgcccggtgcgctgctgggcctgtttgtgggcagctggggctggatgctccgcgcacaggcgatggccggcaacaccagcaccgtgctgtgggtggcctcgctggcaggtatctttgtctgcaccggctttttcagctggctgctggcgcaggtgccgctggtggatctgccgctgccccagcttgccaaaaacgccgggctgatgttcttcggcttcttcccgcgcaccttggcggctgcactggtgctggccatctactgggggctgacgctgctgtacctgcctgcgaccatccttgtgatcgtggtgttcggcttctggctgccggtcacggtggccggtatgatcctctaccccggccttgacaaggtgttcaggctggaggaaacgctcgcggcccgccgcgatgccgaaattgaggaacggatggagcagaaccgccccaacttcgaccattaacagggggaatccggtatggataaaaataccgtactgctgcgggataccgaggcattcatgcgcggtgagctggacaatgtgaccgttgcgcagaacagcattgtgctggatctggtgcagggcagctatgtgccctacggctgctacaccagcgccccgctgccgatgccgctgtttgatgcgctgcgcgtcagctggaacgccgccagccccgatggcacggcggtcgaggcacagtgccgcgtgctggtggacggcaactggacgcagtgggtcggctttggcaagtggagcccctgcctgcaccgggagggcgtgccctatcaggagcgcggccccgtgcagcgctggcatgaccacctgcagctggacagcaaatgtgccacaatggtgcagctgcgcatctacctgtacacccgggacgagaaggccagccccctcgttactttgctgggcgcaagcacgcatgtggtggatgtgatccccgcgcgcgggcggcccgtcaatgcgcggctgcatctgatgccctacgcggtggcgcaccgcgcaccggcgctgcgcccatggatggatctggccattgcgctggcaagcctgaccaaccgctggggcgcggacctgctgcccgaggagtttgcccaggtgctgcgggattggcgcgcccccgatgaccacgacccgcgcagcctgagctttgccgccgcggctgccgcacggtggggcttccccgcgtgggtagcctacggggatctggcgctgctgcgcgccgaggcccgcgccggctgcggtgcggtcgtgcgcctgcaggcggccccggcgcagaccgccgccggtatgccggagacccgctatgtggcggtgcgcggctttgccgccatggacggaaacccgcaggtgctgctctgcgacccatgggccggcgagaacgactttgactgcgagacggcgatgccgctggatgattttatggtggcgtgggacaatgtggcgctgctgatgcgccagcgcaccgacaatacgcccccgctcggccgtacccggtgcagtgcatggctgcgcccggtgggcaccgatgcccccggtctttaccggctttacatcaacggcgaggagcatcccctgccggaggatttctgtgcgcagggcggggtgctggcctacagcctgcccgatgcctgcccccacgcgaccaccgcccaccgccgctttgtctataccgagccgaccaacggcggcattgtgctggagcatggcgacacccaccgcaaatacacggtctacgccatcgagacagacggcagaatgatcgtcggcgatgtgacggtgtgacatcgaaaaagcgatgtttaccccctctgcggggggagtctgccccgcaaagtacggttttttcaatacactaagaggagcttcggctcctctttttttgtggtgcatgtacagtttctcttttacaggtgtcttgacacatgacatgaacggtgctatactgggcaacgcgatcatccaatacagagggacaggaaatcagggaaactatgatgagatttgatgaatactacgatgttgtcgttgtcggcaccggcgcagcgggtttatactgcgcgttgaactttccaaagcgttataaagtgctgctgctgaccaagcagaaggcggacgagtgcgattcctttctggcgcagggcggcatctgtatgcagcacggcgaggcagactatcgctccttttttgaggatacgatgcgggccggccactatgagaacgatgccgccacggtggacctgatgatccggtcctccaactcgatcatccgcgatctggtgcgccgcggcgtgcggtttgcccgggacgaaaacggtgcactgcgctttacccgcgagggcgcgcactcccgcgcgcgaattctctttcatgaggacgtcaccgggcgtgagatcacccagaccctccttgcggaggtcctgcggtgtgagaacatcgagctgcgcgagaataccgtgatgctcgacttctttgccgatgcggcagcctgcggcggcgttgttgcgatgggcccggacggcgcagtgcgggccatcggcgcgggggcggtcgtgctggcctgcggcggcatcggcgggctgtacaaaaactcgaccaactacccccacatcaccggcgatgccattgccatggcgctgcgccatggcgtggcctgccgccatcttgactatatccagatccaccccacaacgctgttcagccgcaaaaagggccgccggttcctcatctcggagtcggtgcgcggcgagggcgcgctgctgctggacaaaaacggaaaccgctttacgaatgagctgcagccccgcgatgtcgtcagcgcggccatccgcgcccagatggagaaggacggcaccgagcatgtgtgggaggatatgcgccccatcggcgaggcggtcatccgcgagcatttccccaatattcttgagcggtgtgaggaggagggctatgaccccctgcatgagccgatccccgttgtgccggcccagcactattttatgggcggcattcaggcggacttaagcagccgcacggccctgccccggctgtatgcctgcggcgagacctgctgcaacggcgtccatggccgcaaccggctggccagcaattccctgctggaatctctggtctttgcacagcgcgccgcagatgatatactgtttggggagccgcccgcctttacgggcgatgcgcccgaccttgccccctaccgggagaccgagccgctgtttgcggcctaccgaaccgaagttttgaatgcgatcgagaggagcaaaaatcatgaatgagatcatgcgtcttttaaatgtagacccgctgctgctgcaggccctgcgggaggatatgcccggcgaggatgtgtccaccaacgccgttatgccctgcgcctgccccggcaccgttgacctgatcgccaagcaggacggcatcgttgccggtctggatgtctttgcgcgcgtctttaccctgctggacccagccaccgaggtcgagttcttctgcaaggacggcgatgcggtcaaaaacggcgagaagctcggcgttgtcaacggcgatatccgcgtcttgctctccggcgagcgcgtggcgctgaactacctgcagcggatgagcggcattgctacctacacccatgaggtcgcatccctgctggagggcaccggcatcaccctgctggacacccgcaagaccagcccgaacaaccgcgtgtttgagaagtacgccgtccgcgtgggcggcggctgcaaccaccgcaccggcctgtctgacggcgtgctgctcaaggataaccacattggcgcggcgggcggcgtggccagggctgttgccatggccaaggcctacgcgccctttgtgcgcaagatcgagatcgaggtcgagaaccttgaccagacccgcgaggcagtcgaggccggtgccgacatcatcatgctggacaatatgagcgatgccgatatgcgcgccgccgtgcagctgatcgcaggccgcgcccagaccgagtgcagcggcaatgtcacgaaggaaaacatcgcccgcctcaaggacatcggcgtggactttgtctcaagcggtgcgctgacccactcggccccgatccttgatctctcgatgaagcatctgcgcccgctggacaaggaggaaaccttatgaccaccgccgagcgccgggaggctattctggcccagctgggccgcaagcccatcgcagcccggacattggctgccaagtacggcgtcagccgtcaggtcatcgtgcaggatctggcggtgctgcgggccgcgcacccgaatgtgatctcgaccgcgcgcggctatgtgcgccagcaggcggagagcgcctgcacccgcgagttcaaggtgcgccacacccccgcccagactgggctggaactgaacctgatcgttgactgcggcggccgggtgtgcagcaccagcatcagccaccgcgtctacgggcgcatcacggtcgagctggacatacgctcccgtcaggatgtgctggaatttctgcaggcgtttgaggacagcgcctcgaccgtgctgtccaccgctacggacggctaccactaccatctggtggaggcagccacccccgagcggcttgatctgatcgaaaaggagctgcaggagcacggctttctggcaccgctgcagccgtgggaaaaataacaggccgtatataaagatagaggttgaacagtatgacaacgcatgagctgcagcaggagatcctgcgcctgaagaaagagaagaatgtctgtatcctggcccacgcctaccagagccaggccgtgctggaggttgccgactacaccggtgactcctacgggctgagcgtgcaggccgccaagaccgatgcggcgggcgttatcatgtgcggtgtgcggtttatggccgagacctgcaagatcctcagcccggaaaagaccgtctggctggcaaacccgatggccggctgcccgatggccgagcagctggacctgcccgcactgcgggcgctgaaggcgcagtaccccggctacgccacagtggcctacatcaacacgacctcggcgctgaaaaccgagtgcgatgtctgcgtgacctcctccagcgctgtcaacatctgccgtgcgctcgatgccgataagatcctgttcattccggacccgaaccttggcagctatgtggctgcgcagctgcccgaaaagcagtttgcgttctaccacggcggctgcccgcggcatatggtcgtttcggcggccgatgtagcccgggcgcgcgccgcgcacccggacgcggagctgctcgtccaccccgagtgccgcgccgaggtcgtggcgcaggccgactatgtcggctcaacgaccggcatcatggcgtatgcgaaaaaatccgccgcgcgggagttcatcatcggcaccgagaacagcatcgtggagcatctctccttcgactgcccggacaagagcttctacccgctggccgtgcagctgacctgcatgaacatgaagctgaccaccctgcccgacatctaccgctgcctgctgggcaccggcggcgagcagatcatgctgccggccgatattatggccggtgcgggccgctgcatccgccgcatggttgagctgggcggctgatacgccccacgctgcgggcgggctttcggcagactgtttggggcgctttccgcttttgcgggggcgcccctttttatttttcttgcaaaatcgcttttcagcgggtacaatagtatccgaggtgaactacgatgaagctgctcattgcatcggacatccacggtgcggcggactgctgccgcagcctgctggacgcatgggaccgcgagggtgcggacaggctgcttttgctgggcgatattctgtaccacggcccgcgcaacgacctgccgccggcgtatgcccccaaacaggtgctggccctgctcaatgcgcgcagggaccgtattttctgcgtgcgcggcaactgcgataccgaggtggaccagatggtgctggaattccccattctggccgactatgccgtgctcacagcgggggagcggctcatctatgccacccacggccacctgtacaacacggcccacctgccgccgctgcagccgggggatattctgctgcacggccacacccatatccccgcgtgggagcagttcggctgtgacaacctgtatctcaaccccggctcggtctcgatccccaaggaaaacagcccccgcagctatatgacgctgcaggacggcgtgcttgcgtggaaggctttggacggggcagcgtatcataccctgcgcttgtaatacacgaaacctgacaaataggagaaacccatgaaaatccctgcaaaaggctttacccacggcggaaaattccatgccgatgatgttttttcgactgcactgctgcagatcctgcgccccgacatccagatcacgcgcggctttaccgtgcccgatgactttgatggcatcgtctacgatgtaggcggcggtatgttcgaccaccactccgagccgcgggagacccgccccaacggcgtgccctacgcggcgttcggcctgctgtggcgggtgctgggcgcccagcttgtgggcgagcatcaggcccgcctgctggacgagaactttatccagccccttgacctgaacgacaacaccggcgagcagaactcgctggccgatgccatcggcagctttaacccgctgtgggactcgaaggatgaccccgatgcctgcttctggcgcgccgtgccggtggccagacagatccttcaaaacgagatcgccgccgccaacgccgtcaaccgcgccgatgacacggtccgtcaggcctatgccaacatgcgggacggcattgttgtactgcccgcctatatgccgtggaaaaacggcctctacaagaccgatgcgatctttgtggtctaccccagccagcgcggcggctacagcgcccagtgcgtcaatgaccaccgcaccaagcgcagcaagcagcccttcccggtcgcgtgggccggcaagccggaggagcagctgcgcaagatcagcggcctcggcctgcggttctgccaccccagccggttcctgatcaccgccgatgataaggccaccgccatcgaggcctgccgccgcaccctgcgggccgccggccgcccggtcagcgaatgaccggcacggcaatgtacggccccgcccccagcaccgccgccgaccgcgagccgacccccgccccggcgtgggtctacctgctgcgctgcgcggacggcagcctgtacggcggctggacgaatgatcttgcccgccgccttaaggcgcaccgcagcggcaagggcggcgcgcggtacacaaaaagccatggccgtgcgtctgttcagcttgcctacgccgaaaaatgcgccgacaaaagcgcagccttacagcgcgaagcagcgattaaaaagctgcctaagcttgaaaaggaggcgctggccgcacagtggcgcgccgacaatgcgattaccctgcgcatggccgtgccggaggacgccgccgccgtctgtgcgctgtacaactggtatgtccgccacggcgtgcagacctttcagtacacgccgtccacggtcgaggactaccgcgccaacatcgaggaggtgctgcagcacgcgccctttctgctggcggaaagcgccgacggccgcctgcgcggctttgcctgcgcccacctgtggcacacgcgggaggcctatgcatgggatgttgagacgaccgtctactgtgcgcccgactgcatcggtcagggcgtgggcggccggctctaccgcgccctgctggcgctgctgaaaaagcagggctactacaccgcctttgcgctggtcacgggcagcaaccggcagagcaacgactttcaccgcgcgctgggctttcaaaagatggccaccgagcggcgcaccgggtataagttcggccagtggctggaccttgactactggcgtctgcccctgcaggatggtgagggcgagccccagccggtgagaaagcagctgaccgcagaggaaattgcggaagtgacagggtaacgccagccgggcaaagcccctcaggcctcgcaggctcggccagctccccaccttgtggggagcctttttgcgcgggctttgcccgcgtgaaagcctcctcgcatagcggggaggtggtcgagcgaagcgatgaccggaggggctttgcagccttctcgcaagcgcccgccccctgcaacaaaccgcacctgccttttttgacgaaaggcaggtgcggctttttttatacagatggtatacagatgtcagattgcgccgttctcgcgcagccaggcctccagctcggcggcagggcggtagccgaccgagcggctgacctcctgcccgtttttgaagagcagcagcgccgggatggcgtcgatcttgcgggccattgccagctgcaggttttcatcggtgttgaccttgcccaccttcacggtggggtgggcggcggccagctcctccagcacggggcccatcatcttgcaggggccgcaccagtctgcccaaaaatcgaccacgaccggcagggcgctctgcagcacctcggcatcaaaattctgttcagtcagcttgatagacatagtcattctccttttgtccggtgcaggggcgggcaatgcgcccctgcggttattgtacggcatcctgcagcgtttccagcagcttcgtcagcttttcctcggcctgcgggccgccgaagttgatcatattgcgcagggtaagcgcgtcaaacatctgggccatggcttcgggcggcatcaggccgtccccgccgccgttggtcatcgctgcggtctctgcgcgcagggcatgctgcaccacgggcgcggtgcgcggatccgccagcaggatgcccagcggcgtggtctcgtccacctgcagcggcggcaggcgggtgcccgcgtagtgcagcggcagcgtgacgcggatgtcccggctggaatggccgatccggatctcataccggccgggtgcggcgtaccagtcatgcagcgcggcatcgtaatggctcaggtcgcggggcgtcagggtaaaggtgacgaccttctcctcgccgggctgcagcgcgatcttttggaagccgcgcagcacctgcggcacccgcccgccggccaccggcgcgccggtcgcatcggctacatagagctgcacgacctcggcaccctgcatggcaccgctgtttttcacggtgacctgcaccgtcacaaggccctgctccgccagcgtgtcggcgctcagcacggcgttgcggtagacatagcctgtgtagctcagcccgtggccgaagggccagcgcaccggcatacggcgggcatcgtaccagcggtagcccacatagacaccctcgcggtagtcggccgtcacgccgtcacccgggaaatccagatagcagggcgtgtcctccagccgcaggggccaggtctcgggcaggcggccgcaggggtcggcatcgccccacagcagggcgtcctcggcctcgccgacaccctcgcccgcaaggtacatgcagagaacggacgatacatcgtccgcccacggacattccaccggcgcaccggtgtgcagcacgaccacggtgttcttctgcacggcggccacccgggcgatcaggttgttctggcagtcgggcaggcgcatgtggcggcggtcgccgccctcgctctcaaagctgtcgggcaggcccgcaaagatgaccgccacatcggcagcctcggcggcggtgacggcccgcaggaactcggtctcgtcccgctggtcgcggtcggcggggaagccctcgacatactggaccatccggtcatgcagcagtgcggcgtccagtgcgctgacggcggtcgtgtttacatggcttgagccgccgccctgatagcgcggccggtcggcataggcgccgatgtagacgaccttctgcccgctgtgcagcggcagcgcgccaaggttgcgcagcagcacgccgctctgggcggccagctcggcggccagccggtggtgcgcggcgcggtcaaacgcggcgggccgctgcgccagatccgccgccagcaggacgatgttcaggatgcgggtcacggcgcggtccagcacggcctcgtccagcgcgccgctgcgcacggcgtcgatgagcctgcggtcgttgaccccctgcgagccgggcatctccagctcaaggccggcggcaatgcccttgacacggtcgttcaccgcgccccagtcggacatgacaaagccgtcaaagccccacgccccgcgcagaatgtcggtcagcagcggcttgttctcgctcgcataggcaccgttgagccggttgtagctgcacatcacggtccatgggcgggcctttttcacggcggcctcaaaggcgggcagatagatctcctgcagggtgcgctcgtccacacggctgtttaccgacaggcggcgggtctcctgatcgttggcggcaaaatgcttgatgcttgtgcctacgccctcgctctgcacaccgttgatgaaccctgcggccagctcaccggcaaggtaggggtcctcggagtagtattcaaaattgcggccgcacagggggctgcgcttgatgttgacggcaggccccagcaggatctgcacgccgttggcgcgggcctcccgcccgagggcggcacccatgcggcgggtcagcgccgggtcaaaggatgcggctgccgcacacccggccgggaagcagaccgcctcgatgctgtcgttggggtcggtactgccctcccgctgggtgcgcaggccgtgggggccgtcgctgaccttgatggccgggatgcccagccgcgcgaccgccttggtatgccagaaatccgcgccggagcaaagcccggccttctcctccagcgtcagtgcagccacaagctcttgcacagtagggttcatgttggttctcctttgaaaaatagcatgtgcagttttccacattataacacgcatggtgtggaaaataaacgaaaaaagtgtaaaattatagctgtggggacacaaccgggacacaatcctgcggtatactacccccaaaggagagaaaaagcgatgaatcacatactgatcgcagaggatgagcatctgatcgcgcggctcgttgagatgacgctgacccgcgccggctaccgctgcaccgtggccgaggacggccgcacagcggcggatctgatcgaaaagacggattttgatatggcgatacttgatattatgctgcccgggctggacggctatgaactgctggccagcctgaagccgcagggcgtgccggtcatcttcctgacggccaagagcgctgtgaaggacagggtgctgggcctgcggctgggggcggacgattatatcaccaagccctttgccgccgaggagctggtggcccggatggagactgtgctgcgccgcaccgggcgcggcgggcgggagctgcgcgcctttgacatacggctggacacccaggatcgcaccgcatggcgcggtgaggagccgctggatctgcggcggcgggagtttgacctgctggagctgctgatgcgcaaccggggcgcggcgctctaccgcgatgtgatcttttcgcgggtatggggcggggagccggacagcgaatgtctgcgcaccgtggatacccacattgcccggctgcgcaaaaagctgggctggacgaccgagcagctggagacgatctaccgagtcggctaccgccttaaaaaggaataaggcgggcggcgggggagagaacggtacgccagcccgaaacccttcgggctggggcaagattctcaccctccggccccgctgccgcccgaccatcgccctaccatttataaaggagagcaatcatgcgttacgcacaaaaaatggtctgcctgctggtgctggtgctggcggcgtcctttggcatcggcgggtgcgtgctgctgtacagtgatttcgccgtgcagcgcagccgcgccgccgtctccgacgccgccgtccatgcgcaggcctgcaccctgctgcagacggagatcatcgacctgcagcgccgcggtgtctccatcggggacgccgccgtccatgcgcaggcctgcaccctgctgcagacggagatcatcgacctgcagcgccgcggtgtctccatcggggacgccgccctcactgcccgggtcgaggcgcagcagcgcccggccgcactctggcggggggatacccttgtctgcgccaccctgccggggctggcagacttcccgctggagaatgccgccgccgtcaccgtccgcaccgagggcgcagtctacaccgtctacgccagcgacctgcagggcgggctgcggctcgtcactgcctacgaccgcaccgagctgtaccgcggccgccgcgcagcgctgacccggttccttgcgcttgaggtcgtggtgctgggggcggcagcgctcgtcacggcgctgctggccgcgcggctgacccgcccgctggctgtgctgaccgaggccggggcgcagatcgccgccggggactatgcccgccgcaccgcgctgcacaccggggacgagatcgagacgctgagccgcagctttgacacaatggcggacgctgtgcaggagaagatcgccgacctgcaggccgatgtccaacggcgggaggattttgtcggggcgttcacccatgagctgaaaaccccgatgacgagcatcatcggctatgcggatattctggccacaatgcagaccgaccctgcagagcagcgcgaggccgcggcagccatcgcccatgaggggcggcggcttgaggcgctgagccataagctgctggcgctgcttggcctgagcgaggaggcgctgaccctgacggcggtcccgctggacagcctgtggccacggctgcgggcggcatgcccggccgcggtgctgcagaccccgccgccccctgcgcccatcgtggccggggacgccgacctgctgctggatctgctctgcaatctggtgcagaacgccgtgcgggccgctgcgcccggcagccccgttgcgctgtactgcagccaaagcggggatgccgtcaccctgacggtggccgatgccggctgcggcatacccccggaggaactgccccgcatcacggagcctttttatatggtggataaatcccgcgcgcgccgtcagggcggcagcgggctggggctggcgctttgccagcgcatcgcggcggcccacggcagtgcgctgcagatcgaaagcgagccgggcaagggcacacgggtcagcgtaacgctgcccgtctggaaggaggtgcagtcatgaagctgtgggagcatccgcgcctgacgggggcgctctgcgcggcggctgtgctggcctgcgccgcaatgcccgccgcctttctggcagtgacggacgccgcatacatcgggcgcgttgtgccggtggccgacccctacacggcgcccacgccgacggcggatgactactatatcctgcgccagctggcagcccgccgtcaggacagcgccatgctgccgcgggctgaggagccgaccgcgcccggcacccccaaaatgtacataggggcgtccgcaagcctgcagtcgatgagctacgccgatgccgccaccgccgatgcggcagagcaggcgctgcagcgtctggccgactgcggcgtgctgcccggcgtctgggccgcgcagcaggacaccgccgccgaggaggacagctacacggattatgacggccgctggtatgacctgagcgcagccttctgcgcgaccgacagcctcggctttgtaacggtgcggcgctataccctgcagggggatatgctgctgacgcgcagcagcgtcaccatggacagccgcaccggcgcagtggtggaggtctggctctcgctgccggccgaggacgccgaggcgctgcccctgcccgatgagaccgccctgcgcgcctttgcagcgcaggccgggctggaaagcctcggcgattgggccgtacccgccgacagcacttaccgctgcgccctctgcagcgagaacggccaagcgcttatcacggcctcgacccacccctatacctacggcagctacaccggcacagcaggcgaccggtggtattacagcctgagcctgcggaaaatgtaaagggcggcagtgtctccaaacacccatccgcccacgccatgcggtgcggctgtcacgcgggcgaagcccgcgcaaaagcctccccacgcagtggggaggtggccgagcctgtgaggccggaggggctttgcccgcttccctttaccatttagctgaaaaatcaaaagaaggaggcccacatgaaaaactatatctccatcatcctgaccgctgcaatagctctggctctagcggcctgcaccgctgcccccgacccgacaccccttgccacccccacgccggagccaacggcagcgcccgcagcccccacgcctgcccccgccgccgatttctacaccctgaaaagctacaacggctcctttgatgacggcaccgcctactacgagttcacgcagcggctcggctgcgcgctgctgctcaagaccgactatgccacggcggttcagtccgtctgctgcgccgtccccggctgcgcccacgataccgccgcctgcccggcatattttccggggtgggccggccattatagggtggttgcagcgggggacaccgtgtatgtctggcatatcgcatatttctatgacgaccagagctgggacgactactgggcggaaaaactggcaagcggcgtcagaactacgcagccctttgacaccatgaccgatgcggaatttgaagccgagcaccgcggcatctggaccgagcagagcacgccgccctgcctttacgccattgaccccgctgcgggcaagacccgcaccgacctgccgctgacctactgtgactacaacgtggatgtctgcgatggcagcacgctctacggtgagcgggtgacaataccgtacagaacgcaggcgtctgccgtaagagtcgggccaacgcccgcctgccgcatcgaccttgccaccgggcaggcggagacctttgtgctggagcccaccgagcattaccttacgggctttgacggcgcactgctgacctgccgctatgtgaccgatgcgccgctgcccaccgatgcggagcagtatgccgccgccatccagagcgccacggtggagatcgaccgccttgacccccgcacgggtgcgcgcaccaacctgaccgagcgtccctacagcgatgccgattatgagaagaacggctgctttatcggtgtgtacaacggcaaggcctactttgaggagcgcgagatcataccgggaagcggcttccgccgcacggtcctgacaacggtggacgccgcaggccgcaccgaaaccgtctgggacccgtggccgcaggcggaatgggtgctgggcgatgacggcggccggtatatctggctgtacagagataactacaatacaagctacgccgcctgcgccctgctggacactgaaacagggcagatcacgccggtgacgcaggcgctgcagaccggcagcggtgccgtcagcctgcgcggcaaagcgcacgatggccgttggctggtcgtcatcggcgcagacagtgtcggaaggaccacggactacggcctgatcgacgccgatcagttcgccgccggaagcacggactggcagccggtgacaatgtggcaggggtaagacggcagcctgaccccgcaggctcggctgcgaaagtataaaaatgtccttgtataaaatacagtggcacgcctgctgcaaacataattttgaaaagtaaacaaaaaactcttgaaaaatttcttttatggtggtaacatgaaggcggtgtttgaatttatataaaggagtgtcgttttatggcaattcagaatgcttacctgcagggtgtatatgagggccttgcaaagcgcaaccccgagcagaaggagtttttgcaggcggtcgaggaagtccttgagagtctggagcctgttgttgaggctcaccccgaatatgagaaggccggcctgatcgagcgcatggtcgagcctgagcgcgtcattctgttccgcgtgccttgggtggacgatgccggtaaggtgcaggtcaaccgcggctaccgcgtccagttcaactccgccatcggcccctacaagggcggtctgcggttccacccctccgtcaacctgtctatcctgaagttcctcggctttgagcagtgcttcaagaacagcctgaccggcctgcccatgggcggcggcaagggcggcgctgactttgacccccacggcaagtctgatgccgaggtcatgcgcttctgccagagctttatgaccgagctgtaccgtcatatcggcccggataccgatgtgcccgccggtgacatcggcgtcggcggccgcgaggtcggctatctgttcggccagtacaagcgcctgcagaatgagtacaccggcgtcctgaccggcaagggcatccccttcggcggctctctcgcccgtaccgaggctaccggctacggcctgtgctacttcaccaaggagatgctggccgacgccggcaagagctttgagggccagcgcgttgtgatctccggctccggcaatgtggccacctacgccaaccagaaggccacccagctgggcggcaaggtcatcgccatgtccgactccaacggctacattgtggacgagaacggaatcgactataaggtcatcaaggagatcaaagaggtcaagcgcgcccgcatcaagacctatctggagtatgtccccaccgccaagtatgtcgagggcagtcagggcatctggaccgtcccctgcgacatcgccctgccctgcgccacccagaacgagctgcgtctggacggtgccgaggctctggttgccaatggctgctactgcgtagccgagggcgccaacatgccctccacccccgaggccatcgcttacctgcagaaccacggcgttctgtttgccccggctaaggcatccaacgccggcggtgttgccacctccggcttggagatgagccagaacagcctgcgcctgtcctggaccttcgaggaggtcgatgagcgcctgcacaacatcatggtcaacatctacaaggctgccgccaccaccgccgagaagtacggcatgaagggcaaccttgtggccggtgccaacatcgccggctttgagaagatcgcctccgccatgatgagccagggcattgtctgatacaagcgcagacagccccctgtaatgggcggtaaacttttttcgtaaaacctattgacacacgcgccgtgctgtggtattataatcaagcaccgcgaaacaagcgcgtgtgtcatatatcgcggagtagagcagatggtagctcgtcgggctcataacccggaggtcgcaggttcaagtcctgtctccgcaaccaacaaaagctcgttgaaacgacaagtttcaacgagcttttttctacattatggcaaaagtggtaacaacctggtaactttgaccccaaaatgaccccaaaacggcaaaacgactgcgcccggaaggctgaatttttcaaccgtccaggcgctttttgtggataaattttgcggagttggcaggtaaaaataggagcggtcagcgttccagtgcgtgtgaacgctttgctcgttctcgctgctgctctagccggttttccatgatttttacggatgctatgattttgtgccagtcgtgttcgaggacataatcgttgtccttgcagaacttgttccaaattttctgtatttcgccattggattctacggattcaaggatggctgcaaattgcgggataaatccagtcgtgcggcgtgtgttgctggttgcgaggaatgcacgatacaaggtcgcgtcgttgattgcaatgccgggtttcccagttagcatataaatgtcgtaaaaatcgcgcatccgtgtattgcttgtgccacggtacatgatggtttccagtttctcggcaagcagcgtttcgagattgtagctcataatctgcaaactgcggtcctcaaacatgagaggataccgatattcaatggcacgaggtgtgatagcatcgccggtggaaatgtcaattttcactttctgccgcagaacgtcaagcgtaccaatcagcgtgaaacgcaagccgggatagtcatgttcttccataatgctttctgcattggtaatgctgaaaaccacgccgtcctgcaggtcgatattgacgatttcttgaatcgtccgtgtagcgtcctccaatgtcagcggcagggcgactacggtggcatcaatatccattgtggcacgttggtggatgccgaccattgaggacaccagcatcccgcctttcagtacaaaatggctgttgtactgggaaacggcgagacgctctaaaaagcgttccatcatgtaggtacgcagcagagtctgcgacttcagactatcgccgtgcgtcagatttttgattttatccttcaactgtcgtgaggtcttgatcatagtaaaaacacctccaagtatcgtcttacgtcatcctcaacttttagtgcgcggctgcaccggatgagatgagacaggtttttgtgaccgtgcagcatatactcgcggatggcagtttggtaggtttgcacatccatagcaccccgctggcgaatgacatcgcagagtgtgcgctcacggtcataagtgggaacggtattgccaaaagtggtagtggcagaggtcagccccagtgtgaaaatctccggggaaactgtatgcacaatcacgccctgcttgcgcagatgtgtggcgttgtaaccctgtttgaccgtaacatagatgtggtgcggctcgcgctccatcataccgtggagcgccaacgccgactggtgggaaaaaatgatattgctgttgcgcaggtggagaacatacatatcatccggccatgcatcgcgtgattggtatacgccatgcgcgacacgctccagttctcggctgcgggcgtattcggcaaagtagggtttagagatgccctgcgctgtaaccgcgcgggtcgtgatgtagccgttcccctgttccagcatggtatcaagctgttcaaattttgtcatgtggctcacctaactttcgcgctttaattataatagataaaagcgcaaaagtaaacacaagatagtgcgcctgctggaaatttcaacagacgcactgggggtgttgaaaactattcagtggcattacccggccttgacgagtaccaacacgctgttgtttggcacgacgatctgttcctgtttggtaggaatgggcgggttcttgtactggcgcagggctttttggatttgcagcttgacctccagcagggcggcatccaatgtaggggtctgcacttcaatttttggaaagtcaggaacatgggcagtgcagccgtccggggataaggtgcagagtacaggataaggctggttctcaaccaagatactgtactgcatcccgaacatatcgtccatcttgtccatttcgtgccgcttatgttcgtccatgctgtgaacgtaggtgtccattgtgaacgctacggagtaatgaccgaggatggctgacagggtcttgtagtccatgccgcgctctagagcgcgggtggcaaaggtatgccgcagggcgtggaaggtaaagtggccgatgtcggcatccttcagcatgtggtcgtaatagtccttgaaggtcttttgctcaatgtagtggccgaactcatttgtaacaacaaagccgttgtcagtgaatttgtcccctgcccgctgcttgtcctgtgcttgcagattcttccagcgggtaagttcgtcaatcattgtgtgtgtaagcggaattgtccggcgggaattctttgtcttgggcgtaccaaatacaatctcggttttgctctcgtctgcatgggcctcatatttggcaaggcggttaatggttcgcctgacatgaagctgcgctgtggaaaaatcaatgtcctcccacttcagcgccagcaattcccccatgcgtaatccggtacacaagtctaagcggataaacacgccatagcggtggcggtagctggcttgcaccagcgcccgctgctggtcgttggtaaagactacgatttcgggtttctctccgctgggcagggtcacggcatcgcagggattgtacactaacaagcgctcctttacggcctgttgtaagcacttgtgtaatgccatgtggtagttgcgaagcgtcttgggcaacagcccttcctcgcggaatttgtagttgtaaaactcctgcaaggtgtgtggctctaactttttcagcaggattttccccagcacacgaaaatgcttgttgagataactgcggtagctggcgtaagtagattgcttgacggtgtccttcatataggtgtccagccagtattcataccactctcccagtgtcaccgacataggatcgcgccagccctgtgtgcggacttcgtgggcttgctgctgcaggattgcgattgcctcttgccgcgtgctgcagcaggtggatgtgcgtctgggtttgccggtcttgtagtcgattccggcagatagccgcacctcccaccgcccgtctgttcgctgacggatgttgccctcgttgtggccgcggcgggtggatttgtgggttgtgtctttcacggtgtatcgtctcctttcgcagcacaaagactaccacaggtctgcgggtaaagctattcaccagacccgacaatcttcgggttctcgggttgggttttattgaccttttgccgttcgagccagtccagtaactcatcccgccgcaccagcagtcggtttccaatgtggaacgccggaaaagtcgcgtcgtgaaatatgcggtaggtggtcgagcgtgagataccgaagtaagtttgcacctccttggggctgacaacattgggtgaattttgaaattccgtgttcatgagttcctcctatgtagataaaattaaaagttcttcactatatagctgctgagaacggcgaaaattacgaggttttttaaactgtttaaaaaaagttcaaatttttagaaagattccaaatcatatcatacagaccggcagtcgcaacttttgcaactgtcctcaaaattttcgaaaaaattatctctactatatagccactgggaaaaggcaaaaggtaacgctcgctgaaaaaataatggaattttttcattaaatttcagtataacagtataacttgcaggattcctgcaagtttagagatgtaaagcgaagatttttttctcaagaactggcctaaacgccaaaattacacttcaaaaacagcatatcacccattgtgctaaaaacccttgcacttttacaaaatatctaaatccattttaacaggcaatggggcaaaaaccctgccacattactcaaaataaagcaggcaagccgcagattaaaacggcttgcctgctttaagtgacgatggtgacggtagtgacgatgtttatgggatatgggtaggggtatgcaagaaagaccgtcaccaccgtcacggatatgcgaaatgacgcttgtggcttaccattgaagaaagcaaaaacaatgatgctacgaaaaacacaaaatcggaatgacgcagatgacgctaatgacgctgaatccgggatatggtatagggatatccccaaaacagcgtcacaagcgtcatcagcgtcactatcgtcacgcaagaacagcgcgggggtctgggggtacgccccagagatgtgcatgtggatgaccacatgctatgctagcaaaacacgtctacctccaaaacgatgacaaacaaacccggtacccgcacaaattcgtatatgctctcaagagtgaatcacttctgattcatcccaaaatcttgactcgaaaaagtgaatccgttctgattcactttccaaaaagagttacgcagacaccttgacaactgtaccgcactgcggtatgctgtaagaaaagtgtaagtgcttacaacgccgcagctgcggcaaaggcggacagtgaggaagtcatgaacatctacgatattgccaaggaggcgggcgtttccattgccacggtttcccgtgtgctgaacaacaaaggcacggtcagcgcggcgacccgtgcgcgggtggaggctatcttaaagcagaacaactacacccccagcgccattgcacgcggtatggtgagcaaatctatgcgtaccgtcgcggttttgacggtggacatccgcgtaccgcactacgcccgcaccgcctataccattgagcgggagttcagccgccgtgggtatgaggtcatcctttgcaacacaggcggtgaccgggcagaaacgctgcgctacctgcaggccgtcaaccagaagcaggtggacggcatcgtgctggtcggctcggtgtttgacacgatctgccagggggcggagatggaaaagctgttgaccggcgtgccggtggtgctggcaaacggaaagctcgacctgcccaacgcctactcggtcacggtagacgataaatacggcgtctcgctggcggtggagcatctcgttgcgcgcggacgcaagagtatctactacatcaaggaccgcgacacggacagtgccaagtccaagcgcgacggctttttggaagccatgcgccgcaacgggctggaatttgccgaccatgtgctggaagcaggcgagacgctggcatccggcatggagacggtgcaggcgctgctggcgcagggcatcgtgccggacggtatcgtctgcggcgaagacctgacggcagccggagcgctgaaagccctgctgcgcgcggggctgcatgtgccggggcaggtcgccgtcgtggggttcaacaattccgactatgcgcacctgtgtgagccggtgctgacctcggtggacaacaagccggagcaggtcgcactgctttgcgtacagcttttggaaagcagcatcgagcgcagcgaagcgtattcctctgtcgtattgcagccggagctggcgcagggggagacgagctgagggcagtgacaggcgagagggcaatataggcagcgcagcccctcatccgcccctgcgggacacctcccccaaggggaaggcgttaccgttgtaggggtcggcgttcccgacgacccgcagcacgtcacggcagctataaccatagaaagataacttctcgacaggtcactttggacaaaagtggcctgttttgttttgcactgtgtaagcggttacagtaaaattgtataaaacttaacagatgaatttgtagcattctccgaattgtaaccgcttacataaaatctattgacaaactcataagcaaagaatataatccaattagagtaagcgcttacacaaccaatgcaggcgcacagatttgacaaacgcacgaaaacaaaggagaatgtaaaatgaaacgtgtaccttatgaagaaatggtcgcccagtttgcccgcgtgctggaaaagaagggctttaccgcctccgatgcgcaggatgccgccatcatctttgcccagaacagcttggcaggtgtgttcagccacggtctgaaccgcttcccccgcgtggtcagctatctggaaaagggcgagatcgaccccgccgcccgcgccacctgcgtgtcgagcatgggcagcattgagcgctgggacggccaccgcggcttcggcccgctgaacgccaagcgtgctatggaccgtgcctgcgagcttgccaaacagaacggcgtcggcgttgtggcgctgggcaacaacaaccactggatgcgcggcggcacctacggctggctggcagctgaccacggctgcatcggtatctgctggtcgaacacgatgcccaacatgcccgcatggggcggcaaggaccgcaaaatcggcaacaacccgcttatcatggccgtgcctcgctccaacggtgagcacgcgatgatcgactgcgcggtcagccagttcagctacggcaaaatcgaggactgccgcctgcgcggtgtgcagctgcccgttcccggcggctacaacgaaaagggcgagctgaccaccgaccccgccgagatcgagaaaacctggcgcgtgctgccgatgggctactggaagggcagcggtctgtctattgcccttgacctgatcgccaccgttctgacgaacggcaactccgtgcataccatcggcaccttcggcgacgagatcggtctgacccagattatgatcgccatcgacccggccaagttcaacaccgttgaggagaccgacgccattgtggacgccattctggcggacgtcaagagcagcgagcctgtcactgagggcggcgaggtctactaccccggcgagctggagctgaagaacatcaaggaaaacaaggagctgggcgttcccgttattgaggaagtctgggaatccgtgctgaagatgtaagatgctgcagggcgttttgtttgacatggacggcctgatgttcgacaccgagcgcattggccgtgacggctggcacaaggccgccgaaatcctgcacatcgacctgccggagggaatcatcgccgccatgcgcggcacaggcacagaccgctgccgcgaaattttcaacgcggcgataccgggcagtctgtatgacacggcccacgacctgcggctgcgctatgcggacgaggtcatcgctgcaaacggcgtgccggtgaagccggggctgcgggaactgctgcgccggctgaaagcatcgggtatcccggccgtgctggcaacgtccaccaaccgtgccaaggcactggcttatttgcagcaagcggatgtcgagcggtacttcacggcggcggtgttcggcccggaggtcgcgcgacccaagcccgcgcccgacatctttctggcggcagcggcggctatccacgccgaacccgcgcactgcgtcgtgctggaggacagcccaaacggtctgcaagcggcgaaagcggcaggctgcccggccattgtcgtgccggatctgacccccgccccggcagaaagcgaacatctttggaactaccgtgcaaaagacctgcgcgaggtacagcaaattttgctgaaggaacgagaaaaactataaggagcacaatcatggaatatgttatcggcgcactgctgctggcttccttctttgggctggcagtctacgcggtacgcggcggcaacctgatgatcggtatgctcatcatcggtacgctctggacggtactgcccctgttcggcaacacgtttgccaccaaccctgattttattgcggcgtatcccggcgtgacggacatcagctttgtggacgccatcacaaaggtttaccaatccggtccggagggctggggcagcgtgctggtcaacgtcgtgttcggcgcatggtttggccgcgttttgctggaaaccggcatcgcggacgctctgatccgcaagaccgttgagctgggcggcgataagcccatcgtcatcagcgttctgctctccatcgtcaccaccgccatcttctccaccctgttcggcgcgggcgcagtcgtcgccatcggcgtcatcatcctgcccatccttatgagccttggcatccccaaggtgctggccgtcggctcctttatgatgagcgtcggcgcgggcatgtacctgaacccggttctgagcggtcagttcctcgccttcttcctcgatgagaacggcaagcagcttatcacctatgacgaccccgcccgcctgcgctgggctgtcatcggtatgctggtgcagctgggcatggtcattgttatgaccgccgtttccctgcgcaagaaaaagaccgttcatgcgtgggtggcttccgctgcccgccgcgcccgccccggctatgtgccgaccaaggcgctgattgcccccatcctgccggtcctgctgctggtcatcttcaaggtgcccatcatcctcggcttcacccttgccagcctgtacgctatgctggtctgcggcaagatgaaatccttccgcggcgtatgccgtaccatcaacaaggatttctacgatggcgtcgttgataccgccccgctggtcggtttcctgctcatgattcccattttcaacaagtctgccgaactctgcgtgccctactttaacgcactgctgggcggcatcatcccgaacagcacactggtcatcagcatcttctttgcggtgctggcaccccttggcttgttccgcggtccgttcaccctgttcggctgcggcgcggctacgctgggcattctcaagggcatcggcttctcgacgccgtacctgtacgctttgatggtgattccctccatcacgatgaatgtctccatctgcatgacccagagctggatcgcctggggcgtcagctacgccaaggtctccacccgtgagcacctgagaaagaccctgccctacgcatggatcacctgcgccgtcatgcaggtcatcacctttgtcatgttcggctgaggaggaatggaaaaatgagtgaaagaaaagtacgcatgggcatcgacgtcggcggcacccataccaaggccgtcgccatcgacaacgcgacccacgagatcatcggcaaatcctcggtcaagaccacccacgacgacaaggcgggcgttgccaccggcgttgtgcaggcgttcaaaaactgcctgaaagaaaacgacatcgaccccaaggatgttatctttgtcgcccactccaccacgcaggcgacgaacgccctgatcgagggcgacgttgcacaggtcggtgtcatcggcatcggcggcaaaggccccggcggctggatcgccaaggcgcagacgaatctgaaggacattgacctcggctccgggcgttccatccatctgcataaccgctatcttgtcgatgataccctgtccgatgcatcggtcaaggccgccattcaggagttgaccggcgagggcgcacaggtcatcgtcgccagcgaggtctacggcgttgatgatatggagaatgagaccggcgtatgcggcattgccaagcagatggggctggaggctaccgccgccagcgaaattaccaagctgtacggtctgacccgccgcacccgcaccgccgccatcaacgcttccattctgcccaagatgctgaacaccgccaatgagaccgaggagagcgtccgcagcgcgggcgtggaagttcccctgatgatcatgcgcggcgacggcggcgttatggaaatcagcgagatgaaaaagcgccccgtcctgacgatgctgtccggtcccgccgcgtccgttatgggcagcctgatgtacctgcgtgcgtccaacggcgtctactttgaggttggcggcacgacgacgaacatcggcgtcatcaaggacggccgccccgccatcgactactccatcgtcggcggtcaccgcacctacatcagcagtctggacgtccgcgttctgggcgtggcgggcggctcgatggtgcgtgccgacaagagcggcgtcaaggatgtcggtccgcgctcggcgcacattgccggtatggactacgccgtctttaccccggaggaagaaattgttgacccgaaggtcatcttcttctccccgaaggagggcgaccccgacgactatgtcgccatcgagctggcaagcggcaagcgcatcaccatcaccaacacctgcgccgcgaatgtgctggggctgatttcccccgataacttcgcctacggcaatgccaatgctgcccgtaaggctatgcagccgctggcggactacatgggcaagacggtcgaggaggtcgctacccagatcctgacccgcgcctacgagaagatcgagccggtcatcaccgagctggccgcaaagtaccgcttggaaaaagaccagatcagcctggtcggtgtcggcggcggtgcagctgccctgatcggcttctgctctgacaagatggggctgcgctattccatccccgaaaacgccgaggtcatttcctccatcggtgtggcactggcgatggtgcgcgacgtcgttgagcgcgttgtgcccaatcccacgccggaggacatccgctccatcaaggcggaagccatcgacaaggccgtcgagagcggcgcaacgccggacagcgtcgatgtgcatattgagatcgacccgcagacctccaagctgacggccatcgccctcggctccaccgaggtcaagacgaccgacctgctgaaggaatgcacccgcgaggaagccgcccagctggccgccgacgacctgaaggccacgactgccgaggtcaagctggagggcgcgacgaagaacttctttgtctacggtcttgaccgcaagaacaagcacccgctgcgcattctggacaagaagggcttcatcaaagtccagcgcaacgatggcaaggctgtgctgtgcaaggcgggcagctaccgcaacatcgtctcccagctgtgggaggagctggccatctaccagcaggatgccatcctgcggcctgactattacatctgcgccggtgcccgcgtgatggacttctccggctcggtggacctcgacaagatcatgatgctgatggaagtcgaaatgcagatgatcaaccccggcgacgatgtgatcatcgtcggcgcgaaaaacagcctgtaatttacaaagaaggagaaccgccatgacggactttttcaagcgactattgaaccagcccgagccgcccgctgcacccgatgtgccgcccgcggagatggcggtgtttcttcgcagtctggatgaccggcagtgggggcggtacgccttcagccgtgagccgctggagggaaaattcaccccgcagcaaaaggatgcctacaccgccgccgccaatgcctgcggcgcggagtgggcggacaagctggccgcggaacatggcacccgcgacccgctgacgctttgcggcgaactggggctgaagctggaaaccccggccacgcccgcaggcggcgggcaggtgctgttcgcccagtttgtgcagccggatgagatcacgatcttcaccgactgccttgacaaggccgagacactgggcggcttgatccccgcccgcgccaggctgcaaagcatcattcttgcccacgagctgttccacgccgttgaggaagcgaaccctgatatttatacccgcaccgagaaaattgagctgtggcgcaagccgttctccaacaaaagctgcatcgtctgtctgtcggagatcgcggcgatggcatttgcaaaacggctgctggggctggacttcaacccctacgcgctggatgtgctgctggtctacccctatgacgcgcaggccgcctgcgggctgtatgcggaaatctgcgatctgatgaaggaggaatgagccatgctgacaacaaatttgaagctggccgagaaatacaactaccttgacccgaagttcaaaaaggcgttcgagtttttacgcacggcagacttggctgccctgccgctgggcaacacgcccatcgacggcgacgaggtctttgccaatgtgcaggcgtacacgacgctgcccgatactgacgcgccgttcgagagccacgagaaattttttgacttgcagttcgtcgtctccggcgaggaacgcttcggctacgcgccgcgcgatctctgcaagcccgcaatggcttacgatgctgaccgcgaccttgtgttctatgaggaacccgccgagagcggctgcatcatcctgaaagcgggcgattttgccatcgtcccgccggaggatgcccacgccccccgccgccaaaccgccgcaggcgcgtgcgcggtaaaaaaaatcgtggtaaaggtcaaagtgtaaaaggcaaaaacaatgccgctgtggttgtgttgcgcaactgcagcggcgttttttgtggtttgcgagaagcggcgatgtatggcaacgcaaacaacaaccgtttgttccttttatcccgaatatgcaagcccttcttctgtgcaccaacggacagcaatgtctctgtaggccttttcaagacagtcgtaccactgctgctctaaaccgtgatagcgtatagactccttgaaccggcgaaaagcaccttttccccgaatgctataagaaagatcgctttgcacctttccgggagaaagctgttcgataaagtcctccatgatgcggtattcgtgtatctcgtacttggtcggaaatcgaagaaagcgttttgggtcgttttcgatttcggcagccagcacttcgtcggtttctccgttaagcagtgggtcggcaggataaacggtttctcctgttttagtatcccaaaaacttgtaaagaaatcgtcggacatttcaatcgcttcaatgacctgctccaacttgatagtcattttctcaaaacctctctgaatgggcagtgcttttcggagtctctttgtagtcaacatagtcaacggaggaaccctccaagagtaagtcgttcagattcacggtatcacctgccgatacggttttgttgtggagccgaggtttgtccgtgattaaattatactacgcccaaagcgtcaaggcaatcgtaagttgtactctccggtgttaagttgtacgcattgccgtaagatcacagagggaaaaattcctccttttgtggttttacggataggatacgatagtatcttagtattttatttatttagttatttatttgggttggattcacctgtacaggaaaatcccatctaggtaaatgccgttgcggtaaaataaaaatccccggaaggcggggattttagggtggtatttggctggacggctatcgcgtcgataggctgcgaactcccgcaaacaggggcgttttgaataggttcccacttttgaacccggtaactccggtttgaaggtgggaacttttctttttataagcagccagaatagaacgccgattcatattggttcggcgttttcatgtttagttttctatgcgggcgttggctgttgtagaaattgatatattcgtccagaacggcttgcagttcctgcggtgtgccatacaggtggtgataaagcgcctcctttttcagcgtgtggaaaaacgactcgcagacggaattgtcgtaaggtgtgccgggtgtggaaaaggattgctttatatgaagctcttttaaatgtgcgcggaaaatgtaggatgtatactgtgcgccttggtcactgtggaacatcagatcttgcgggggatcccgagacaggaaagcgtcatcaaaagcagcaagcgtaagagctgtgttgatggaatccgatatgctgtacgaaagtatacgccgtgagaacaggtccagcaccacgcagatatagtaatattggtcgagcactttgatataggtgatgtcgctgacccaaattagattgggctgaggctggtcaaattggcgtgctaacaaatttctgaaataagcacgcggcagacttttttgatgctcggccttgtagcgcggttttgcaacggataatcccatctccttcacaagacgaacgatgcgcttttcactgactttgtagcctagttctgcaagtttgtgatgaattggctttctgccaaaacggttcttactgtcgtggaagatttgacgaatcataggcttcagcttttcatcatttatctcataagaagtccgttgcccctcgcgccgcttacggttgtagtaagttcctcgcggtaggcttagtgcgtcgcataaaacgtggatggaatagcgcccgcacaatgcattaacagcagctactttttcgtcgatggaggctttactgccgcacggacactgccgaagaacctctaattccagcgcaagtttttcaaggtggcgcttagatttgtggctggttgcccggttggtggtaatagccgcatgtacgggatgagacttatcaaatttctgctttcatgtaaagaatgtgctttcagtcatgccatacttgacttgtgtttccgcgaaagagtgaccgagctcgtagaaaagaacggcttcatctttgatagattgcgagtaatgctttttgcccattggtgaactcctttactaaaatagtgtgaggattccagtatagcaaaggaggcgagaaaagtataatttataggcgatatttcgacgttctatactgtgaatatgtgctaattttaagggaacgactacatacagaacaaaggagaaaagcatggattttattagcacaggcacagagatacttaaacaggaaaacgtacttacgccgcggcaaaaagatattattgatacggaaaaggaaatgttaaaatctccgttcgataggaatactgcgattggacaagtagagaaaaattgcatacgttatcccaaactggcattaggagcgattatgcctattgcgataagagggtgttcattagagcaaatgacgaatgatgatatactaaaaatactgcaattgcagtttggaatcctgatggcggaagaagaggtaagaggcataagaaatcagtgatttgcaaatcataaatgggacaaaatgcgagtcataaaatataagaaatcaaagatataacaagtatagaaaaaggaatgttggaaacaacttgaagccaacagaccctttcgctttactaaataatggatttgaagcgaatgcaacgactatttctattacacatacaatcaatgtgttaggcgggatagaggaaatatgtatttctgataatggtagtggaatttgtttcgaaacgattcaggatacatttggagcgtttctggcttcgcagaagaatgcactttctctcaaaattaaatcaaaagtgaatcaaggcaagggggggcgatttgcgggattttcttttgcaaatagaatcaagtgggatacagtttgcgcggaaaatggtaaaaatgttcaatattcaatttccgtttacagtgaaaataaaaacgaatatgaagttacagaaaaagcattgaccgaaagatccacaggaactacggtaattattggtaatgtggatcagatactgccagaacaggtaacgattttagcgttggaggatacactattaaaagaatttgcatggtacctttatcttaataaggaaagaaatgttgaaatactggtcaacggtgaacgcgtagactatacgaaatacattgataccagatttagcgcaaaaaaggatttgctgatagacggtattggattaaagattgacgttgtagtttggaaagaaaaaattcgagagaaattttgtatatattttatgaatcttgagggggtgttaaaagggagagatacgacatcattcaataggaatacagtgaactttaaccatagtgtatttgtaagatcactctgctttgatagagacagtgacacttctttaacgacagatgatagcggcaatgaacagatagctttcgacgatcagccgagtaatcgcacttttttgcgaaaagtaaagaaagagatccaagaagctattgatgatgcacttacagcattcttatcggcccaagcgacgaaggctgttcaagatatgatggatcgtgagtcttttccgacattttcggacgatattccggggcaactacaaaagaaggacttaatgaccgtaacgcaagaactttataagttggatgcccggatcttctataagctaaaaccgattcaagagaagtctctgctaggatttatcaatcttctgctccaatcagaagaacgcgaaaatatgctcgatatcatagaaagcattgtcagtttgacccctgagcagcgaaagggcttctctgatatattaaaacgaacccaattgggaaatattatagatacgattcagtttattgaagaccgctataaggtcgttgaggctttaaagcaagtagtatttgattatactgattatgcaaatgaacgtgaccacgttcagaaaattgtcgaacaacattattggctgtttggggagcagtacaatcttgtgactgctgatcaacgaatgcagaaggcattagccaattatttaaatattctttatggttcagatgctcccgatgccacattgaatcctgatcaagaggagatgcggcgaatggatatttttctatgcggtgcaagaaaaacagaggactctgttggagatgaaattcaagaaaacttggttatagagttaaaagcgccaaaagttgttttgaccaaaaaagttctgcgccaaatagaggactatatggatttcgttaggaaacagcctcaatttaatacacaattatgcaggtggaggtttatcgccgtttgcaataatgttgatgacgatgtaagagcacgctatgccacaaatcagacaaaagggaaaaaaggcttggtttttagtgtagagaactacgaactctacgctttaacttgggcagatgtttttaagagcttcgagctaagacacagtttcttacttaagaagctaaaaatcgatcaagaggctatagaaaaagatatatcacagcaactcggtaatagtactgggagggaagcggtaaataatttgacagccttggcgttgccagttagtatgatttccggttagtgattcaaaagagctcattttgttccgactatgaataaaggtatcttttttgtaacactcagacaacaaaagctcgttgaaacgacaagtttcaacgagcttttttctacatcatggaaaaagtggtaacaagctggtaactttgaccccaaaatgaccccgaaacggcaaaacgactgcgcccggacggttgaatttttcaacagcccgggcgctttttgtggacaaattttgcgcagttggcaggtaaatataggtgcggtgtggctaccctaccctgtcccacgaacaccgtcatcaccgtcacggaaagcagaaaaggggtctggggattccccagaaatgcgtttgtggatatccaaacgctatgcttgcagtacacttttgcgccctattccagtacagaaaccgctccagcgagtaaatcccagtaaatcctaaaaggctgtccggcccaacagagtgaatcacacacagattcactcaaaaatcttgactcgaaaaagtgaatcaacgtctgattcactctgcacccaaaaagttgaaaaatctgacgatttccaataggaaatgctttcagcctttcttatcctcctccatgcgccccagatagcgccagagggtggtgcggctgataccaagctggcgggcagcggcggcgcggttgccgttgtgggctgttaggataagattgcttagtctttatttagttctattagttatttagttgtgcgggggttacctgtacaggaaaacactgttgtggaataaaaaaatccccacaaaacggggaattttaggcgttacagtgatgggacgggcatgggagctgatgaggcgggtaatcgcccaaacaggggcctttctcgcggcaacacgggctgtaattgcgataatgtaggctgacaatggcaccgctgtaaaaatgggttaaaatgtccacggcatacaacttgataccggaaagtagaatttgttgcttatatcgcgaggctctaccctagtatgagcccaaagaaatttgtgctcacgatatgaaaagcgcagatggcaattcaggaagctctttattccgcctttgctttaatttttaaccggctgtccagcgttacaaaacgctcgtggcctactccatctgtgccgacaatcgaaggtagggtgtcactgatgagttgaaacggcaggatcatctcaaacggcgcggtataccaaacgccgctgccaagcaagcagagatcccgtgggtctgtgctctcgctgtgagacaacagatataccgcacggttgctttctctgtgcagggcggccagacgctccatgcgggggcggtcggcatcatcgggcaagaggtagaatccggctacccggttgtccagggaacaggcagggccgtggagaaattcctcaaaatcaaaggcgaaggccggggtcagaatcgtttccagcagcttcagcgcaccctctgcgccgacaagtgcatcctgctttttgccgataacatagacagtctgcatagctttgagcatgtcaaggtttgcatcctgccacgcttgaatccggcggagattctccggcatagcagcaaaagaagtctgcagtgcctccacaaccttgtcatagtcggaaacggacaacatgccgctggttcgggcagcttccagcgccatcaggtacagaagcagcacagtggaggtatagccttttgtcttggggccggccttctcgggaccgcagggaatggtgacggtgctgttgcacagctggttgatttcgccgtcggggttcccggtcagtgccagagagggtgtgtcccggtgattctcaatagcagcaatcgtgttggtgctattgccgccctgagagataaacaccagcagcggttttttcccggcaacagcctccaggcaggaaggcgcgacaacggttacgggcaggcccagaacccactccataaacggtgcggcggcacaggcggcgttgcggctggtgccgctggcaaccagcagcaggcggtcaggctggtacgttgccacggcctgcacaaaggggacagccagtgcagcgcagtttgccagcatacgttggcacaaatcgggctgctcgagaatatacggcatcatttcgttcatgggggagtcctccttttacagcttgcaaagtgagctttcacgaatgataagttcggcgtccggcatacgaatttcgggcttgggagcgccttgcatggcagccagcagatgctgtaccgcggtgtgtgccagcaactcgctgtgatggtcgatggcggtcagccggggaatgtgatactcggccccgggaaattggtcacaactgaccagtgcaaagtcctgtggcacggtcttgccccagtcggccagtgcccgcagcacacctaaggcaacactgtcattgatggccagcaatgcggtgcaggttgtgctgcggctcatcagcttgttggcggcggcaaaaccatcagaaaggtaataatcagtcagcacaagctggtactctgtgcagggcaattcggcggcggccagcgcggcgcggtaggcatccagccggtcgcgggttatggtgacgccgggctcgccgcccaaaaaagcaatatgccgatgcccttgtgccgcaagatggcgtacagcagcggcgataccggccccggtatcaggcgtcagaaaaacagcctccacgccagccagcggtggcccgatgactacagtgggcactgtggctgccgtatggcgtagtgcgtcacagtaagattggctgggcgttgtcaggtcaagctgcccgcctacaacgataaggccatccacctgtttgtcctgcagcatttggaaatattcttcctctggtgtgttctgcacacgggaggagtacatcgtattgcacagaaagactgcgtatcccgccgcgtgggcctcacactcaatttcgcggaaaatgagagcaaaataagggttggtaatgtccggtaacataacgcccagagtcatacttctgcggttaatcaacccccgcgccatcgcattgggcgaaaaatgatatttgtcaatgacagcctgcacgcggcggcgggtctcctcggacaccggaacggtgccgttgataacgcgggacaccgttgcgatggagacaccgcactcctttgcaatctgtataatggtgatgtttttgtccatgcgtatctccccctttgaaagtattgtagcgcgtgaaacggcttgtgtaaatgtaaaggtttacattttctgaaatatcatctatattcacataaaattgcattgatttttgtgcgtggtgcctattgaaagtgtaagcgttttcatagtagactgaggtatatttaaggctgccatgggtgtgaaggagccctcctgtacccctgcagcctataggaaaaaggagtacgcatatgcagacatatctggggctggatctgggcggaaccaagctgctgattggagaggttacacgtacaggggcggtactgcgcagcaagcgctacagcaccggctacacccgccagagggacgctgttacaggtatgatggccgcactggagaactaccgtgtaactgtcggctttaccggtgacctgaccgcggtcggggcgggcgttgtgggtacagtggataatccccgcggtgagtggattgcgctgggccatgagccgaccggggcgccggtgccgttggccgctatgctgacggaacgcttgggggttccggcttatattgacaacgatgtgcgcagtgcagtcacggcagagctggtgctgggctgtgggaagtattccgataatttcatctatctgaatgtgggcaccgggttggcggcagggtttgtcataaatcagcagattctgcgcggggctaaccacaatgccggggaaatcggccatatgagcgtcgacatcacaaaccgggatgcctgcatctgcgggcggcacggctgtgccgagaatgctgtctccggcgcgggctttacccatatggtgaaaaagtatggccgcacggatttgctgctgcccgacacagggcgtgccgatgtgccgcggctgtttacattggcggcacagggggatgcagactgtacggccatcgctgactatgcagcagatacgctggcctgtgtgattatgaatctggtgcgggtcagtgacccggatacggttgtctttggcggcggtatcatgagtgatgcgtggtttcaggagcgcgtgcgcgccagactggaaccgggtaccatgcgcggcgttacgcatggtctggtgccgtccagcttcagtccgcatattgccggactgctgggggctgcgagcttaggaatgaggtaaaataggcgggtgccggatacctggcacccgcctattgcggctgaagcgcattagttctcttctttattgagcgtcagctcaatttcaaacattctgtcccacggaaaagtcagtgtaaaagaatagtttgtatcgggcagatatttgtgctgccaagcttccagtcgtttctgcacaaggggctgtaccagcgcctgctggccgcgcagatgcagaaaatccatatccgagcgcagggggggcagcaaggccgttacgccgcggcgcacacaggccatgtagccccagtcctccagatagcgcagaaacagaaattcgtcggccttctgtctggcggtaccggtaaatgtaccggctttctctgccgcgtggcaggcggaaagatgtgcaaggacagtgcccagcgtgttggaggaggtgttccacccgccgtaggcggtcaacttgtcaagcagcttgtcctcgtacagaaactgcatcagggcgcggtcggcaccgttgggtatggcgcagtccgccacacctactcgcagcccgcgggcaagataccgccggatacgcgccagaaacgcagggaaattccgttcactgtccagaagaatgtcatcggtgataagcttcttctcctgccgcagggtgaagggggtcggcgggttgatcgccaaaatgaagtctgcctcagcactggtctcggcaggcagacagcctgccgccaacagatggaactgcaccgtctcgccgatgctgcggtcctcataggagggaatctggctgcgcccccgcacgctggaccaatccacatagaccagcggcgcggtgtgggaatcctcatggatagcacgggccagcagggtgcaaccgatttcatccgcaccggggtagagcacgacatggctcagcaagtctcgccttgccagatatgctgccagctggcggcgttcagctggggcaaagccatattcacggcaatcatccagcggaaagagcagaaaatccagtacgccctccttcaccaaatcaatgagtgcgagattgttggcaaaattctgctcgcggcgggtcagaaaatcccgcatagcttccgcaggaacctctgcctttatctgttcccattcagccaactcctctggtgtggctacaccaacggcagcacggtcccggataacgccatagcggtagatacgatagccgtattcctcataatagtccggctcctcgccggcgccgttgcgggcgggtgcacgcgtgataaggctgtacgcatgaatccgcaaatgtggaaaattctgccgcaatgctcgcagtcggttcagccgggtatggcagacatcagtggaaaggtgatgcagccttgacggcacaatgcctccgtagaggaacatatccaacgaaagcacaagctgtgtggcctcggctgcctgctcctgtatccaagtccacagcccatccacattggcagcctgcttgaaattgcccaaaagtgcccgcggcggaaaggtaatatccagcccgctgatggctccgatgtaggccggatattgcagattacagggccgttcatctagagggataaagatgattttttgcatgatatgccgcctttctttataagtgccaacaaaaaccgtcccagcggttgaaaactcgatgaccgggacggctttatcatcaggattccctgctctgccgggtgcagaaatcaatcagatgctgcatatgtgcgatgctgcgggagaagccgccggtgcggttgcgtgcgcaccagagtttgtagtgaaccttcagaatcgcgttcagctcatcggccagctgtgccatattctcccggtaggccggtgtgccgcgcagagtcctcagcgtatagtagagctttgcaccgtagcgcaccatccgcaggccgttctccatttcttcccgcagcagcagattaccggggtaatcaaattgggctgcatgaatctcctgctccacacggttgagataggcggtcatttcggcatagtccatctcaatgcgggcgggcttttccgggatatgatttgtgcgggcaatgttggcagagagggtcagcaggcgttccatcttttcgtcaaattcttcaatgctgtcaaagtaatatttgctgctcatcaccgcaaagcagagggtcgtgttgtacagcggtgcacgctccagtttatagtagttgccaagattccacgcggtgcggaaggcactgtcatcgctgctcatataaaggaagcggttgcagtaccattcggcggcttcgcgccgggcggtgccgcaccaggcaaacagtgctgcacacgcaaaggccgggtagcttgcgctgagatactgccaatggcccaaatcgccccaatcggttgtgatgatacccgcgccgccgtatttcacggcgttggcggcggcatcggcaatgttagccagcatattgtcattacggccggtcagcgcaccccagctgctggtgccggggcacaggcagaaccgtagccctgcctgctgcatctggcgggcgtgctcctcaaaacgggcgtcaccctcataaatccaatccaacagtgtcacatcatggggcagacgtgcggcgttggcggggtcggccagcacctcatccccccacatcatcatttttttgcctttggtgcggcagtagctattcagcttgtcaacatagtcgaagtagagcttcagccgtccatcacggtcggcaatctccttgtttttgcccatgcccatctcaaaaggctcatcaaggttcaggttcacataatcggaatctgagtttgccagcagggtgtcaagcagttccttggccagtgcaatgctgcccgggtcatagacatccagcgtcatcggcggacgccagaacagattgttgaaaatatagccgtcctcacattccgccagatggcggaactggggacgctccagccacttttccatatgtcccagcacattctggttggggacaaggtcaatgaagcgggcacgcgcataggcggacagactccggaactcctcagcagtgagaggagtctcgtcgctgaaaagatagcggtactgggggtagtcgaagcagaaaccctccatatagagctgcagatggttaatacgcatccgaccaaagaggtcaatcagggtgtaaagcgtctgcatttggggaatcttgtcgcggccgatatccagcataatgccgcggacctccagcgcgggagcgtcctgcacggtgcatacgggcaggaaatggccggacatctggacagccagctggtgcagcgcctcaacggcataatacaggcctgcgccgtccgcacagtggatgtgcacggtgccggacggctgaatttctattgcaaacgcgccggagacaccgtctgtcagctccgccgttatgggcagggtgccatccgcagctgtcaaaaattccgccagattgcgttgggggtcatacccggcggcacggcaggcgtcctgcagtgccggagccattgacagaacaggccgacctgcgggaatgtgtgcctcggtaacggtaaaatgctcgggtgtgggaaaaagctggtacataaaagggctcctttcggcgtgtcagcatttgtcaggagagtcaacatagaccggcagaggcagccagcctgcaggggcagtgggctgcggcagcagcaggccctcggggctgaacaaaagtgccatcgcctcggcgtgggtcagctggtagtcggcagtgtcgcaggggacggcatcggcccggccgttttccagtgtcagcgcaaacggttggcccccttccacacagagcgtcagccgcccatcgggcaggggccgctgagcagacttggcctgtaaaaagaaggcggctgcggcggggtagtcaaaaatccggtacttgtcatcagcgtacagggtcagccggtcatacagagggctggcctgctgcatccgggcggtgtcccagcccgcgcagggaagcgtcagcgtctcacagccaagatatttctgtacagcccgcagggcgtcatacaagagggcttcgtcctgcagagccagctccccgatacggcctgcatcggaggtgatgcagaaacctgcaatctcactgccgccgcgcagtacaagcagacgcccgtcccagctgacagcagccgcgtggaaactctgtgcggtataaacgctgtgtaccgtgcggcagctctgcagggccagcagggccttggtctcggcagcatcggatgggatggcgggcgcggcggccagcgccagcttatgagctgaagccatatgccgcagattgtccggcgtgatggtatactcggcccgcaggcccgcgggttcatagccgaaataagcatagcggtggcggcgaccgtccagaacgctcaaggcgatgccgttttgggccatgtcggctacggcggtggtcatcagcttgcgcatataacccttgcctcgcacataggggtgcacgctgacactgccgatagccgcgcacggcagtgtgcggtccctgcaggcaagcgtgaacgggtgggcgcagacggcggcaaccagacggccatcctcccgcaccagataatgctctccttcggtggcggagccgtctgcgtagagctttggcagcatccgcgcaaaatcatggggccgggtgtgcatactgaacaccatattggcaaaatcgcggatttcgtccagctcgccgggcttgccgcgtgtgtaggtgacttccatacaagcctcccatataaaatatttttagatataaactatgttatcatattcttttttagatttcaatggactttcaaataaaatttaagaatctcgatgctgctcaaaatttgcagtgaaaatccggtaaaatgacgaattttaggctgcggagagagaaagaacatctaaaaaagttttttggaaaaaagccaaataaatagagtaagaaaacatggcgtacgaaaaatgctgccgcttttcgggcggcagcataaataatactaatttcccagcacatcccgctgctgaatatgcgggacaacgcagaaatgatagtacagcgcaatgcaggcggcggcagagccccatgtgacagggtagccaagatacagcgtgtacagagaaggaaacaacggcagcagggcggccagccagacgatgcgcaggccgcagaggttgataacggataaaaccatcgtggcaaaggtatggccacagccgcgcacagtgccaatcagaatctggcagaaaaccaacaggatgtacccgggcgccagtacgcgggccatcatggcaccgctgtgcagaacatcggcctcctgcgagaaaagcgacatcggaccctgactgaagaaaaacataaagatgcccacgccgatggaatagacgccgcctatccacaaaaaggcgcgcagaccgctgcggacgcggtcataccggcgggcacccatattctgggcggtgaaggtggttaccgtcagggacaggcagtttaccggcagcagaacaaaggtatctaccttgctatagacattgctgcctgccatggccgccacaccaaagccgttcaggtatccctgcacaacaacattgctcagactgacaatagcggactgcaggccggtgggcgtgccgtacttcaaaatcaggcggaactcctccctgtcaccccgcagactgcacaagcgatattcctcccgcgtgcgcagcaaatgggtcatggccagcgctgcgctgagagcctgtgcaatcagggtggccgcggctacgcccgccacgccccagcggaacacggccacaaacaggacatcgagtatgatgttcacggcgctggcggcgcagagataatacagcgggtggcgggtgtcagccacagcctgcagcacgcctgcgcccatattataaagaatgttgaacagcgttcccagaaaataaatgcgcagatacagcacactgtcagcaaaaatttcttctggtgtgttgatgagacgcagcagaaccggggaagtagcgatgccaagcgccgaaactgccgcgccgcccacaaggcagaacagataggccgtggaaatgcagcgacgcagggcagcatattcgcctgcgccatagtgccgtgcaatgacgataccggcaccggtggtcagcccgatgacaaacccgatgaccagattcacaatctggttgctggccgacactgcggccagcgccccgctgccgacaaagttgcccaccacaagggagtctgtggcactgtacagctgttgaaacaggttgcccaaaatcagcggaacggtaaaaagcagactgccgcgcacaatagagccttccgtcaggctgacggttctcacgcgatcacatccttattcgtctacgctgtcgctgcggcttgcctccagataattgtagaaggtgaacttgctgatgcccagcatctcacaaatctgctcgctggatttggtgatgaggaaagcgccttttttgtccagatagcggatgaattgaatacgctccttcttgtccatctccgcggcgggcttaccgataatatcctgaccatctttgataagctgggtaaacagagaattgacattcgtagcaaaatgctcctgcacggtatcgggggtatcctcaaaacggttgtactggcgcagcacaccctcaagacgcagggtgtcggtgatgtccagattcacacagatggagccgatgaccttgccgtcatcgttctttaaatagatggaggacgagcgcagaatcttgccgtcctgcgttgtggtgacatagttgaagcggtcgccgtcaatgacattgccgctgagtacctccagccccagattggaaccgcagccgcccaccgtgcggttggtgatgtgaccattgcggatatccacaatggtgtggttgtagtcctgcgtcaaatcgtgcaggactacttcacaggaagtgccgaaatggttagaaatcagcgaaagcaactgctttaaaagcggcatttcctcgttgatgcttttcataggtattggctccttttcttttgttagcctgacagttgttcaggcatagatacaagtttgaacattgttcgtcaatatgaccaatattttttcgcgcttttctatttgacttttattttagcatgagttttaatagaggacaagagaaaaagctaaattttttttagaatttttggaagaaatcaaaaaaacatatatgaacaggaaaggaagctgtactatggctgttgaaacatttgccgaagaactgcgccgcagcgggtatctccaccgtccgctgccactgcatgaggaaaccacccgcgaagcacgtctgcgccggcgggcggtgctggatgcaaaaactgtctggactccggcagaagcactgcccaccacgccttggcagggggtggccgagtgggctgaacaggacgggaaaaaggttgtctggctgcacgcccctcgtgtctgcaaggaatggccctatgggatgccgcaggacggcaattgttcctattatggccagctgcgggctaagtttacaatgggcggagccgactggtcaggctatgaccgggtgcgggtacgcctgtataccgcgtgtcagggaagccgcatcgtggagcctacgctttgtttagtaaatgatgaaccgggtgaccgagccgtaccggataaattcaatcgcacgggatttacgacatgtgaaatgaagaattttgcatggacagactggctgtgggacattccggagctgccgcgtgcgaacgttcaggagattgaattccgattccgcatcagcggcaaggaggtctccgacggagatacggtgaatttctacattgcggagattgctgtggaaagaaccgaagaacccgaaaaggagaccggctgggcaccgcgaccgggcaggctgcactatgctcaggcgggctaccgtcccggagaccccaaattagcgcttgttgcccccgaggatttgcctgaggatggtgcctttacgctgacggacgaaaacggcaatgttgtttataccggcgaagcaaaatccatgacatggaaagagaacgggtttgctacgctggacttcagtgattttactgcacagggccgttaccggctgcaggttggcttgctgaccagtaagccgttccccatcgcagaggacgccaaccacgaaaccgtgtggcagattttgaactttatctattgtgagcgctgcggctgcccggtgccggggaagcacggattgtgccatatggatatctacgccaagcataatggcctgctgttgcccttcggtggcggctggcatgatgcgggagatatgtctcagcaggcggctcagacggccgagacaacccaggtgctgctgcaggcggcgctctcctttagcaacgatacaatgctgagcgagcgtttgtgggaggaagctctttgggggttggaattcacacttcgcacccgcttcggcgatggtgtccgcgccagcagtctggggcttatccgttggacggacaacaaaatcggcagcgccgatgatgcagacaatgttcgcacgcaagggcaggcaatgattaacctcatcgacagccagaccgaggcaatggcggcactggcactgcccggcagggatgacggcttggcctggaaatgcggccaagtggcagaggaagattttgcctttgcaatggaacgctgggaaaagtacggcgttgaactgcccagtaaatgggaacatacctataatgcatcccgctgcttgcattatgccgagattgtccgtgccgccgcgctgctgtaccagctgaccaaaaaagaaggctacgcaaaaacggcaacggaatatgcagacaaactcatggcctgccaacaggacgagccgtcaccttgcggagtagtgggcttcttctatagagatgaaagccataagcgcctgattcactataatcatcaggcacgtgagcatcttcctgtgctggccttaacggagcttatcaaggctctgccggatgaccccgcctgcgtggaatggaaacggcatataaaattgtttggtgagtacatccgcagtctggcagaccatgcctccccttatgggatgctgcctgccggtgtctatcaggaaaacgaaatcgaagaccgggaaacctttgcattggaacatctgcagtctgattatgaaaccgaaaagcctaactatctggcagagctgcggaatggtgatgacctaggcaacggatggtggctgcggcagttcccggtatggttctccttccgcggcaacagtgcgattcagctgactttggccgcgggtgcggcgctgaccggccaaaccctgaaggagaaggacctgaaagcgctggcagtgcgtcaggcgcagtggttcggcggttgcaacccctttgcagccagccttatctatggcgcggggcaggattcaagcgagccttatgccattttccccggtaagacggtgggagctgtggccgttgggattcaaacaaaaggtaatagcgatgagccgaattggccaaattctgtctgcgcaacctacaaagaagtttggatgaccgctgctgctgacctgctgcaggttctctctttgattgagtgacaaaagggttacaatggataattgtgatgcaaacatgtactttacggctgaaaaagaggggcgccacacgcttaaaagctaaataaaaagcagaatcttggtcaaattgcaaaaaaatagtaagaaaaacctgtctgtttgcacgaaaaataatttgttatcaaaaacctattgaaatctaaaaaaaagtatgatattctggtcatgtcaacaaggaaagacgcaaacagcaaaacaaaacttcagcatccggccggaatctcccccacagggagaggctgaaaaaatgcagtttgcggagatacaactgagcaaaccaaatctgaaggaggatttgacatgaaaaagcaactggccgcctttatggccgcaacgatgatgatgggtactctggccgcctgcggcggcagcacctctactgctgcatccaccaccgataccgccaccactgcaagctctgccgctgaatccaccggcgaaaaaaccaagattaccttctggtactcccactccggtgatgaagctgctgcctttgagcaggcaatcgcttcctacaatgccagtcaggataaggtcgaggttgagggcctgagcgttactgataagcagaagattatcgttgcgctgtccggctctgaggcacccgatgttatcgaggtttccaaccaggatatcatcaactacgccaacaacggcctgattgagcccctgagcgccaaggcagaggcagacagctatgatctggcttcgaccttctccgcacaggcactgaccgccaacacgctggacgatgaactgtacggtatgcctctggctgccatgattatcgagatgttctataataaggacattctggccgagattggttatgacgcacctcccgcaacgatggaggagctgtacgagatggccgtcaaggcaaccgagctggatgagaacggcaacatcacgcgtctgggctatcccctgttccctctggccagtgcacgtcaggaaggcatctacgccttcggcggtcgctggtgggctgaggacggcaagaccctgacccccgatgatcagggcattctggacagcctgcatatgaacgttgagtatcgcagcctgtacggcattgacaaggtcaatgagttcgttgccaccgccaacaccaaccgctacaccgagaacgatatgttctttgccggcaagcagctgttccgctttgacggtacctggctggatgccatgattaaggccaacaacgctgacctgaactacggtgttgccctcatccccggcaccaaggctcacccagaagatcagggtgcttcccgctatgagaccaactctctggccatccccgtcacctgccagaacgaggaagccgcatgggacttcatcaagtacttcaccaactctgacgcaaccaagcagctgctgatttccatggctaacctgccggttctgccttccctgtacgatgatcccgatatgctggccgctatgcccagcgcgggaatcttcatcgacgctctgaagaacgagaacggcatccagtatgcaaccatcgcagacctggctcagtacacctctctcatcaacgaggaactggactacgtctacaacggcagcaagacgcccgaggatgcaatggcagagctcaagacacgctccgaaactctgagctgagagcgctgacctgacaatctgaaactttccaaacagactgtttgcaatcggccctaaagtggcaaatgtcacatatgcgtgcagacgccacaacagcgccgcaccatatgtgacatttttattttgaaaagtgaaaggagcctgaacaatggcacgttccaaaaccggaatccactattcggccgaggataaccgcaacggtttcctgttcgcccttccttggatcatcggctttatctgcttcagcatcataccgctggcaacttcgttctactacagctttaccagcttcaacccggtcaaggaccctgtatgggttggtctggacaactacaaatatgtgctgaatgacccgctgacctataaggctctgggtaacacactctttatggcatttgtatccacgccggtcaacctgtttgtagcattggttctggcctcgctgctgaacaaatccttccgcggccgtggcgtggcccgcacaatcttctttatgcccagcgttatcccgatggtagccgccacgatggtctggatttggatgtttgacccgacctacggctacatcaaccgtgttctgagctggttcggcatcaacggtccttcgtggctggttgaccccaactacaccaaatgggcgctggtgctgatgggcacgtggaatgtcggcaccaccatgctggtctgtctggctgccctgcaggaggttccccgcagctactacgagagcgcggaaattgacggcgcaaacgcttttgtccgcttcttccgcatcacactgccctgtgtggcaccggttatcgtctatcaggcaattctgaacatcatcaatgcgttccagtacttcacgcaggtatatgttatcatcaacgccagctccggcggcggttccagtgatgtcagcggaggcccggccaactcgattctgatgtatccgctgcatttgttcaacacagccttctcgtttatgaagatgggccgtgcatccgcaatggcatggatactgttcgttatcgtcggcctgctgactgttgttatgacaaccctgtccaagaaggtcaatgacaatgcaggaggagaataaaatggtacactcgaagcattattatatcggcctggtgaagaaggccctgttctatgcactggttgtcatcctgtgccttatcttcttctccccgttcctgattatgttcaccacctccatgaagacgaactatgacgccttccagatgccggtgcagctgctgccccgcaagtggattttctccaactaccccgaggcactggcgaagattccctacattaaatatatggccaacaccatcttcatcacggtgctgtccgtgctgggctcgatgtttgccaccccgatggttgcctactcgctggcgcgcatcaagtgggcgggctccaaggtcatctcttccctgattatggcaacgatgatgattccctacaccgtcaccatgatcccgctgtaccgcatctggtccaagctgggtgccaccaacacctatctgccgctgattgtacccaccttcttcggcacgccgttctttatcatcattatccgccagttctttgcgggcctgcccaattccctgatggaggccgccaagattgacggcgcgggcgagttccgccgctacttctccattgcgctgccgctgtccaagcctgcgctgaccaccgttggcatctacgccttcatcaatgcgtggggcgattatctggcaccgatgatttacattaacaagacggaaaaatacacgctgtctctgggcttgcagggcttcctgaaccagttctcggttgactggacccatctgatggcagctgccttcctgtttgtgctgccggtcgttatcttcttcctgattttccagcgcaactttgtcgaaggtattgcaacctccggtctgaaggcctgataccgggccagaaggagccattatggacgaaaagatttccctgaacggtgtctggcagtggtctgctacagacagtgacgccgtccacccgggcaccgtgccgggcagtgttctcagcgatatgctggccctgaatctctgcgaggatccttactggcgcaggaatgaatacaaggtcaagcaactgttctacaaggactacacctactggcgcagcttcagcctgacagccgaccagtgtgcagccgccaaggctgtgctggtgtttgaagggctcgacacactggccaccgtgcggctgaatgacgaggtcgttctgagtgccgatgatatgcaccgcacatggcgggtggatgtcaccggaaagctgcaggcggaaaacacactgcgggtcgattttgcttccccactgcattacattgaagctaagaacgccgagagtgatattttctatgcctccaccggctgccagcacggtaatacatatctgcgcaaggcgcattatatgtttggctgggactggggcccgaacctgccggacgcaggtatctggcgcggcgtcagcctccgcctgacggacacagcagagcttcgtgatgtgcgtctgcgccagttccacgaggaaggcaaggtgcgcatcacggctgacattgctgctgacgtggtgaacgccgatgctgcgctggaggctgtctgtacgctgacagcgcccgatggtgcaagcacgcgcctgaccgttccgatggaaaacggaaaagccgtcgcagagtttatggtggaaaagccgcagctctggtggcccaacggctacggtgcacagccgctgtacacggttgagattgcactgcaaagcgccggtacagcggtggacagctaccactgtcgtcttggcctgcgcaccatcacggtctgcaccgataaggacgaatttcccggcagtcagttcgccgtagtggtcaacggccagaaaattttctcgatgggtgcaaactacatccccgaggataacatccgcggccgggtcacggcggaacgctcccgcagactgattgcagactgcgcggcggcaaacttcaatatgattcgcatttggggcggtggctattacccggatgatgccgtctacgatgcctgcgatgagtatggtattctggtctggcaggacctgatgtttggctgcaatgtctacgatctggagccgcactttgaggaaaacatccttgcggaaaccaccgacaatgtccgccgcctgcgccaccatgcctgtatggccctgtggtgcggaaacaacgagatggagtggggctgggccagttgggcgcgtctggaaggacaccgccccaagtacaaggccgactacatcaaaatgtttgagctgctgctgccccgctgtgtgcacgcagcggacgaccagacctactactggctgtccagcccctcgtccggcggttccttcgatgaccccaatgactgggagcgcggagacaagcattattgggatgtctggcattccggcaagccgttcaccgagtaccgcaactataagttccgcttctgctcggagtatggcttccagtctttcccaacgcaaaagacgctggataccttctcactgccccaggatcagaatatcttcagcgaggtcatggagtcccaccagaagaacggcatggccaacacgaagatttttacctacatttcggattactatctgtacccgaaaaatatgcagggcatcgcctatatctcccagattttgcagctcaaggccattcagtacggcgtggagcactggcggcgcaactttggccgctgcatgggctcgctctactggcagctgaatgactgctggccggtagccagctgggccagcattgactgtgacggccgctggaaggcactgcattacggtgcccgccgcttctacagccggttgatggccaccgcgtgcgagaaagaggaactcagcccagaaatcgactactatatccacaacgagggctttgcgccccgcaaggcggagctgaccgtgcggctgttccgcaatgacttcacaacggtgtgggaaaagacgataccggtggagattggcccgtttgcggtcgcggacattctgcactgtgatttctcggattatctgaccgatgaggaagcccgccacagcactgtggccgagtatcagctgaaggaaaacggcgagattgtcagccgcggtacaacgctgtttgtcaagccgaagcatttccattttgcaaagccgagctacaaggcaacggtcaccgagaagagcgatacctacgcactgcatatcacggcggatacctacgccagctatgtggagctgaccttccgggatgtggactgtgtgctcagcgataactactttgacatcactggcccggaaggcgtgacggtcactgtggacaaagcccagcttgccgactgcactgctgcagatttgcaggagcaactgcatatcctgagtgtcgcagatacctattaaagggagagcagaaaggagtatcgtatggataaggaacttctgcaccagttagaaaccccctgcgttgtgctggatacccgcatggcagaggaaaacatcaaaaaaatgcaggcagcctgtgatgcctgcggcgtcaagctacgcccgcatatcaagactcataaaatgccgctgtttgctaaaatgcagctggcggccggggcggatggcgtgacctgcgccaaggttggcgaggccgaggtcatggcggacggcggtgtggaggatatcttcatcgcatatccgatggtcggtgcgttccgcgtgcgccgggtcattgcattggccaagcgcctgcgccgcctgattctgggcgttgacagcatggagattgcacagccgctgagcgccgccgcgcaggaagccggtatcacgctggaggtacgccttgaggtggataccggcgccaagcgcaccggcgtggagcgcgacaaggctgcggcgctggctgtggccatcaatgcgctgcccaacctgaagctgaccggaatttataccttcaagagtctggtctaccatgacgccccgacgctggataagattgaagccgctgccgaggagggtgagctgatgcagcagattgccgaaagcatccgtgcagcgggcgtgcccattaccgatatcagcgctggctctaccccgaccggcattgaggttgccaagaccggcaaggtcacggaggttcgccccggcacctacattttcaatgactttatgctgaccaaggagggcgcggctacgctggatgaaattgctgtccgcgtttatgccacggtggtaagcacccccagcccggaatatgctgtgctggacggcggcacaaagaccttctacatggatattgtgcccgagacgccgccctactattacccgggttatgccgtggtggcgggcaatgatgatttgcagctgctgcgtatgaacgaagaacacggtattcttaccagcaagaagggcaacaccggtctgcatgtaggcgatattgtggagctgattcccattcatgtctgcacaaccatcaaccagcagaacgaagtttacctctatgacggaaagtccctgcacaaagaaaaggttgcggcaagggggatgctggtatgagaacactcatccggaatggcgtggtctatgatggtaccggcgcgcctggctttgctgccgatgtgctggtacaggacgatacaatcgaggccgttgccccggaactggacgccgaggccgatgaggttcttgacgcggccggaatggctgtgacgccgggctttatagacacacaccgccactgtgacacagcggcactgactgacccggattttggccgcattgagacggcgcaggggctgacaaccatcattggcggcaactgcggactggccccgctgcctgtccgccccgagacagcccggcagatatccgattatatcgagccatgccttggccccacgccggaaaccatgcagatggcgcattttcccgagtatctggatgcgctggacaagaccgacaagccgctgaatatcggcagctatgtgggcatcggcacactgcgggcctgcgttaaaggatatggccgtgcaccgttcaccccggcggagctggactgggccagaggatatatcagcgaggccatgcaggccggtgctgtaggcttgaccaccggcattatgtaccagccggagtgctactcctcccgcaaggaatttgtttcactcgtcagcgcggcggccccctatggccgtgtgctggccacccacatccgcggcgagggggacaaccttgtgcccagtgtggccgaggttattgaaatcgccaaggaagcgggcgtgccgctgaacatcagccacttcaaggtgactggcgtcaaaaactggggcaaaaacatattggaagccatcgacctgattgagaaggcccgcgccgcgggacaggatgtgacagcggacttctacccctatgacggtggctcgaccacactggtaagcctgctgccgcccaccctgatgaaggacacaatggcggaaacgctggctgcattgtccacagcacaggggcgcgccgatgcacgccgtgagatttatgccgaccatccgggctgggacaatatggttaccgctatcggctgggagcgtattgttatcagcagcgtgacaaagccggaaaaccgccgtttctccaatatgaattttgccgttgcggccaagctggccgggtatgaggagccgacagactttatgtgtgagcttctctgtgatgaggacggcaaagtcggcattatcctgctgagcatggaccccaaggatgtggataccattgctcgtctgccgtggtcgatgattatttctgactcactctatggcatcagcgactgccctcacccgcgtttgtacggcagctttcccaaggtgctgcgggactttgtgcgggaacgcggcgtgctgacgctgccgcaggccatccacaagatgaccgccatgcctgccgcccggctggggctgacagaccgcggtattctggcaccgggccgcaaggcagatattgcggtgtttgacccggcggtcatcaccgaccatgcgacctatgatgacccgaagcaactttgtaccgggctgcacgctaccctcatcaatggaaaagcagccatcgaaaaagattctctgtgccgcagggactgcggcgttaccatccgtaaataatcactgtgtgaaaaggagatagttactatgaatgacgtctatgcaaagctgaaggaactcggcctggaactgcctgctgttcctcccaagggtggcgtatattcctctgccaagcggtttggcggcaacctgatttacatttccggctgtggccctgtcattgatgcgcccgtcaccggccgcgtcggccagaccatgaccaaggaggaagcgcagattcagtcccgcaactcgatgctgaatgttctggctgtgctggaaaaggaaatcggcgacctgaacaaggtcaagcaggttgtaaagattctggtctttgtcaacagtgctgatgatttctatgagcagccttttgtggccaatggcggctcccagctgctggtagacctctttggtgaggaggccggtgccccgacccgttcggctgtcggtatgaatgttctgcccggcaacattccggtcgagacggaagctatttttgaagttgagtaatccgcaataaaacagaaggcgcacgttccctgaggatgtgcgccttttttgcaataagaagggaaaaggataatgacacctgtgtatcttgatactgcccgcccggatgaggaacgggtgcaggaccttgttgcacgcatgacgctggaagaaaagctctcgcaaatctgttttgcggcaccggccatcccgcggctggggattccggcctacaactggtggaatgaagccctgcacggtgtggcacgggcaggggcggcaacggttttcccccagtccattgcgctggcggccacctttgacatggagcttgtgcagaaaatcggagacatcacctccacggagggccgcgccaaatacaatgcagcccgggcagaaggagacagcggtctgtacaaggggctgaccttctgggcacccaatatcaatatttttcgtgacccgcgatggggccgtggccacgaaacctacggcgaagacccctatctgaccggcagcataggaacggcctatatcaaaggaattcaaggtgacggcccgcggctgaaagcggcggcctgtgtcaagcattttgcggcgcactccggcccggagcagggacggcactccttcaatgcagtggtcagtgagcaggacctggccgagacctactttccggccttccgtcgctgtgtgcaggaggggcatgtggagggcgttatgggtgggtacaactgtataaacggtgagcctgcctgcggcagccgtgctcttattaacgatttgctgcgggaggaatggggctttgacggctactatgtttcagactgcggtgccattaaagacttccataagggccacaagattaccgccagtgtggaggaaagcgcggcactggcgctgaccagcggctgtgacctgaactgcgggcaggtctatccccatatgcgccaggctttggcaatgggccttgtcaccgaggaggatgtggatgccgcggtcgcgcacctgatgatgacccggatgcggctgggaatgtttgacaaggattgcccatttgatgccataccctatgaggaaaatgatacgcccgcccaccatgcggtggccctgactgcagcagaggaaagtatggtgctgctgaaaaatgatgggatactgccgctgaacgccaaatcctgtaaaaccattgcggtcattggccccaatgcggatacggtcgagatactgaagggtaactacaatgggactgccaccgagcactacaccctgctggatggcatacgcgccgtggcaaaggcggaaaacccggagttgcggcttatggtatcggaggggtgccacctctggcgagaaaatgtggaggcgctggccgaagcggatgaccgtcgcagtgaggcggtggcaatggctcgccgcgccgatgtggttatcctttgtgtcggcttgaacggtacattggagggtgaggaaggcgatgccaacaacagctatgccggtgcggataaagcggacttgctgctgcccctgccgcagcgccgcctgattcgggaggttgccgccgtcggtacgccgattgtgctggtcaatgccaccggcagtgcaatggcgctgggtgaggaagcagaactctgcaatgcagttttgcaggtgtggtacccgggtcagatgggtggtctggctgccgccgaagtgcttttcgacaaaatcaaccccagtggaaagctgccagtcaccttttaccgtacaacagaggaactgccgcccttcacggagtacgccatgcaggggcgcacctaccgtttcatgcagaatgagccgctttacccttttgggtatggattgtcctatacacggtttgcatataccggcctgaccgccgtgcctgcgccggatggcagctgcacggtgcgggcaacagtgaccaatgtgggtacacgcaaaggcagcgatgttgcacagatatatctgagacttatcggtgcagcgggccgtgtaccgcgctgtagtctggcagccttccggcgtgtgacgctcgaaccggggcagagcacagaactgcactttactctgccgagaacagcatttgctgaatatgacacacagggacgtgaggtatacacggccgtggaagcggaaatctcgctgggcggaggccagccggatgcacgcacagcggcattgaccggcatggttgtgcctacaacaacggtgaaattgggaggctggcaatgacaacaggttggtttgaagcgctgaagcaggaggcggagcgtttggcgctttctatgccggaagaactgcgggagagctttaaaaagtgctatctgaacaccgccgaaaccacggtgcagaccctgccggacggcagtacctttatcattaccggggatattccggctatgtggctgcgggattccgccgcacaggtgcaccactatctgccgctggccgcccgcaacgatgctgtatatggctttatcagcgcagtgctggccaagcagttcttctatattacaatggacccctatggaaatgccttcaatgccgggccgaccggtgcccactatgcccccgatcacagtggccagacagactggcagtgggagcgtaaatatgaggtggattccctctgcttcccggtggatttggcgtggcagctctggaaagtaactggtcgcaccgaacacctgactggcgaggtacaccggggcatggccggtattgtgaagctctggcgtcttgagcagcaccatgaggagcagtcaggctatcggtttgaacgcgataccacccgtcagacagagacgctggcccgtggtggtctgggaacaccggtagcttacaccggtatgacatggagtggcttccgctgcagcgatgacgcctgtacctatggctataatattccagccaatatgtatgctgccgtggtgctggattatatggtcgagattgcggataaagtctgacaggatgaagtgctccgtgccggggctgccgccttgggcagggacatccgtgccggtatcgagaaatacggcacggtggaggatacagagtttggtgaaatgtatgcttatgaggtcgatggtcttggaaatcagttgctgatggatgatgcgggtgtaccggggctgctgagtgcgccgtactacggctattgtgataagaatgaccccatttaccgcagtacccggcgttttgcactctcgccccgcaacccatttttctttgcaggcaaggcgttgtccgggcttggcagcccacacacaaaaccggactttgtctggccgatgagcattattatgcagggcttcaccgttcagcaggaggaaaatctgtacgcccttattgaaatgatagcccacgccgatgatggcaccggctatgtccatgaaagcgttcataaggatgattcctcccgctatacccgcccctggtttgcttgggtgaactcgctgtacagtgaactgctgataaaaacctttgcaaagtaatttcgaacgaaatgattctataaggcaaaatgattttgcgtatttcaactatgaggaagaacggtaaggaggcaagtatccctacgaacctgccgcgcacgggggaagaaatttgtgatgacattgccgctctgtgcggtcagcttgcgcaaggggagcaggtggtcggcattggtatcggctgccccggcacggtggaccatggcgtggtgctgtactccaataatctggattggcatgattttgccatggccgattatctgaaagcaaaaaccggtatgcaggtgtatatcggaaacgatgccaatgtggccgcgttgggcgaagcgctggcaggctgcgctaagggcgcggagagtgctgtgattgtcacgctcggcacgggtgttggcggtggcgtggtgctgggcggcagattgctgaccggctacaccggcgcagcggcagaacccggccacacggtgattctggacacaccagatgcccctctgtgcacctgcgggcggcgcggctgctttgagagctttgccagtgccacggccttgattcgcatgacaaaagaggcccgcgcagcccacccggaaagtttgctgaacacgctggctctcacagagaatgctgtgacaggccgcaccgcgtttgacgctgcgaccaagggtgacgccgccgcgaaggaggtcgtagaccggtatacacggtatctcgcagtcggtgtggcaaatctgatcaacatctttttcccggaggtcatcgggctttcgggcggtgtagccaatcaaggcgaaaacctgttggctccgctgcgcgctgctgtagagccgatggtgttcggcaacgcttttgccaaaaagcacacccgtatcactacctgcacccttggttaccgtgccggggtaattggcgcggcgctgctggcaaaacaagaggaataagtcatagcagaaatcaagctgaaggtaatcagcgcaacgggcgatacgctggctgtcagccgcgtcggggagagcgtaccccttgtgcataccgccccgtatgcggacggtgactggattgcgctggaatgtgatgagtcgggcctgttctgtgtggtgcagttggtggacacgatgcccccgcggctgatctacatcaaggagcgcggcatggatttcctgattccgcccgccgataaccacattaactacaatccgcgcagttttaccggcagcagccatctgctgcgcgtgcgtcttgccacgcaggaggagattgtcgcgcggcgtaatctggcgttcaatccctatgactgccatgacagccgcattttttacccgcacgcttctgctaacatggaaacccgcggaggggccgtgtttgccgcccgcaatgcagtggatggcatttacgagaatggcgtccacggtagctggccttaccaaaactagggcatcaaccgcgacccgaatgccgcgctgacgattgattttggccgcgcggttacggtggatgaaatccgcttgatactgcgggccgacttcccgcatgacagctggtggacgcaggccaccgtcgaatttggcgacggcagccgggaggtgctgcattttaccaaaactgccgccccgcaggcttttgccgtcactccgcgcacggtgcagagcctgaagctgtttgagctgaaaaaagatgacaatgcctcgccgttctcggctttgacgcagattgaggtctgaggaacggaagctgcgcttggtacagcaccctgatgtagagtagtacaggtaacataaccttgtttgcgcgaatggattcatcatgttgatgaagcaaatttattataccgtcttggcaaacacggttgcaatagtagagtgtactccccagtatcattttgtactcatgtcctatgaaatccgcaacagattaaagggcaaaattcctttttgcggataggataagattatttagtctttatttagttctattagttatttagttgtgctgggtttacctgtacaggaaaatccagcacaggtaaaccccgtcatggtataaaaaatccccacaaaacgggggacttcaggcgtcacagtgatggggcgggcatggtgccgatgaggctggaaagcgcccaaacaggggcgtttctcgcggcaacacgggctgtaataggcgatgatgtaggcgggtaatggcaccgctgtaaaaatgggttaaaatgtccacggcatacaacttgatactggaaagtagaatttgttacttatatcgcaaggtcttgcccttgcgtgaacctcaagaaatttgtgctcacaataaaaccaaagttgcgcagataaatgagcaccagagagaatacttttcttgaacgccagcctgattttgcccccaaaactgcccccaaaagcatttgggacaggaggatacggtgaggaattattagtacatatgggacaaaatccatgcggaggtgcgggacaggatatcaccataccacacaaaaaagtacagtaacgcactgactttgaatttctcataacccggaggtcgcaggttcaagtcctgtctccgcaaccaacaaaagtgcgttgaaacgatgagtttcaacgagcttttttctacattatggtaaaagtggtaactagctggtaactttgaccccaaaatgaccccaaaacggcaaacgactgcgcccggacggttgaacttttcaaccgcccgggcgctttttgtggataaattttgcggagttggcaggcaaaaataggagcggtcagcgtagtcagctcgctttgacgagtaccaacacgctgttctgcggtacgacaatttggtcttgtttggtgggaatgggtgggttcttatattggcgcagggctttttggatttgctgcttgacctccagcagggcggcgtccagcgtgggggcttgtgcggtaacttttgggaagtcgggaacatgggcagtgcagccgtctgccgagaatgtacaaagcacaggataaggctggttttctacggagatgctgtactgcatcccgaacatatcgtccattttgtccatttcgcgccgcttgtgttcatccatgctatggacgtaggtatccatagtaaaggctacagaatagtgccccagaattgccggcagtgttttgtagtccataccgcgctccagtgcgcgggtggcgaaggtgtggcgcaaagcgtggaaggtaaagtggccaatgtcggcgtctttcagcatacggtcatagtagtctttgaacgtcttttgctcaatgtagtggccaaacttgttggtcactacaaagccgttgtcaaggtacttgtcccctgcccgctgcttacccagtatatcgccagctttatgctgaactatatccgcggtcatcttgcttttgctgcgcatcctatggcaggcaaaaagcgggttatcgccgtaaatggtgccgtcacttcgtttctgcgcaagcgctggggtattgccaaggtgcgcgcagacggcgatttacaccacgcggtggatgcagcggtcattgcctgcacgacggacggtatgatccaacgggtgtcgcggttttatcagcgggaggaactctcccacgcacggggagagcgtttccccgaaccgtggccgcgttttcgggatgaattgatgcagcgcctgtcgtcctgcccgcaggaaaacctgctgacgatcaatccggtttattataccaccgcggatatagcgggtatcaagccggtgtttgtttcccgtatgccgcgtcacaaggcaaccggacccgcccacaaggaaactatcaaggggcgcttggacgacacctatgtgacccagcgccgcagcatcaccgacttaaagctgaacaaggacggcgaaattgacggctactttaatcccagcagtgacaccctgctctacaatgccttgaaggatcggctggttgcctttggcggaaacgggaaaaaggcatttgccgagccattcttcaagccccgcgcagacggcacgccgggtgcgcaggtacgcaaggtcaagctttacagcaaggtcaccagcacggtgccggttcacggcggaaacggtgtggctgacaacgataccatggtgcgggtcgatgtgtattatatccccggagatggctactattgggtgccgatttatgtggcagataccgtaaagccgattttgccgaaccgtgctgttgttgctcataaatgctgttccgagtggaaggaaatgtccgaggagaatttcctgttttctctgtgcaaaaacgatctggtttgtatagagagcaagcgtcccataaagctgaaggcagccaacgaggacagcacgctggaaaaagagttgtccgtccagcgggtgcttgcctattttgagggcggcaacatctctaccggcgcagtttccgtaaccacgcacgataacgcttatattgccgaaggtctgggcttcaagactctgcaaaagattgaaaaatatcaggtcgatgttctgggcaattatacccgcgtaaaaaaagaaaggcgccagcttttccccgcccaacggaggtgacgcatgtcctaccgctgccttgcgggtatatggcgcgctgcttggcagtatacggctttttgccatggctggggctgcatcacgacaacgaactgaaccagtttaatctggcggacgatctgatggagccttttcgcccggcagcggatttgtatgtagctgccaatgtggcagaggatgccgccatgacccccgggctgaaaggcagccttgtcaatctactgaatgttgatattctttccggcgggcagcaccacagtgttgcctatgcgatggaacggcttgtgcaaagcctgcgcagccaaccgctgcagctgccgaagctgttggaatacaagcagcacagctatgagtaagtttatgcgaatgatcgtgttttttgatctgccggtgcaaacgaaagctgatcggcggcacgcaaccatctttcggaactttttgctgaaggacggttaccatatgctgcaattttctgtttatgcgcgggtgtgcaacggaaacgacgccgtgaaaaagcacgagggacgtctgcgggcttccctgccgccgaacggctctatacgcctgcttgtcgttacggaaaagcaataccagtccattcaaattcttttgggaaattatcagccggaggacgctccctttgcctgtgagcagctgagttttttctaaacaaaaagcgcatcggaccgcaatccgatgcgctttttgcatagcctattataccataccaagagctattagggaactatgacaacaatcttgatgtggatgaacggattctgattataaatgttttgtaataactccgcgaacattgttaccggggaaatgccggattcttcgattgtgggtaaactcgccgttttcatccagcagctcgccgaagcgcagcttgatcctctgcccggcatgggcggttacggtaaattccactgcagccggggctgtgtgtgcggcttttttacggcttggcgggggttatggggcctcggtgccccatgcctcaagctgggtcagcgcggggaacggggacgggtcctccgctttttttagctcaaacagcttcaggctctgtatcgtgcgcggggtgatcgcaaaggtctgcggggcatcgtgtcctcgaactgcaccacacagtacaggcccggctcgtcgcattccagcgcaatccaatcgccgtccgcgtagggtgcggtatgcacaagcgtgatgcgctcccccgcgcggctgacggacagcgtatcccccgctgcaccgatgactttcagtttgatttctgccatgcttcacacctcctgctttgccagcagcgccgcgccgatgacgcctgcccggtagcccagcgtgcaggtcgtgatgcgggtatgctttttggcaaaggcgctgccgaacaccatcggagctgcggcggcacgcagcggctttaagaggttttcgccctgattggccacgccgcccgacagcccgatgacctccgggaaaaagatattgataaggtttgccacgccgactgccagatggtggatgtagtcgtccgcaacagccttggcggcagcgtccccctgcgcggcggcatcaaaaaccgtgcgcccgttgacatccgcttcggtgggtgccagtgtgttcagcaggctttccgggtgggtgcggcgcgccgcgcgcgtcatgcggatcagtgccgtggcgctggcaagggcttcaaggcagccgcgccgcccgcaggtacacagtggggcatcgggcgtgtcggcaatcaccatgtgtccggcttcggatgctgcgccggtgtagccggtcagcagctttccgcccagcacaacgcccgcaccaacgccggtgccgagcgtcagaatcaccgcgctctgcgcccccttggcgcaacccgccagtgcttccccgagggcagccacattggcatcgttgccgaggcagaccggcagcccggttttggcttgcaggtagtccgccatagcaaaatcgtgccagtcgagattgttggagtagagcaccacgccgtcacacaccatgccggggcagccaacgccgatgccggcgaccggctcccccgcgccgagctgcagacacagcgcggcaatatcgtcacagacctcctgcgccgtgcggggcaggttggtgggggtggcggcttcccttacaatttcgccgttttcgtttacaagggcggctttgatgttggtgccgcccaaatctacacccaagtacagcatagttttcctcctcgtttatcgctgttccgcatagtcaaaacaggcaaaatccgcatggctttggtgggcgtccatgtcctgcgcgcagatgccgaccattgcgccggtgaaggcgcaccgcccgcggcgggtctcgacataatcatcgctgaggtggtcggcgggctgaacaccgcccaagggctgccaatcgccgtctgccctgtaataaaactgcgcctctgcgccgtttacacacaccttcagcgaaatttcgccgtccggcagggggatcgccttgctgccgtaggtgaaatccttgtagtcacaccgcagaatttgcagcgtgcgggcgttgatgcgctcgtcccatgtgatataggcgtagatccagttgcaggtgtcgtagaacagcaccagccctgccacctgctggaagttttgcggtgcaaagtcgattttcgtctttgctgtaaatgcaaaatgctgccagcggcgggcaaacagcgtctgcctgtggtggctggaaagcgtctgcccgccgtagaggcgcagccagccggggcgcgcggtcaggctgtaatcggtttcgggcgcaagaggggtgcgcagcgtcttaaaggtagggggcaaggccggtcgcaaacggggaaatactgcccagcgcacggcaagacccctgctgcctaccgcaagagcattaaggagcaaaacaatggataacgagcgcgcacagtgggccgcccggatgatgaccctgctggaaccgttgaaaagccgcctgacgccgggtggaacggtgcggggcaggcggtacagcagtgtatcaacggccccagaggctgcctgcctgctgcccggcctcggtgccaacggcattgtaggcgggctgcaggtagtggaaccggtccttcatcagccccttggcggcaaaggtcttgaaccggcggctgaccatgacgatatcctcgcaggcggcggccaactcctcctgcgcctgctggatcggcacatacagctccggcgcatcgcgctggttgccgatttgaattaaaaagcaggtctccagcccggcatcaagcataaactcgtggatgacacggtcggtgttcagcttatagatggccttgagggtgtgcaggtcgccgtcggtgcagccctggcaccagaccatcgcgctgtggcggatcgtgtagccgttctcggccaaaaactggcgggccctgcgtgcgcggcggacggcatcctcaaaatacggcgtgccgggcagccactcggcaatggaagagccgcccttggcgcaggacacacccacaacggcaatgccggtctgcgcagtgcaggcgttcacgaaagcggagaccatgctgcctgttttcatgcccggctcattgaccccggcagggtcattctcattcacgccgaacggctcggccagcgggtggagatgcgccaggtcggtgacggcgcggtactcaaaccccatgccgggggtcacggcgggggcaagggcggcatccccgcgcccggccatgttgctttgccccataaagaagattagatcgaccagctgtgtacattccattgtgagattgctcccccgtgatattctatagaaggagtatagcaatccttctttcaaatgccaatagacgcatccgactttttgcggggtaggggaaaaaagtcggatgcgtccactttgtttttgccgttaggcgggaattgtgcggtgttgccttatgtatccagtccgtagggcaccgggtggctgccgtagcggttggccgggctgccggtcagggtcagcgtcagggtattttcgccgggggtcaaaagccccgccagcgggaatttgtgcggcggccagaaggagacgcccgccggctggccgttgacagtcagctcggccatctcctgcccgggcagggtcagcagcggcgtggcggtctgcagctctgttgctgtgatctgcagcgtggcgcggtaggtcttggtgagatgggccgcgtcctcgtccgcaagggcaaaggccggtgcggccagcgacagataggtaggcggcaggggaagggcctcgctttcctgcgcagtgcaggtgaacagcagcaggctgccgcgcgcgggcagctccagcggcaggcaggcccccttggcggtgcgctcggccgggcaggcgcagggctggccgttccacagatcgtaccggcaaagcggagcatccaccggcagggtcagccgggtcttgatgggggtgttgccctcgttgacaagcagccagcaggcgcgcccttccttattaaaataggcgcagcgcagcatgggctgtggcgggtcgcagcggcagtccggctcgagcgccgaaacctccggatgtgcggcgtccgggaacagtgccttgtcccccaatacggcggtgtagcggtgcccgtgtaaccaaagcgcgccgtcctcgaccgtgcaggcagggaaatagctttcgggaatatactgaaagccgatctgccgctcaaacagcgggcgcacggtgtcagggcagaggtcgcggttgcggcaaagtacggcagtctgtgcatgcaggtcgatgtcggtcatcagccaggacagccgccgccagtaggtgctccacgcctcgtaatgcggccaccagatgctgtggggaccgacatcgggcgggcgctcgtccttgcgcttgccgcggatgctgtaataaaaggcgtgcgggataaacaggttgaccccgcgcactgccagccagtcggtgtaccatttgatgtccccgcccgaaagctgccacgggttgtcatccttgttgcaggcgccgaagcactcgttcgagttgcggcggcggtgcatcagccgggcggcgtcggcgctgcacttggccattgtggagtcgatgcccgccaacccgtccttttcgggggcgagccagcgcagcaccagatcctgccccggcacggcaaagtatttttctacttctatatcatcgctctggtgggggtgtcccatcaggccgatgccgtgcgccttgcaccagcgggagagtgtgccgtagtagacctcgccctcgcgctgcaaaagcagcttgtgatacagccgtgtatcgtcgttttccctgccgtcaaacagggcggcaaggttggcggcgttgccgcccgcacggcggaaaatctcggcaaagccgtgcgtccacgggaacataccgctgacattgcgccccagaatgctcggttcatcggtaaaaaagccgatgatcgcagctccgaaatactctttcagctcccgatagtaggcttcgtgggtcagttcaataaagcggctgacggctgcagggttcagaatatcagcggttttgggggcgtttgcctcgccgtcatcctcgccccagtgcagcccgcgcatcgtgccgccgcttttgcgcacgaccagcgcgccgctttccgtctgtgccagcagctcgtcccccggcaaaacggtctgggtcagcgtgatgccctcgctggcaagctcagggtgatcctttacgaccagcccgctcgccgagccggaggggtacatcccctcatcgtacaaaacgattttcatatccagcgcggcggcggcttcgacagccgtgcggatatgggcaaagtagcgttcacccagataggtgatgtcggggctaagccccatacgcgggtgcagcaccacgccgtaaatgccgtgggcggcaaagtccgccagctggcggcgcagctcctcagcggtcagatcgccgttcaaaaaccaaaacgggatggcggtaaattctctcggcgggttttgcagttggtcaagaaattccattatgcggcctcctgtgcttcggcgcgggcgcagatgtccgcccatgcgtgggatttatagtagaacagcatcgccagcagcccgacaacaaagctgagcgaaacacctgccatggcgtagccgccgtagcccagccacgccagcaggtaggacgccgggatacgcacaccccacagcagaatgatgttgacgatggtagaatagcggatctcgcccatgccgttggcaaagctcataatcgcgttgaaggctgcatagcaccactggaacggcagcacaatacggatataccgcactgcaaaggcaagtacggcctcatcctgcgtaaaaagcagcagcagcgggcggcagcacgctgccataagcagcccgcccgccagcgagagcagccccgatgccgccggaatcatccacccgcccttgcgcaggcggcggtagtcctgagcgccgagattttgccccgcaaacaccgaggttgcctgcgacagcgaggtgaccgtgatattggccagcccgccgaccttgcccgccaccgagcagcccgccacaaaaaccgacccctgcaggttgtacagcgcctgcaaaaagacatgaccgatggagtagagcgctgagttcagccccagcggcagaccgatgcgcacgatctggcgcagggtgtcggcatcaaagccgcagggcaaaacaggcagcgcaagctctgtgtagcggcggcgaatgtaaaaaatgctgcatatccacgacaaaaacagtgcaatcgccgtggctgccgccacgccgcctatgccaaggccgagcgcgccggtaagcacaagatccagtacgatgttggcggcgcagctgataaacagcagcagcagggaggacgagctgttgcctatgccgcgcaaaagaccggcgttgaagttatagcccatgttgcccagaatccccagcatcgtgatgcgcagatacagcaccgcccccggcatggcgtccgccgggacctgcatcagctgcagcatccacggccccagcagaaacccgatgacggtcagcggcagcgatgctgcaaacagcagccagaccgaggtgcgcacaagcttttgcagctggtcgcggtcgccgcggccgaccgcctgcgatacgaggatggagatgcccgagccgatacccacaaagacacagagcagaatttcgagcggctgggagctggtcgccaccgatgccagcgccgtagtgtcgcagaaattgccgatgaccagcgtgtccaccgtgctgtacaaaagctgcagaatattgccggcgcagatgggcagcgcaaacagcgccgcgcgccccagcacggagccgtgggtcatatcaacttgtgcggattttcggtaagccggcataaccctatccccccggtatgacagattttcttatctatattgtacgaggaaaccacgccggctgcaacaatcattatcctttgatttttggatagatataaacgatgaggcgatcaatttttgcggtgcggtgtaaaaaacaatcacgccctttgcggcggcgggagggcgtgcttttttaccgttttgtgcaggttccacaaacaaagatggacaaaatcggtaacattgacagcaagatttgccgcaaaaggacttgccactgcggcgcaaaatgtgctatcgttaaaatcaaattcagtaaaaggggagtaaaatttgtatgcggcagcctctgacaagacagaacagcacgcgcgtcaagcgcagatactctgcttatcagaaccgtatttttgtctatctcgtgacccttgtcaccgccccgctgctgctgctgggcgtgctgtccagcgtagtgtactaccggcagaccgtcacgcgcagcgatgccctgctggcctcggcgcgggagaatgtcgagacgcagatggaaattgcgctgagcaacctgcgcgcctactacagcgcggtcgtcagcgcggacaattaccagaccctgtgccaaaaaactgtgccgccgtacagcgagtacacccttgtgcgcgatatgcagaccgccatgcgcggcggcaatctggtggataaatatgtcgaggggtatacctacatcaacctgcgcagcgggtggattttaagcaacaacggcatgtaccggctggctgatgccgccaaccgggatgaggtcgcccacctgctgagcgaatgggcggagcagcatgccgccatgatgtgggtcaaccgcaccgaccagcccacccccgcgctggcagacacaccgctgaacacggtggatctgaccggcgagctgctcgtgctgcgcagcagctcctaccgcacgggcagctatgcggtgctgatcgtcaagctggatctttcgccgctgtatgagatgaccgagagctggcagaccggcggctacagcattgccgcgcgggatttcaccggcaagaccgtgctgagcacctctgctgcgctgaccgccctgctggacgccgacacccccgccgagggcggctgcgtgctgggtggctggcggctgaacagcggcaagatgggcgtgaacgggctgacctactatgcggcgctgccgcagcgcacactggcggctaccgccggcatggtgattctgatcgcttttgtgctggccgggggactggtggcggtgctgctgatctgccgccgctcgaccagtgtgctgtacgcccctgtggatgatctgatgcacgcggccagcggtgtgttcggccagcccggcagcgatgaggaggagtttgcctatctggccgccggtgtcaagcaggtggcccgggacaagcaggcgatgcaaagcctgatgcagcagcaaaaccgccgcctgcagcagagctttgtggaaaatctgatccgcagcgaggtcaccgatgaggccgccggccacacgatgcaggagctggggctggcagtctgccccgcgtatcggctgattgcgctggcgctggacaccccggcgggcacctccggcccggtgcgggagacgatgctgctgaccgctatacagacgatgcccaccgagctgctgcgccgctgcgcgttccagcccgtgatgctgaactttaccctgctgctggtcgtgggcggcgaggaggctgatctgaacgaggcctgccgcgtggtatatacggtggcggcgcgcagcatccgcaccgcgctgggggtcagctgccgcgcgggcgtcagccgccccttccacaagctgcaccacatgcagctggctgcgcaggaggcatgggaggccctgcgcctgccggaggccgatgcccccgaggcaagcgggcagatgctgtactaccagccgcccgatgagcagtgcgcccgcaacggctatgatacgctgctggagcatgagatcacggcagctgtaaccgcctgcaagaccaaggaggtgcgccacctgctggagcgctttaccaccaaaatgctggaaaaggacattcgcggctatgagcggcagttttacatccagcggctggtggcggccatgctggccgtggcggaaaacgccgggctttcggtcaaccaggtgctggccgaccggcaggccaacctgtttgagacgatcagcaagatctacaccgccgaccagatgcagaatttcctgatggacgaggtggccgtgcctgttatggacctgctgactgagttccgccagagcagctccagcgagctggtcaagaatgtgctggcgctgatcaagcagacgcgcggcgacattacgctgaacgagtgcgccgaccggctgaactataacccgagttatatctggaaggtgctgcgcaccgagaaggataccagcttcagcgatctggccaacaatgaaaagctggagatggccaaggaactgttgctgaccagcgacatgacggtcgtgcagatcgccgagacgctgaactattccaatgtgcagaatttcatccgatttttcagcaaaaaggtcggcatgacccccggcaaataccgcaaggattaccagaacgagaagaagtgagggaaattgccctcacctacagcaaagaccgtgtccgatgtgttcgggcacggtctttgcttgttattcggtttctatgcgcagtacattgaccttgtcatcgtactgggtgcgggtgccggtgatgtggggaatcagggcgttgacctccatgaccagcgcgccctcggcggtcagatagggctggccgtccatcaggttttccttgccgtcaaccagcaggtgggtgacgccgacctgcgctgtcacggtgtgcccgccgctgtgcagcgtcaggcagcccccggcggcgttccaatcatagcggaaggcatcggggatgaccgtctgcagccgctccaaaatgcagagcaccgcgccccagacgcggccgttctcgttgacgctgcgcacgccgcgggtgtcaggctcctgcccgttgacgaggatcttggtgtagcacttgtcctccggctggtattttgctgcatcggcctgcgggatggagaggaaggcatcgcggcgctgcggcgcacaggcggcatagtccggcaggcggcagggcagcggtgcggctgtcagcggtgagaggtcggcggggttgctctgcagcgtgatgacattgcggatgctgcccatcacgccggtcaggcggatggtgccgggcgctgtgcccgcgcgcagaaatacgcggttggtgccgcactcagcatagacatggttttggtggatgacgctgtcgtcatggccgtagcccgcaaagcggccgctgttgtagcctcccaaaaactgcgcggggccgtccaatgtgaagtcgatgcgcgcatcgcagagcgggcagacccgcccggcgctgtcctgcacggcaatatcgacataggcgatgtcggctccgtcggcggcaaggccgcccggtgcggtgtgcagcgtcagccgcagggcggcggggctgtcggcggtttccagccggtcggacgcggagggtgtgccgtcatagccgtagcccacggcctcgacccagccggattgggtcacatccacaccgggaaaggcgaacacaaaggtgttctgcggcttgtcgcaccgcccgacacggcgcccgttgacgagcagctcgaccgcggcaacagggtagcttgccaccacatacaccgtcttattgtgcgggtcgcgggtgtgccagacgccggtgccctcccagtaggtgccgttaaagcgcttttcttcatagcgatagttggcagcggtgaaggcggggtagttccagtggccgatgatcttgacggcgggggcctcgctctgcataacgcggaagcagtcaaagctctgctttttggtgcggcagggatcgacgcggccgctcatgcgggcgttttcgctgtaggactggcggccatgctgggcagagtccgtccagcagagcgccgcacaggcgctgtagtagttcttgccggaggcaccgcccatccgatcgttgaaaaactcggcgtagccgcgcgcgttttcaagcgcgagatcttcactggtcagatcgtagaagtcgtacccaacagcttttttgccgcccttgccgacccagcggttgcggtagtcgaaatccggcggggtgaagtcgtcccagatgcggcggggggcctcctcgcggctgtactcggtctcggtgacggggccgtgctgcgacaaaaagcgggcggcgtggcggttcagcatcgtgccgacatactcgctctcgttgacgacctcctcagtgttcagggtgcggcagcccataaaacgcccgccgtgggggtccagccgctgcttgagcagccgcatctcccgcatgtgctcgcgggagatcgagttgttgccggcctcccagaacagaatggacgggtggttgcggaaggcgatgatgacatcgcgcatcagctctacgcgctggtcccactggcggccgaagctctccttctccttgtcaccggcaggctgggtgcagacgatgccgcggcggtcaaacgcacggacatcggcggggctgcccgccacatgcataaagcggatgtggttggcgttgctctcgcggatgagggcggcgtcctcatcgtgcagccactcgggcgcaatgccgatggccgcccactcgttggcggcgcgctgggcgtagccgcgcagccactgcactgcgccgttgatgcgcaggccccggtccttgtcgtagcttacggcgcggaagccggtcgtcagctgctgggtgtcggccttttcgccgtttacaaacagctcggcctccacggtgtagaggtaggggtcgtcaatgctccagaagcgcagcggcagggtgtcggccccggcgtgcagcacagtgaccgccatggaatccgtggcggtcggtgcgggcaggctttcgtcctccacggggcagtaatgtccgggcacagcctcatcggggatataggcgtccgctggggtgatgctcagcggtgggacggcgcggcccgtgggggctgcggtggccggggcgccgtcaaagatggcggcaacgctgccgtccgggcggcgcagcgtgatgcgcagctgggcggaaacggggaccttgccctcgttgcggatctcagcctcgacccggatatccgccgtggcgttgtctaaatcaaaattccggccgtagacatagaggcccttggtctgcaaattggagtagagcggcagcgtcagatagacatcgggcttgaaaaacacctgcacggggcgggtgatgccgccgaccgagggattgaagtcgttgcagttccagaaaaaggggacgcccacgcggtcggcggggacggcctgctcctgcggaaagagatagctgccggggacagcatcgggcttgttgggggtctcggcaatgcagaacggcgcattgcgggtggcggtgttgtcggtcgcaatggcgatgaggttcggcgcatcgtaccgcacatagggggtaatgtcaaagccgaacggcgcaacgccggcctcatagtagccggccagcgtgccgtttacatagaggtagcaggtctggcgcagcccctcaaacgcaagcagcaccttgtggtttttgtgccgcgccggaatggtgaggatgttgcggtagaaggccgccgtgcggcgctggccgctgccgccgtcctgaatgcggtcacggaacagatcctcgtcattgaaggtgtggggcagcgtgacgggctgccagccggtttcccggtagtcggcctcgtaaaaggcgtgcccctcagcgtcccggtgggcgtcaacggcctttgccatggggaaggcatctgcccgcaaaaagtgccagccgtggtggaaataaaagctttcgccttgcagtgtagacatagcgttttctccctgtcagatgtgctgtatacagttgcaggcccgcgatcttatctttatcatacgcgctgccgcggcaaaaaacaagtgtcatttgatgggcagaaggtcttgaaagtgcggcgcagcgataaacatcaagatatggaaacaggacctgtttgctggcagcagggcggagtgacccaaccccgccggcaaagcggggcagtcagggcaaggctgtgcggtaaagcctccgcagtccgtaaggctgcagcaggcctaagggcaacaccgcacaattcccgcctgacggcttaagcaccgctccggcggctgcggcacggcatctgcgttgccaaaatgctcgataagacatccagtattatctgcgcttttggcttagcagctgccgcacctcgc

SEQ ID NO: 14022 - DNA, 23712 bp, Unknown
  gut microbiota DNA sequence
gtctggaatcctcggacttcggcaaattatagttcttaccaaccccaatcccacattttcgcttaatttgtgagatatacaggttggatacctttaacccgctatgctccagcacatagtccttaatctgggtgtaggttgccccatcttgaaattcggacatatccatatcttccaaagagaactcaacccgaatctttttcgagtcgacctcacccttggaaagcaagacaaccgtctcaacatgccgcgtctgcgggaaaaggtcaacggggcagaatttggcggcgcgccagccgaggcgggtgaaggcagctacatcgcgtgccagtgtttcggggtcacagctgacatagacgatgcgcttgggcttcatccggtttacggcggcgatacattccggtgtgctgccggcgcgcggcgggtccagaaagaccacatcggggtgcagtccctccccagcggcggccatcatccattccgtggcatcggcgcagacaaagcgggcgttggccagcttgttgcggcgggcgttggccgcggcgtccctgacggcggcggggttgcgctcgacgccgatgacctgctttgcatggggcgcggcgcacaggccgatcgtgccgatgccgcagtaggcatctacgaccgtctcgcggccggtcagcttggcaagctcaagtgcctttttatacagcacctcggtttgtgtgcggttgacctgataaaagctgcgggaggaaatggcaaattgcagcccgcacagcgtatccagcacaaagccgggcccccaaagcggtttttcgcggttgcccagcacggcgctgctgcgcgtggggttgatgttctgcacgatgctgacgacccacggcgcttttttgcgcagtgcagcgcagaaatttttgctgccgggcaggtctgcgccgggcgtcaccagcgtgaccagcaccttaccgtccccgctgctgcgcagcacggtatggcgcagcagccctgtgccgcggtcctcgtcataggcggtccagcggcaggcgcgggcggcctccagcacggcggcaagggtcttattgaggatttcctcctgcagcaggcagtcagcacccggcaggaccctgtgcgtaccctcggcatacaggccgcagaccagtctgccatgctgcattgcaaagctggcgatggccttgttgcggtaatggtacggctcagtcataccctgcacagcccggacgggggcaaacccgcccagcagcccctgcaggcgggcctgtttttggttcagctgttcccggtagggcagtgcaagcagcggacagccgccgcattttttatcgtagttcaggcaggtagtaggcatggttatgacctttctttgcacaggcttgcgcggtatgctatactatacatacagagcaaaggacggaggtattgctatgaatgtgctacttatcaacggcagcccgcacaaggacggctgcacaaacgcggcgctggccgagatggccaaaacgctgaatgaggccggcatcgagaccacgatcttccacatcggatctgccccggtgggcggctgtgtgggctgcggcggctgcggcaagaccggcagctgcgtctttggcgggccggtagccgcggtgctgccgctggtcgagaaggctgacggcattgtgttcggtgcgccggtccactatgccacggcggcagccagcatgcttggctttatgcaccggctggctatcagcggtggcagatacctacgccacaagcccgccgctgttgtgaccagcgcccgccgcgccggtacgaccacggcgctggaggccatggaaaaggtaccgcagttctttgagatgccgctcatcagctcgacctactggccgatggtccacggcggcaaggccgaggaggcagccgccgatgcggagggtatgcagatcatgcgcaatctgggccgcaatatggcgtggatactgcgctgcatcgaggctggcaaggctgccggaattgaggctcccgttgcagaaaacgacaaacggacgaattttatccgctgacacgcgccctgcgggcggcaaagcggcgttcccactgcgggagcgccgctcttgtttttttcagagggagttatgccagactcttggtgcgcccgccgctgacatcctcctcggtgacggccttgaccgaggcatccgcctgctgggcggactgcggcgcatggccggtcggccagacattctgcagcagcgtcaggatcggctcataatcctgcgtgcgggcagcggccgtgacatagatcgtttcgccgcagtcgtagtcgatctgggcaaagatcgtctggtagctgccgcagtcatagcgcaccgccgagacagcggcatcgggtacggtaaagtcgatgtcatatcggaccgtgccggtcgtttcctccagctcctgccccgactgggcaagaaaatccgtgtaggtgtcggtcatctgcagcagcacgaccgtgtagctgagctggttgccggccgtcagtgagagtgtatccgcctgcgccatgacaggctgctcccactggttctgatcgtaaacgatggtcacaccgttgtcaccgtcacagctggcatagtccggctcctcgtttttgacaaagccgtcaccgccgtaaagatagagcataaaatcctgaaagctgcaccccgtcagggcaagccccgccaagacggagagggcggctgcgatactttttttcataaagctcattccttttataatagcatgatgctgtaaaagcccgcagcggatgccgccagcacaaaggcgttccagcccagcacggcaaaaactgcgccaaacgccagccctgccagtacatcgctgatatagtggacgccggtcacgacccggcagatcgcaatcagcacccccagcacggccagcacaatgccgagcgggcggagcacaaaccacgcggccccggcgatggccgccgccgaaaagcagtggcggctcggcatgctctggccgggcttgtccttcggaaagaggggcgcaaaccccagcgccgcgtagggacgcgggcggtcgatgatccggcgcaccagcgtgccgaccagaaacgctgcggccggtacgatgaccgcaggcaagagctgctcactgcggtgcagtgccagccacgccagcataccgaggtagagcagatataccagccccaccgccccgcggctgacgagccgcagcgcctttttggcggcgggccttgcgttgaaccacccgatcacggcgcggtattgctctgcattcataagggtatcctcccagtcataacatttcaccattagaataacattctgaaaaaggcttgtcaaacggcgatgcagatgtttataataaaggcagtaccgcaccccctgcagccgccgatacggcgcgccgggtgcgccggccgcaaagcccaaacaggtgcgcagtattctttgtgtctgcgtgctttttgtggtgccagcggtcaaaagtgattacagttgtaggaggggtgtcccttttgtttggttttgcgaatgcgctgctgctgcttttgctggcggctgcctgccttgattttgtaccggtcctgcggcgcaggctctcccccgccgcgtggtgggcggaggaacgcccgctgtttagcgcgcgcggcgcagcggtgcgccagcggtacggtaccgccgcgttcctgctgggcgtgatggtgtatgagttcatcgttgtgttcaacaacagcatggcgcgggagaattggccatggctgcagacccgcgtttcccccgtgctggactgggtgatgtacctatgcttcgggtgcaagattttgctcggcacaaggtacagcgggcgcagcctgctctgcgccggggcgctgtattttgtggcgcggtgggtctacttcaacgggcagaatatctggtggctggggctttgcgttgccctgctggccgcaaaggatgtgccgctgcgccgctgcatgaaggcactgctggcctgcggcctgcccacactggcgctggtggagcttttgcactttgcgggcgtcattgcccccgatgccgccagtgagcgcgacggcagcttccgcctgatgttcggctacggccaccccaacaccttcggcggggtggtgttcggccttgtgctggcgtgggtgctgctgcgccgcgcccgcctgacatgggctgagctggccgctgcagcggcggtaggcgcgtttttgatgatcgggcccaagtcccgctccgcggcgctctgctcctttttgcttgtggctttgctggcggcggcaaagctgcgcacccggcgcggcccgcgccccgccagccgcgcagtggcagccggctgcgccgcgctggtgccgctgctggcggcggtaagctatagcctgccgctctttgtggtaaagatcggcccgtgggcaaacgacatcggccccgcctggctgaaaaagcttgatgacctgctgacctgccggatctcgctggcatgggcggcctaccgtgtatttcccataaaaattgcgggccagatgcttcccgactggcccgcgctggacaatatctttgtgtatctgctctacctgaccggcccggtcatggtcgtgctggtctgcgccctgatgatggcggcgctgtacggctatgcccgccgcggtcagtggcaggccgtagcctgtctgatcacaatgctggcctacggctatatggagagtcaggtcacccacctgaccagcgaccctgccgtgctgctgctctgcggtgcggtgtatgcgctgccagccgcgcgctggatgtttgagcaggattgattcaatcctgcgggaaggcgtctgcagagatctccaccgtatcctcctcctgcgcggcggcctcggcactggccttggcggctgttaccagccccgtcacctcgcccgagggcttctgcagcaggtaggcaccgatcgccttggccttgtagacgagcagcacacagtaggtgtcatgctccccggtggaaagctgcgggcacagcaccgtccacttttccacggtcttgcccttatagtttgcaaggtcaagcccgctctcctgcacgatctggttgaaggcggcgaagctgtcatcccactttttggggatcttcaccttatctacggcggcactggcaaggtcggtgtcaaagccgtagccgttgaagtagattccgatatcctgcgtcgtttcgatgcccggcacggcagcggcggacgccgtgacagcatccccggtaaaatgtacggcagcggccacggtgccgcacaggcagacggcacacagggccagcgccccggcctgccgcaatcccggtttggtaacagtaaacataaacataagcgcagccccctcacacattgtcactgcaatgtatgcgggggctgcttcgtttatgtatgacggaggggggccggggacgccgcgcctgcggcgggttacttgtacttcggcttcggcgcataccactggaagatcacgccgtcatagtccttttccagcttttcggtatcatgctcgggcagggcggtccacatgaccatcatggcaccgagcgccgcgcagaaacgcacggcccagttgcgctcatccgggcaccatgcaatgaaatccggccgccccagcacattgcccagacagtgggagaatacaaacgccgggactgccttgacgccggtgctgcggtagctttggtagctgtcggccagctggccgcgcagcacctcgggggcctgccgccgcacaatgcccaccacgcgggggtcaaagctttcaaggcagtaggggccggggtaggtcttgagctctgcaagggtcgcacggcaaagctcctcaagataggtttggctgtactctctgcggctcttgatctcaacgatcagcggcgtggcggggttggcctcggccaccgtgcgcagcatatcggcaaagagcggcgggtgctcctcgctgcccgccagcggcagggcggagaaatgcgcccagtccatatcatgtacaaagcccttggccggcgtcatgcggtccagcgtatcatcgtgaaaaacaaccagccgatggtctgatgtaaactggacatccagctcgatgccgtagccgttctgcgctgcggcggcaaaggcgggcaggctgttctccggcgggcgctggtccttgccgaaaaggccgcggtgggcgtaattgcgcccgtagaacggcagacgcagctcatcgcggcgcttgccgggccagacggcaaacagcaaaagagctgcaagcagcaggataacacaaagcagaattttcatacaagatcacgctcctgctgccattgtaccgcgcaggggcgcaaaatgcaacagcttttgctaattggcggcaggttttacaagtgggcgctgcaagcgggcctgccgctctcatctttttagaaaagtttttatttttttcacaattcttccacgcttgcgatgtattgtggtattatagagagtgtaaggagggtattcccatggctaaaattctgatcgtggatgacgagccgcgcatccgtgacctcatccgggagcatctgcagtacgcaggcttcacctgtgaggaggccggtgatggcaccgccgcgctgagcgtgctgagtcagggcggcatcgaccttgtgattttggacatcatgatgccgtttatggacggcatgacctgcctgcgtgagatgcgcacccgcaagatcatgaccccggtcattatgctgaccgcccgcagcgaggaatatgacaagctggccggactggagagcggcgccgatgattatgtggtcaagcccttctccccgcgggagctggtagcccgcgtcaaggcggtgctggcgcgcacaatgcccaagcctgcggaggatgccggcagctataccttcggtgatttgtcgatcgacaccgccagccacagcgtcaaggttgccgggcaggaggcaccgctcacccccaaggagtttgacctgctggtctttcttgtcagcaacaagggcattgccctcagccgtgagaagatcctgcaaaaggtctggaattacgactactacggcgaggaccgcaccgtggatacccatatcaagatgctgcgcggccatctgggccactgccgcagctacatcgtcaccgtatggggcatcgggtacaaatttgacccggacaccttatgaaaaagcacgataaagcgggaaagcaccccttcaccgtcagcatccgcgggcagctgatgctgttcatcggcggcattacgctgtttaccctgctgctggtgtggagcatcatcacctttgcgctggagccgcagtacaaccgcacgatccgtgccaagcttgacggcaaggctgccgccatcacagcgatgatcgaccaggcggacaagccgatctccaaccggagctatctgggcctgaccctaaacgaggagttctggagcggtgtgagtgggacctttcaggacaaaaggatcaatgtagacggctgctgtgtcgatttttccgatacaacgctgcgctgcctcaaggcctatgagagcatgtacccctgcctgctgcacgaaagcaccggcgcgttcggcggggatttcggctacaatgtggatacccgggtggccatacagctgcggcaaaagctgtttgaggagggttcactctaccagatcatacggatcggcagctccatgcagatgtgcgtggggcgtctttctgccgatgggcagtacggcgtcatcgtttcgacaagccttgcccagatcacaacggcggccgaggtgctgcggacgattctgggcccggtggcgcttgtgctgctggtgctggatcttttgttggccgtgctgttcagccgctggttcaccagccccatccgcaagctgtccaacggtgcgcaggagattgccgccggcaactacgatgtggcgatccgggttgagcatcatgacgagatcggccgtctggcggaggatttcaaccacatggccgccgaggtcaagcgcagcgcccagctggaaaaagacattctggccaatgtcagccacgacctgcgcaccccgctgaccctgataaagggctatgccgagacggtgcgcgacctgaccggcgatgatgatgccaagcgcaccgagcagtgcaacatcatcgtggacgagaccgaccgcctgtctacgctcgtcaacagcgtcatggagctgagcaaggtgcagagcggtgccgagaagccgagccttgtcgattttgacatgagcgagctttgctttgaggttgccggccgctacgatgccctgtgcgacaaaaaccactggcaccttgacctgcaggctgatgaggcctgccctgtcagcgccgacccggccatgatggagcgggtgctccacaaccttttgggcaacgccttccatcacatcggcagtgacggtgtggtggtgctgcgggccattccgcagcagcgcggctgccgcatcgaggtcgaggaccacggccccggcatcccgccggaggatctgccctacctctttgatcggtactaccgtgcgcggcaggattccggccgcagcggcacggggctgggcctgtccatcacaaaagccattttgcagcagcacggctttgcgttcggcgtcaacagcgctgtggggcagggctcgaccttctggtttgagatggctgacacaagagcatagttccctgcgggtgccgggtccgtccggcatctttgacatgccgaacaaaggaggtttttcatggagagcatcaatgaaaaaatggacgcccagctgcgcacccgcgtggacgagctgacccgcgccaatgatgagaatcaggacggcaggctggacgccgccgacctgaaggcccagctgaaccgcatcgaggcccagcttgagctgcaggaccagcagaaccgcggcatcattgcaaaccagcacaagcggatgatcctgagcgtggttctgatcgcggtgattctggtggtgctggcgttcttcggctggcgcatcaatgtagcctacaacaatgtcatggctgcctgtgaccgcgtcaacgcgctggcggacaccgtgcagaccagtctggacacgctggatcagagccagctgaacgacatgatgcaggatctgcccgagatcaccgaacagctgaaaaaaattgatgtcgatgcgctgaacaaggtcctgaccgagctgcccgccctgatgaacaccgtgagcagcctgcagagtcaggtggagagcatcaccaactggttcaacggtctggggtcggttttcggccgatgacccgcccataaaagcactgccctgcacagaatgtgcagggcagtttttgtgtgccgcgtcagtccgcgcggcggtggcagtacgccagccgcggggtgccgtcctcggtatagatcgtgccgcagcggcagcccctgctgcagacaccagtcgatgccgtatagcacaatttcccggctctgtccaccgcagggcgcgtataccgggatttccccttgcatcacaaccgcggttgtgctacactgtatctgcaaaagttagaagcatcaaacttttataaaagaggatgtaattatgacactcgcggaattaaaaatcgggcaggatgccgtgctgcgcactatcggcgggcagggcgagctgcgccaccatctgctggatatgggcctgacccccggcaccgaggtcacgctgcgcaagatcgcgccgatgggcgaccccatcgaggtcgagctgcgcggctatgagctgacgctgcgccttgccgatgcagcaaaaatcgaggtcgagaatgtccatgagaccgaccgcgccgcccgcagcgaggagcgccacgctcccgtaccccaccccggcgtgggtgagctgcgcaaggcccccagctaccacgaccgcaagaccggtgccgagatcgccaaggggcagccgctgcaccttgcgctggccggcaaccagaactgcggcaaaactacgcttttcaaccagctgaccggctccaaccagcatgtgggcaacttccccggtgtgacggtggaccgcaaggacggcacgatccgcgggcatgaggaggccaccgtcaccgacctgcccggcatctacagcctgtccccctattcaagcgaggagatcgtcacccgcgacttcctgctcaacacccacccggacgccatcatcaacatcgtagatgcgtccaatattgagcgcaacctttacctgacgatgcagctgatggagctgaatatcccgctggtgctggcgctgaacatgatggacgaggtccgcgccaacggcggcaccatcatggtcaacgcgctggaggagctgctgggcgtgccggtcgtacctatctccgccgcgaaaaacgagggcattgacgagctggtggagcatgtgctgcatgtagcccgccaccgcgaaacccccggccgcatcgacttctgcgatgcgggggacggcaagggcggcgcggtgcatcgctgcatccatgccgtcaaccatctgatcgaggaccacgccgcccgcgccgggctgcccgtccgctttgcagccaccaagctggtcgagggtgacccgctgattgaaaaggcgctggatcttgacaaaaacgagaccgagctgcttgcccacacgattgccgagctggagagcgagaccggccttgaccgcgaggcagcgctggccgatatgcgcttcaattttattgaacgcctttgcgataagaccgttgtgcgccccggtgagagccgcgagcataagcgcagcgtagcaatcgacaaggtcttgaccggcaaatacaccgcgctgccctgctttatcggcatcatggcgctggtgttctggctgaccttcggtgtcatcggcgccggtctgtccgacctgctgaccctcggcatcgatgccctgacagacctgaccgaccgggcgctgaccgcctacggcatcaatcctgttgtacacagcctcgtcattgacggcgtgtttgcgggcgtgggcagcgtgctgagctttctgcccatcatcgtcacgctgttcttcttcctctcgattttggaggataccggctacatggcgcgcgtggccttcgtcatggaccagctgctgcgccgcatcgggctttcgggccgcagctttgtgccgatgctgatcggctttggctgctcagtgcccgccatcatggcgacccgcaccctctcgagtgaccgcgaccgcagaatgacgatcctgctcaccccgttcatgagctgctcggccaagctgccgatctacgcgctgtttacaacggcctttttcccccggcagtaccgcgcgcttgtaatgatcgggctgtacttaacgggcatcgtctgcggcattttgtacgcgctgctgctgaaattgaccaagtacaagggcgaacctgtcccctttgtgatggagctgcccaactaccgcttcccctctgcgcgcagtgtgggccagctgatctgggagaaggcgcgggacttcctgcagaaggccttcaccatcatctttgtggccacggtgctgatctggttcctgcagacctttgacgcgcggctgaatgtggccgccacgcccgatgccagcttgctggccgccatcggcagctttattgcgccggtgtttgcaccgctcggctttggcgactggcgtgtcagcacagcgctcatcacaggctttaccgccaaggagagcgttgtctcgaccctgaccgttctgcttggcggggatacgggcgcgctggccacgatgttcaccccgttcacagccgttgtgtttttggtgtttaccctgctgtacaccccctgcgtggctgccgtggcagccgtcaagcgcgagctgggcggcgccaaagccgctgccggcgttgtcctgatgcagtgcgctattgcatgggtggttgcttttgtggtacacttagtgggtggattgttcgggctggtatgaccccgccccgtagaaagtatgaggtagacccctatggcaagtattatcgttgttgtgatcatctttgtgctgctggcgctggcgattttgtttatctgccagaacggcggctggcagggcggctgcggcggcaactgcgcaggctgccacaacaaatgcgccgatgctgacaagaaaaagaaatgaccctgagcggctcctgcgggagccgctttttttgtggctgtccttgcacaatcccctaaaaaacgctatactattgataagtatattattttgggaggcactgcccgtgaacgctgagcccatccgtgttttacagatcatgcccgccatggacgcaggcggcatggaaacctttgtcatgaatgtctaccgcaccctcgaccgtgagcaggtgcagttcgattttttatatcattacgataagccgtgctttttcgatgatgagatccgtgcgctgggcgggcgcatctataaaatgaccgtccggcaggacaataacctcccccgctatctgcgcgagctgcaccgcctgtttgccgcccacccggagtggcgcatcatccacggccattacagcggcttcggcatgttttacaaccctgtggcaaggcgggcgggcatccccgtgcggtgcggccacagccacaacaccgcctatgagccgaaccttgtcggccggctggaccagcttatgagcagctttttcagcgccgggcttaccgaccgctttgcctgcagcgaaaaagccgggcagatgctgtacggcagcaagccctttacagtcgtgccgaacggcatcgacacggcacggtttgccgcccgcgacccccagcgccgcgccctgctgcgcggggaactgggcgtgaccgatcaggagattctgttcggccatgtggggcggttttccgcccagaaaaaccaccccggcctgctgaagatcttcgccgccgtgcgcgcccgcctgcctaaggcgcggctggtgctgctgggcggcggcgagcctgcctatatcgagaaaatgcaggcgcttgcgcaggagcttgcccttggtgacagtgtgatctttgccggggtgcgcagcaatatccagagcttttacgatgcgatggacgcctttatgctgcccagcctgtttgaggggctgcccgtagtgctggtcgaggcacagaccgccggtctgccctgctttgtctcggacacggtggaccccggtgcagctttcaccgaccgggtacgattcctgccgctgcaggataccggcgtctgggcgaacgcgatcgcggcagcctccctccgccgtgacccgcaggcacgggagaaggccgtccgcgccgggtacgacatccacacaagcgctgcggtgctgcaggaattctacctgcgccgctatgccgaggtgacaaaatgaagtcctgtgagatcgcggtcattgtgccggtctataatgcagcagcctatctgaccgcctgcaccgatgcgattgccgcgcagaaattcgacggcttccggtgtattttggtggacgacggctccacggacggctcccctgcgctctgcgatgccatcgcagccggagatcagcgctttgtggcgctgcatcagcccaacagcggtgtatctgccgcccgcacggccgggctgcggcaggggcgcgcgctgggtgcacggtggttcgctttctgtgatgcagatgatctgtaccaccccgacctgctggacacgctgtacgccgccgtgaccaacagcggcctgccgctggcctgctgccgctatgacacctttgccgacacgccgcccgccgatgccgccgtaccggaaggctgccgcatcctgcgcggcccggctcatctggacgcgctgctgcacgaccatgcggtggactacggcctgtggaacaagctctacgctgccgatcttctgcgcgaggatatgctggacaacggccttgcctacaacgaggatttgctcgcaaactggcgggcgtttctggccgcgccggggtgcgccttctgcgattttgcgggctaccactaccgccagcacgccgacagtgccagccaccgcgccctgccgccccagagcattgatgaccagcgccgcgcggcggcggagatacgcgccaccgccccggccgccctgcaggagagcgtaaacgccttttactacgaaaagctcgtctatctggccagcatgatcctgcggcgcgccaacgctgatgcctaccgcgtgcagctgtatgagctgcaggtcgccatccgggcgggcgcgcgcgacccccagctggggcgcaatccgcagctgccgcacagcataaggctctcggcgtttttgacgctgcatacgccgcggctgtggcagtgggcctgccgaactttcttgaaggaccgacaataatgcgcattttacttgttttagatcgggtggagaacgccgccagcgccaacgccctgatgggcttccgtctggcggagcagctgttggcgcgggactacaccgtacatattctgacactgtgggacggtctgcacaccccgcccgccccgccgcagggtgccgtgcagcatctgctcgcctttgccgatgagcggctgatgaacgaggcccttgaaaacggccgcaggggcggcaccccggtcgctgtgcggctggcgcgtctgtgcgcccatccgacagcggcggcggcagccttccgccagcttgtgctgaaggccccccgccgcacggtggacagccgccgcgagatcgaacgtctggacgcagaatttcgctttgacgcagtctgtgcggtctgtgcgccctaccgcgccgcctttgcgctggaggcagcggccatcggcggaaagaaatttctctggcagcttgacccctatgctgcaaaccgtgattacacagccccgggcggctatgcgcgggaggggcagcttcttgacgcgctggacggcagctttatcacgccgcaggccgtcccggactatgcggacggcgcaccgctggcctcccggcgcggcaaggtgcatacgctgggtttcccggcactgctgccgcgcgcagccgtcagcagtgcgcatgacacggtacagtgtgttttttgcggcagtctctacccggcactgcgtgagcccggctttgcgctggcgctgttcagcgcactgcacgacagcaccgtgacgctgacgatggcgggcggcgggtgggagcgctttgccgccgatgccgacaaggccgctgcggcgatgggtgcaaattttgtgcgccccggtctgctgccgcccgaggacgctgccgcgctggaggaccgcgccgatgtgctggtgagccttggcaatgcctgcgacaaccagctgccgagcaagctgttcggctattttggcaccggcaagccggtgctgcatctggccgtgagcaaggctgacccggcgctgccctatctggcgcgctacccgctggcgctggtgctgcacgccggggacggcgtgacccccgccgctgcgtcagcgcttggccgctggctgcacgaggtctgcggccgccgcctgccctttgccgaggttgccgcactctacccggaatttacgccggagtatgtcgcaaatgaatttttgaggtggatataaatgcagatcctctggcttgtcaaaaccacgctgccgcaggcggcggctgcctgcgggctggccggtgccagcgatgtgagcggcagctggctgaccgggcagcttgccgcgctgcaggcgcacccggcactgcatctgaccgtgctgtgtgtcggcaaggcggaggcagccggccgcgcggacggtgtagactaccgtattgcggccggcaccgccgcctttgccccgctgctgctgcagctgcggcccgaccttgtccacatctggggcaccgaatatgatgcggccgccgccatggctgaggctgccaaggccgccggtctgcctgtgctgttcagcatacagggcgttatgcgggactgcgccgcgcatctgtgcgatggcgtccccgccgcctaccgccgctccggcgcgctgtggcatacccttgacaggatcgttcccggcgagctgcttgacacgatgcaggcaagctttgacgcactggctgccaaggaggccgcacttctggcacaggcccgctatgtgaccgggcgcacggcctttgaccgcagcgcctgcgccgcccttgcccccgccgcccggtatttcgcctgcaatgaaacgctgcgccccctgttttacacggggatcccgtggcatgcgcgtgagttcggcgctgcgccggtactgtttttgccgcagggcaactacccactgaaaaacctgcacactgccctgcgggcactgcccgccgtgctggcagcttacggcgatgcacagcttgtcatcgcaggctggccgccgcttgacaagggcccgctgctgcgccccgtcattgaccggatgttcccctacaagcgctattgtaagcagcttgccgccgagcttggcattacggggcacatccgctataccggcccgctggacgccgccgcaatgcgtcaggcttatttagaggccgatgtttttctgctgccctcctgctgtgaaaacagccccaacagtctgggggaggccatgctgctgggtctgccctgcgtagccgctgccgtgggcggtatcccctcaatgctggagaacggccgcgaggggctgctctacggcgatgcgctggatgataaggcccttgccgatgccgtgctgcgcattttgcagagcgctgacggcggcacggctctgggccgggccgcccgcgcacgggccctgcaaacccatgacgccgcccgcaacgccggggagctggaacaaatttacaagacgattctgcaagaggaacagccgtgagcatacgcaacatttctgtcatcattccctgctacaaggccgcagccacactgcgccgcgccgccgcaagcgcattggccgatgcccccgccgggctggagctgctgctggtggacgatggcagccccgacgataccggccccctttgcgacacgcttgccgctgaggacccgcgcgtccgtgcgctgcaccgcccaaacggcggcgcgggtgcggcgcgcaacaccgggctggatgccgcgcgcggcgattgggtgctttttctcgatgccgatgatgtcctgctgccgggactttgggccgcgcttgcggcactttccaccgaggcggacatgatcctgttcggtctgacgcgggagagcggcacgactgtggcccctgccgattttctggccgagggagcctatcccgacctgcaggcgctgggcagtgcgctcgcccccctgctgtttgatacagggctgctggccgcaccttatcccaagctgttccgccggtcggccatcggggcgctgcgcttctcgccgcagcttcagatcaacgaggatgttttatttaacatacaatttttacagaatacccctgccatttattgcctgcatggtgtatactataagcagtatgatacacagaccggcagtctttcgcgccggctgcgcggcgatttgctggaggccgagcgcatcacccgcccggcgctggctgatctgctgcgcgccaacggcattgacccggccccgtatgagcgcaccagtcggctgcgcgcctgcctgaatcagtacggtctgctgaccggctgccggggagatctgccgtatgccgtccgccgcgcgctctttgccgagattttggctgaccccgatgcccgcgccgccctgcgggagcggctgcagcatgacccgcacaggctgctggccctgccgtaccgcgcaggtgtcgccctgcagtggccgggccttttggcggcgtacacgattgcaaagcagccccttttgcaggggcactgcagctagtatgatataaggaagtatctatgtctgaccatcccaaaatcagcataatctccaccgtctacaacaccgggccttacctgcgcccggcggtggaaagcattctggcccagaccttcaccgattttgagctgctgctggtggatgacggcagccatgatggctctgccgaggtctgcgatgcgctggcccggcaggatgcccgcatccgcgtgttccaccagcccaacggcggacctgcccacgcccgcaacaccgggctggacaatgcctgcggtgattacatcggcattgtggactccgatgatctcatcgagcctgcgatgtttgagacgctgtacaacgccgtgcagcagcccggtgtgcggctggccgcctgtgccgcagactgcattgacgccgagggacgccggatcgaggggcgtagtgtcacgatccgccagcccggcgtgcgcgatgcgcaggagcttttgctggaggcctttcagaccggcagcttttacgggcccttaagctggaacaagctgtttgatgcccgccttttcaaagaaaagggcatccactacgatgagacgatgctttttggcgatgatgccagcgtactgcaccgtgtctttgagggggagcgctgcaactgcctgaccgatgtgctgtatcactaccgcacccgcgccgggcagatcaccacagccggtttcccgccgcgcaagaccgatgatctgcggatgtactgggaatggctgcaatacttctcggcccggccggggcgcgaggaatactacgactgggccgtggtgcggtactggcggatcttttaccagttctggtgccagagcgatgcagccggcaacctgccggagctgaagccgaaattcatggcgcacaaaaaacatctggacgccattttgccggatattctgtccagcagccacctgccgctgggcgaaaagctgcgggcggcggcgttctgtgccagccccacgctgacctacggcgccgcagcggcctggggccgtctgcacaagaggaaggggaaataaatgatggaacatattgcgatcagtgtgatcgtgccgatctacaacaccaagccgtatctggaggagtgcattgagagcatccttgaccagaagatcaatgtacctgttgaggtgctgctgatcgatgacggctcgaccgatggctgtgccgacctctgtgaccggtacgccgcccgcgatgcccgcgtccgggtcatccatcaggagaatcagggcctctcagccgcacgcaatgccggcattgacgccgccaagggccgctattattccttcatcgactcagacgatgtggttctgcccggctttttacagacgctgtacgatgcctgcgagcgccacgatgcctatatggcgctctgctcggtcgaggatgtgcaggagaacggcaaaagctgcgacccggcttacttcacccgccccacgcaggagggcgtattctgcggcaaggatctgctgaatgagttttacaccccctacggcacggtctacaccgttgcgtggaataagatgtaccgcgccgaggtctggaagctgctgcactaccccgagggccgcctgcatgaggacgactttgtggcccaccgcctgttctggcgctgcgacaaggtcgtctgcatcgacaagccgctctaccattaccggctgcgcaacggcagcatctgccgcaccagcatccgcccggaggcctttgatgccgtggacggactggccgaccgctaccgcttctatgtcgagaaccgcgccgaccgcaccgttattgatgccgcctacgcggcctgctggcggcggtatctcttcctctgcgccaaggtccggcagaaccccacccccgagctggtcaaggcgatcagtaaggagcagttcctgatgcaggggctgatcagctacctgccgaactgccgcaacatgaagatgaccgaaaagctcagcgctgcccgctgggccatgatgagcgcgcagagcttgtgcccaatcaaataagttcattgctctgtaggggccggacatgtccggcccgcagcctacccaaaagtgccctctgatgtgaagccgcgggccgggcatgcccggcccctacatgcgcggcggtatttttgttcaaaatccaccttctaaggagccgaccttggcgatacgaaagcccgacaaagaaaaacgcccccgcgtgctgctggtgccgccgccggacctgccgatccctgccgtgcagggcggcgcagtcgagaccctgctgacccacctgatccgcgagaatgaaaagcagggcctgctggagctgctctgcgccagtgtccccgatgacgccgcccgccgcgctgccgagggctggcagcataccaaaatgctctatgttccccgccccagcgggcaccgccggtattggccgatggtctttgtcgagcgctgcatgggcattgcggccccctatgacccgtggtatcagaaggtccagctttcgctcgcgctggagctgcccccgcctgacctgatcgtggccgagggcggcaacctgacccaatgcagcgccatcagccggatgttcggccgcaggcggtgcttagcgcatctgcacggccagacaggctgtacccccgtgatggatgacatctacggcggcgtgctggcgctgagcgattttatccgcgaggattacctgaaaaccagcacccttgacccgcagcgggcctacattctgcataactgcatcgacaccagccgtttttgccccggtcccgcttccaaagcactgcgggcacagctcggctttaccgatgcagacttcatcgtgctgtactgcgggcggctcgaccctgacaagggcattcataagctgatggaggccatcgccgccctgccgatcccgcagatcaagctgctgatcgtgggcagccccttctttgcacgcacccagcaaagccccttccagcgccgcttggaacagcaggccaaaagccttggcagccgcgtacagtttaccggctacattcccaacgaggatctgcccgactactaccggctggcggatctctgctgtgtgcccacactggtggaggaggcggccgggcttgtcgcggtcgaggcaatggcctgcgggcgccccgtgctggccacccgcagcggcggcatgcccgagtatctgcagggcagtcaggccgtgctggtggagcgcggcgacaccgtggccgatcagcttgcctggagcatccgtatgctgtatgagcatccggccctctgcgccgagatgggcgcggcaggagccctgcgcgggaaagagttctccaccgagcattactatgcagagtttgtgcgcattgtgcgcgatatgatcgaaaccggaggtgccctgtgagcaagccgaccatcaccgttatcgtgccggtctacaaggccatggccacccttgaccgctgcgtggagagcatcgtctcccaacagacatcggagccgatcgcctgtattctggtcgatgacggcagccccgatgacagcgggaaaatgtgcgatgtctgggccgcgcgtgacccccgcgtgacggtcatccatcaggaggactgcggtgtttccggcgcgcgcaatgccggtctggctgcagccgggagcgagtatatcgtttttctggactccgatgatgcactgcgtcccggtgccctgcaggcagcgctcgatgcccagcggcgcgcgccgcactccctcgtctgctggcggtatacgaccgaggaggccgacaccgcgccggtcacctccgcagccgaaagccgcccccagaccggccttgcacgcctctggctggactgtctgctggctatgccgtggaacaagctctaccgtactgaatacgcccagcaggttccgtttgacacacagtatactctcggtgaagatttacaatttgtattggattatattgccctgctcggcagccgggagccggcgttcacctacacggtcctgaccgcgccgctgaccttttacgattgcagccgcggcggtaccctctcaacccggtaccataccgactattgcaaaatttggccggagcattttgccaagctgaataaggcctgctgcaacgcccactgcccgcaggaggatatgcgccccctgcaccgcgccgagcttaccgtctacgccgagggcgtggcggatattttgcgccgcgacccggccaagcgcgccgctgtacgccgtgacaaggccattgccgcgctgcgcagcccctggcttcacgccctgctggaacgcatgcggatcgaacggtgctacagcgcctattatctgccctgccgttggcgcagcgtgcgcctgatctttaccttggctgaggccaagcggaccggctcgccaatgttcggcaagctggactgggccggctactacctgctgggcggcaggctgcgccgggattaagaaaaaataaatatgaaataccggagccgcggcatagacaccgcgactccttttttgctgtccgcacgccgcgtttcgtttacatcattttcccatgtgatgcacaatagtccatgcgctttgcttaccgcataacacaaatccgccgttttcttggtgcagtttactcattttgttcattttgcagattcccgtattgacattgttaattttttgtcctacaataacgatggttcacaaagcacaagatgtttacgcatggaggaaggatttgtatgaacaaaaagctcattctcgtgacctcgcctcccgcctgcggcaagacctatgtcgccaaggcgctggcaaagcagctgcacaatatcgtctatctggataaggacaccctgatcgtgctgtccaaacagatcttcaaggttgccgggcagccttatgaccgcagcagcgccttttttgagaagaatatccgcgattatgagtacgactgcattctggcccttgcgatggaggcattggactataatgaccttgtgctggtcaatgcgcccttcaccaaggaggtgcgcgacaacgcttttatcgcagatctcaaggtcaagctggctgaaaagggcgcgacccttgccgtgatctgggtcgaaacctcccctgatgtcgtgcatcagcgcatgatcgaacgcaactccgaccgcgacacttggaagcttgcgcactgggatgagtacatcagccgctgcaatttctctttgccggaaaatctggccgacccgcagcacaaggacaacctgatattctttaagaataacaacgatgcggaatttgagacttccatgcaaagctgcgtgcaaattctgcaaagcaacgaagaaaagtgattcaagcggcatcccatatgcacggatgccgctttattttgcgcaggcagtcccgccatttgcaaaaaattctgcacaaaacccaaagaaacatttgcattttgctttgaaatttgctatactataaaggctgtagcaagcagcctgcgttgatgtaagcgcagctgatgggagcgttcggctccgacaactgcgacatggcaggtttttgaccttattttgcgcgatgcatcgtgatttgcgctcgcaaaaacgcggtggtcaacggtagtcagaccacgaattgaccactattggaacttgactactttacaagattgaaatacgctgtaacggcgtttttcatatataagcgatcgtagctcagctggatagagcgttcggctccgacccggaaggccagaggttcgaatcctcccggtcgcaccagaaaacctcattgcgatgtattttttgcaatgaggttttttgtttttgttagtgtttgattttcagaataattttagcagcatatcgtctgccgcatc

SEQ ID NO: 14023 - DNA, 150207 bp, Unknown
  gut microbiota DNA sequence
cccataggagggtgtcgccgtgtccatcttactttctcacaattcccatgaccttcaccagctaaaaaaagcatagctccccctccgggacagtctggctatgaaggtacaatataagggaaaaacagacgaacgtgcttatatcgcaaatgaaataagcacgttcgtctggtaatggataataaaaaatcccacccagccgtgcacagctgagtgggtaaagaaggtggccaaaaggtcatcttcccggtctcagccctcgcaaggtatctgaaacctgatcgttgttaattatagcgaattgtgaagcagtagtcaatcaaaatagaccatgcttggttgctcttttctgagcaagttcatatacttcctcgtctgcgcgaacaccaatgacaataaccatcatagatgattctgtgcggcgtagttgatagacaactcgcagaccggcagagcgaagcttgattttcaatagacctgcaagacttgtgctgttgtggttaccgagaggcttgccgtagccttgttcatcaacaggcaaaggattctgctggacttttttgatggctttcagaacaagtatgcgctgactaccatctaagtcctttaagtctttttctgcttctgggagatattccagtttccaactcattcgatttcaacctcgtcaaaaccggtgagatcgtcttctgtaacaccaagacggcggttcatttcttcctcagaaattaaagtggaggggtcaaaatgtgccatgcgttcagatgcaatcgccatcagacgggcatcattcaattcatccatcagacggacatattcgtcaggagaaatgagaacgcattctgctgtgttgtttttcatgacaacttttgcaccgcactgcttaacatcttcaaaaatctttccggcaagaccacgattgaattgtgtgatagggacagtatttgtgattgcactcataacagaagccataaccgtcaactcctttctttataaacagtatagcattgacaggcaaaaatgtcaatgcaactatcagcaaattaactgataaatatattgtatgtaagaaatggatttatatacacgctttttcaataattcaaagtatagcctgtctgccctgtgcagatgggcttttcttatgcccaaaacgaggaggtggtcatccgcatggcatccagaatccagggcatcaccgttgagatcggcggcgataccacggagctctccaaagcactggaaagtgtaaacaagtcaatcaaggggacgcagtccggactaaaggatgtcaacaaactcctgaaactggacccctccaatacagaactggtcgtccagaagcagaagatgctgaaggatgccattgaagctaccaaggaaaaactggcaactctgaagactgccgcacagcaggccaatgagcagcttgccaacggtgagatcacccagcagcagtacgatgccctccagcgtgagatcgtggagaccgaacagaatctgcgatccttacaggaccaggcggcgaccacgaatgcgactcttgccaggatcgatgaagccggagaaaagctccagaacatcggatcttctgtggagaatgtcggcaagaggttcctgcctgtgaccgcagcggtaacgggtcttggcactgccgcagtgaagaccgcagctgatttcgattctgaaatgagtaaggtctctgccatttccggtgcgacaggggatgatttcgaccagctccgtgcgaaagcccgtgaaatgggtgcgaagaccaagttctctgcatccgaggcagcttcggcgatggaatacatggccatggccggatggaaaacgggggatatgctgaacggcatcgagggtatcatgaacctcgcggcggcgtccggtgaagacctcgccacgacctcggatattgtcacggatgccctcacagcttttggtttgtctgcggcagattccgggcattttgcagatatccttgcagctgcttcttccaatgcgaacaccaatgtcagcatgatggacgagacgttcaagtactgtgcgcctatcgccggtgcgcttgggttctcggcagaggataccgcagaagccatcggtctgatggcaaacagtggtatcaaggcttcacaggctggtacttcccttcgtaccatcatgaacaacctttccggtgaagtgacctttgttggcaaaaacatcggtgaggtcacgattgccaccagcaacgcagatggcagcatgagaagcctgaacgacatccttgcggactgccgtgtggcattctccgggctgtcggaatctgagaaggccgccaacgcagaggcactggtcggcaagaatgcgatgtccggcttccttgccctgatgaattccagcgagacggatatcaacaaactgcgtggtgctattgaaaactgcgatggtgcatccgagagcatggcagagaccatgcaggacaatttaaatgatcagctcaccattctgaaatctcagttggaagagctggccatttcttttggtgatatcctgatgccgaccatccgtaagatcgtatctgccgtgcagcagttcgtggacaagctgaacagcatcctcatatctggatgatagaatcatccatacggaaataagtgagtataatcactaaaaatccatataagtgaggataatcacttatccagaaaaaagtgaacattttactccgaacggggtttgaagcggtcgattagtccataatcagcggcttcttttttgtgcttaaaaatcgaaaatgtagcgtcatatcgtgataagttggctttttgcgcccctgtcgagcaactgcaccgttgcattttttagtccagaaactatgacagcaagacccagcactttgatacgtctgcggttgaagctgtaatcaaattggtcatggaatacaaacgatcagtacgaggtcatgtcctgcgaggtgacagaaaaccgtctgtaccttaaggtggtcaatgagagaagaaaaaagaaaaaagtgctcatcgactaaggtgacgaatgctcggacggggaaagcggcaaatggtctgacccttgaaaaagcattgaaatcgttcgattctaaaacagttctacgcattggaggcaaacccatccctcggacagaccatcaagatcaagcgtgtgcgggatgcgtaccaggaagcactggataatccggcagaggggaatgtgttcaaacagtttcgattaaatatgtgggtcgcatcgctgacccgctttatcccggagcacatctacaaccttggcaatcagccagtcgacacggaagccttgaaaggtcgcgactgttacttgcaaaataacagtatgtgtgatatattgttttagtagattcagttcacttataaggttaataatagtaatcaattgtggaaaagttactggaagattatctacgcatctctatgtgcccggtggtgcgtctgatctctcgagtaattatataaaattcaactatgctgcgtatagtaaaaatgtctcccattatttgtttgcgttttgtagcgcagcggaaaggcgtggttataaacatgaaagttgtaattttggccggtggtcttggaactcgaatcagcgaagaaagcgtttacaagccaaaaccgatgattgagattggaagcatgccgattttgtggcatataatgaaggaatattcctattatggctttcatgattttgtgatttgcgctggctacaagcagcatatgataaaggaatggtttgcagactacttcctgcataccagcgatattacatttgatttcacccatggcagaaacgagatgattgttcacaatcatcacgctgagccgtggaaagtgacggttgtggataccggactcaatacaatgacgggcggccgcatcaagcgtatccagccgtacattggcaacgaagccttcatgatgacctatggcgatggcgtctgcgatgttgatatttctaaattggtagaattccataaagaaagtggtaaaattgcaacgctgactgctgttatgcaggagcaacagaaaggtgtgctggatattgcagaggataacagcgtacgctccttccgtgaaaagaaggcaagtgacggatctttgatcaacgctggctacatggtgctggaaccgcagatttttgattacctggatggagatacctgtgtgtttgagcaaatgcctctgcagaaattggcagaagaaggacaattgatgagttacacccataaggggttctggcagtgcatggatacggccagagaaaaacagcttctggaaaaattgctggcaacaggcaacgctccctggaaaaagtgggaggattgatcatatggcacattacgacccgaaattttactgcggcaagcgtgtttttgtgacaggtcataccggcttcaagggaagttggctgtgcaaaatgctacttatggcaggagctgaggttacgggctatagtctggagccacctacacaacccaacctcttttcccttgcgggggtagaagaccagatgcacagtgtcatcggggatattcgcaattttgatagcttgaaagcggcctttgacgaagcacagcctgatattgtgctacacttggctgcgcaacctattgtgcgcgacagctataaagatcctcgttatacttatgagacaaatgtgatgggaacggtcaatctgttggaatgtgttcgtctggctcagcagcagggtaatgcccctcgctctgtgttgaatgttacaacagataaggtttatcataataacgaatgggcttggggttatcgagaaaacgagcccttggacggtttcgacccctattccaacagcaaaagttgctcagagttggcaacgcattcttatattaacagtttctttgccgacaaggctgtagctatttctacagctcgcgcaggcaatgtcatcggcggcggcgactttgccaatgaccgcatcatccccgactgcgtccgcgctatggccgcaggccgtaagatcggtgtgcgcaacccctactcgacccgcccataccagcatgtgctggaaccgctggcggcctacctgctgatcgcccagcgccagtacgaggacggtagctttgcgggctattataatgtaggtccggatgactgcgattgcgtgactaccggtacgctggtagagcttttctgtcaggcttggggcgacgatgctgcgtgggaaaaccaagctgaggccaacgccccacacgaggcaaacttcctgaagctggattgcagcaagctaaagacaacttttggttggacaccgcgctggcacatgaccgagtgcatggaaaagaccgtggctttcagcaaaatctggctggaaggcggggacattcccgccgaaatggaaaaagaaatccgtgcgttcttagaggatgccgaatgaaccaaaatcagaaaaatacaatctgttcttttggggcggcgattttgctgagtggggcctacatggtcctttggctttcccgcgtttggacgtaccgcccttggccgatccaaagcaacatgataaactacggcgttgtgctgctgctttttgccggaacgtttgcccttgcaagaggggtgcttttccgcagatggccggtgcaggcatctgcgctggatgtgctggacaaaaggctacaggcgggggcttcccggaaagttgtggctgtcggcatcggagcggcgatcgcgtatttgttgtattatgtgctctatgcggtcaacacagagatggcatcggctagggagatacggacgtccctgacggattccagagtcattccgttgttttatctgctgacgattctcctttttgggatgagcatgtattgcgtcctgaaaggaaaggattgctctgtccgggcagtctatgccgggtatggcgtatcggcgatcttgtatttctgcggattgtttcttgtggattacttcgtggcagacttccaccatggcgaagcctatgtggaaacaatcttcaatgtggcagacggcgttccgtttgaagaacttacgaccggaatttatgggcattatggcctgttctttttgctgcccatgaaattgtttggggcaaagccgcttgtggtacaggtgttgattgcactggttggcgttgcaacagatgcagctttgctgtacggtgttcaccacttggtaagcaaaaactgggcgcggctgttatttgcccttgcaattccggcgattccgtttgcctatcgccagacaaattactggcagttgcagccgcatagactggtatttccggctttgctagcagcctatgtgcttgcggtcgttcgcagacagaaaaaactggagccgggcagcgctgccttttggggcggctggcttatctgtatgctggctgtcttgtggaataccgagagcggcctcttctgcattgcgggtctgtgtgcaggctgtgttgtggagtggtggcagaacagcaagtggtacgcggtgtgccagtggaagcgctatgcggctatgctgctgggggctgcactggcggtgctgggcgctatcgggctgaccaatttgtataatctggcgtgcggcggtgcccctattttcaaggtgtttttctatccgctgtacagcagctgctatatgaacgatgatatcggttatcccattcgtctggcagtgcggccatggttgtttatcctgctactgttcttagcgctgcttgcatgggcactgagccatacggctgcaataagcgggccggacagtgagaaaaaaacactgcttccctatgtgggatgcctgtcaacgctggggcttgtgtcgttcagttactatgcaaaccgggcagcgtggctgaatatggaagtcagcgtgccggaattcctgctttgcctttgtctgccggtacaggcattggcagaaaccacgttcggtgcgaaagtccgtggactaaagagcaccatcgtggacacagccggggcaatcgcagtcctgatactgtgtgtctttgcggctcagctgccgggcggcgttgtgaatacagcggaactttggaagctgggagctttcagcacacagggaatcacagcagagctggaaaacttctcaactcatgtgccggacaatacgtttgcagtggggcagggcatcggaacaatttatcatgcggccggctggaacaattacggacattatgtggatgtggcggattacggcgtggcagacccggataaactgaaggcacagatattgaaagacctgcaggagcagccgggcttcctgctggatgaaactgtgcaggaatatctcctgaacagcgaaactggaaattttgaactgcccggttacgaactgcaatccactttttcgtcagcggaaaccattttctatgcaggaaagtggcaaaatatatcgtactattactatgtaaaacaataaaaggagagcaaagcgtatggcatggaagaatgaggcagaagcccgcgagcagattaaagcaatggttgccgaatactatcacgacttcaaagaaaagaaagaaccctatcaggagggtgaccgcatcacctacgccgcccgcgtctttgacgagaaggaaatgtgcgccctgaccgatgctacactggatttctggctgacaacaggccgctttgcagaccagtttgagaaggagttcgctaagtggattggcgttaagtttgcccatctggtcaacagcgggtcctccgctaacctgattgctttcatgacattgactgcccctgagttgggtgaccgccagatcaaaaaaggtgatgagattatcactgtggcatgtggcttccccactacggtaactccggccattcagtatggcgcgattccggtatttgtggatgtgactgtgccgcagtataatattgatgtcactaagctggaggctgctctttctcccaagacgaaagctgtcatgattgcccatacattgggtaacccgtttgacctgtccgctgtcaaggcgttctgcgatgcacataacctgtggctggttgaagacaactgtgatgcgctgggtactcagtacaccatcaatggcgagacccgattcacaggaacttggggcgacattggcacatccagcttctacccgccgcaccacatgaccatgggcgagggcggctgcgtctacacgaacaacccgctgctgaaccgcctgattctctccttccgcgactggggccgtgactgtatctgcccctccggccaggataacttctgtggccaccgctttgacggtcagttcggcgagctgcccaagggctacgaccacaagtatgtctacagccactttggctataacctcaaggtcaccgacatgcaggccgcaattggttgtgagcagctgaagaagttcccatcttttattgagcgtcgccgtcataactgggatcgcctgcgtgcggcactggagcctgctgcagataagctgatcctgccggagcccgctgccaacagccgcccgtcttggttcggcttcctgatctctgttaagccggagagcggtctggaccgcaacgccgtgacccgctatgtggagagccacaatgtgcagacccgtctgctgttcagcggcaacctcatcaagcacccctgctttgaccagatgcgtggcaccgatgcttatcgcgttgttggcgaattgacgaacaccgacttcattatgaacaatacattctgggtaggcgtttaccccggcatgaccgatgagatgattgattatatggcaaaaacaattattgaggcagttaatcagtaaaaacacatcgaagaggaatcatccatgaaacagcaaaaagcaagaccgactttctgcaaaaatttgcaaaaagcaagcaaaccaacgcccatgcaggtatactgcgcggcaacgattctttgcttagcggtcttgctttttgctgttttggtaagtcatggtgatcttgtaaaccagtacttcttctatgatacgctcgacacgggcatggatttctttcacagtattgaatatgtgaaaggccgtatgccgtatgggcagttcagtacactgtatccgccgcttgcaaatctgttcttttacggattgtatcagctggtgccaaaatctctttctgaagaatggcagcaatcgtttttggattctgtcagccagcgcggcagccagcaggatttgcggctgcatcagggaacgatgatgcttttcatcctttttgtggtgctggccgtgctggggattgccgctatgacagagcgcttgacccggaactgcggcggcgagcgtaaattgctgtccctttgcgctgtgttcagctacggtgtgttgtatgggctggagcgcggcaaccttctgctgctttgctggccgttgatggcgttctttattgtgaaccgcaaatccaaaaatcccgttatacgggaactgtcctacatagcgcttgccattgcggccgggttcaagctgtatccggcgtttctgggcatattgcttttgcgcgataaaaactatatggcggccgttcgcacggtaatatacgggattgtctgcctttgcttcccgctgtttttcttcaacgagggtatgtttggtctgacgctgtggttccgggtgctgtttggattcaccggtgacagtggacacccgtggataggcaatggctttgccaacattgtggcggaatttgcacatggagtcgatatgctgctgggcacaagtctggcagatggcagctatgctttgctgggaattctgctggcggcggtgctgctggtatgtgcattgcgtatggaccgtgagtggaagcgcgttctggcgattgtgctggccatggtgatgttccaatcccagtatgattatgtgtggtgcttgtttttactgccgctgtgtgtcttttttgcacaggagaacgaactgaataaggaaaatatcgttccctatttgctgatggtcttgctggttataccactgccgcttttccgtgcggatgaattgacgccgacatttaccatacgcaacactttggggcatattatgttgattatgctccttgtatggtgcatagctgaaacagcccgtagaggaaagaaaagtcctgctccgaaagcagttggaaacaatcgcagacagctatgcgcaacggctatattggcggtttgtatggtagcttgtggatttggtggtcaagcactttgggaaaatacgcataactggggctttgactacagctataatggacggattggagacgaaggcgtcctgatgcaagatgtacaggacagcagcggcaataccgtaacggttcagtggagcgggcgcggggcttatgtcataatttataatcatgcaccgtttgcacaggagatgacaatcgagtttgaaacgggatacggaatggatttgcagcaagcacataccatgacattcacggtggaagaaaatacgcaagagagtatgctgcgtgaggaaaaaccagaaccgaaaagcgtaaaaattgaacgcgaaggacagaaagtgacctataccgtaagcgtggaccccggacaaaccaaggttgagctgagctatgacggccccatggctgtctacgatgagaacacgcgcaaaaacgggacattttccgttaaaaatctgacagtcaccagtgcgggtaaaccggaagagacagcgtaaggaaaggaaaaatatatgcagaaactgcttgccttgctgggcgcaaaaaataaagaggagtttatggcgttgctgatgcagtttatcaagttcgggctggtaggcgtgagcaacacagctgtgtctatggcggtctactatatctttttatggatcagcccggatttgtatatgctgggcagcattctgggcacaattttaagtattgcaaacgccttcttctggaatgacaagtttgtttttgccggcaatgcaaacgactggcgcagcaagctcaagcgtctgggaaaaacttatgtgagttacggcggaacgtcgattttgtccaatgttctgctctggattgaagtaactttctttgcagtcagcaaatctattgcaccgattgtaaacctgttggtgacaattccattgaattttatcatcaataagctgtggacatttaaggaaagtaagaaagatgcgactttcagcttggaaaggtaaaaaatgataaaacgcttgaatagtacggataaaagatattatatatttatgattctgactattgcagttgcagcattttatgctgcgctgatgtgtaacaaaacaatgcctttcgcggagggatggtatacatattatgcgcaacttataaacgaaaaaggtttgctgccttacagagattttgaatatcttttttcgccgctctacatttattttattgcgtttatcacgcgctttttcggatatgatattttgacactgcggtgtgttggcatcctaatgtttgtaataatcgctttaggggtatatttgtttattacagaaattgttggaagaaaaaaggcgtggattgctgcaattacttccgttacagcggttatgtatctacagtcagaagtagttcagattttttatgactacatccgacttatggacatttttgctgtttttactgttttattcttaattcgcgctgtcaaagcaatggagcacagcgaaaatcaaggcgtaaaagtaaatctttttctttgtggtcttttcaattccctcttcataaatgtaaaacaaaatgttggattgattttttgggcatatacaatagttctaattatttacttaggcgtgtattttcaacagtccataaaagcaattgtaaagaatttaatgcaatttttattgcctattgtagcagtaacaggtgcaatttatttgttgctggccgtaactgggggattgaaaggatatttgtccatgacgggcggaggcgcaattagcgcaaaaggcggtatgattgcgattctctttaactgggtgcccaataactggaacttattccaaaatgcgatgccggaggccagtgttgttttacttgttgtagtggctttgatggtggcccttgccatagcagaacataaaaacaagatggcacgacatgatgcaaatggcgcatggagtaagattgcggatatacacggggggggtacctactggcgataggattgctattggttatggctgttcgccacaaagacatggcagtggcaatttcggattggaagtcagtaacaccgtatttcttttttgagattgtatttccagcttttttgttgtttggtttttggtttctctataatatcattaaaaaacagcaaaacgcagagacatttttgctgtggtttacactggcaggctcttatgtggcaatatcttggggctgtggaaattccggtggattagcagagggacaggcaacaacaggagtggcatttgttgtcgcatttattctgtatggactaagctatcagtggcttcagatattacaggtggtagcggtagtcgcttgcatcggcttaacgattcaatcttgcaccaaaaagatggtgaatacctattattggtggggagcagatgaagcagatttttgggcaagtgagaacaatataggagatgttccgctgctgagtaaaattcgggtatctacagatacaaaggctgtgtatgaggaaatctgcaaggaaataacagagggagtgcaggaagatgaaactatctactgcttcccgcaaatccccatattttatagtttatgcaaccgctgggatccgggggtacgctctaaagtagaatggtttgatgtgtctacggatgaagcagtagaagcagacatcgatattctaaaagaatcaccacccaaggcaatccttatgtacaatgtgggtgatgatgtctatgaggcccatgaaagcgcatttcgcaaggggcaagcatccgggaccagaaagatgagagactttttgtatgattttgtgtatgctaatgggtatgaatttatcagcaattacactacagggaataatgaacttacactttggattcagaaaggcaatcgtaatgtgaatctgattgatgcgtttgatggcggtgatggcacaattgataacccctataaattacatactgctgaacaattgcgcttgtttagtaagatggtaaatgaggggcgaacttttggcggtcaatatatcgaacaaacagcggacatagacctctccaatcaagattttacgccaatcggtgaatattccggtaacaattatttctgtggcacatacaatgctgccggccatgtgattcgcaatctaaagattgaaacgaatgataatgcagccttatttggacgacttggcggtaaagtatataatctgggaatagaaggtggaaatatcacaggcgcttatatcggtggaattgcaagccatgccgttaaagatacagcagcaataattaactgctatacagatatttctatggatggaatacgtgcaggcggtatcgccgataattttgtaggaactgtcggaaattgctttagcgtagggttgatacatggtacggatagtgcagatgtattgagctttagccaatataaagaggtacaaagcgtttattccgttaaggaaaaaaatagtcaggacttcgatacacaaagtacagatgatgtcagaattacatattgtacggaagaaacaatgaaaaatggaatcttggtacaacgattgaatgattctatttattcgataggtacagaactacaaaagagcgatggtattgaagataatgaccaagaaacaacaattgagttggtacggtggaaacagggaacggatggacatccggttttcgatgtgccatcgtaattgaagcagaaaaataagaaaggcagacaatcaaatgaaacagcgtttagcggattatgtggcggattttctggcggcacgcggcgtgacggatgttttctccgttgtaggcggcggcgctatgcacctaaacgatgcgctgggccataacccccggctgcatgtgacctacaaccaccatgagcaggcctgtgccattgcggctgaggcttacgcacgcctagaaaataaaattgctgccgtttgtgtaactactgggcctggcggtaccaatgcgttgaccggtgtagtaggcggctggctggactctatccccatgttcattgtctccggccaggtgcgctatgacaccacggccaggtacgctttgcagtacaccggtacgccgctgcgcgccatgggtgaccaagagtacgatattactaagtctgtccagtacatgacgaagttcgccgccatgctggaggaccccaaggacatccgctacctgctggaaaaggcgtggcacctagccacgacgggtcgccccggcccggtctggctggacatcccggtcaactttcagggcggctacattgagaccgacgagctgcgcggctacgaccccgccgaggatgacgcccagttgcccccaccggtggacgatgccacgatccggacgattctggaaaaaatcaagaacgccaaacggccggtgttccacgcgggctatggcatccgcctgtccggcgggtatgcggcgttccgctccgtggcagaaaaactaaacatccccatcgtcacctactggaacgccgtggacctcatcgaggatgacaatccgctgtactgcgggcgcgccggcaacatgggtgaccgcccgggcaactgggccatccagaacgcagacttgattctggccgtaggaacgcgcatttctatccgacaggtcggctacaactggaagacatgggcgcgggcagcagaagttattatggtggatatcgatccagcagagttgaaaaagccgacactgcacgtcgaaatgccggtctgggccgatgcgaaggactttttgaccaagctggataaggttgccgcggcccccgtgaacgcgggtggcgagtggctggccacctgccagcactggaaacgcgactaccccgccgtgttgccccgccagtgggaggaaaacggcgagaccgccaacgtctacgcctttgtgcgctatttaagcagtcgcctgccggagaacagcttgacggcggtttccaatggtgcctgctgtgtagtcggaaatcaggcgtatgttattcagaagggcagccggatggcaaataatagcgctgttgccagcatgggctacggtcttcctgcagccattggtacatgcatcagcggcggccgccgccagacgatttgccttgaaggtgatggctccatcatgatgaatcttcaggaactgcagaccatcctgacgaacaagctgccgatcaaagtcttcctcatcaacaacaacggttaccactctatccgcctgacgcagaacaaccttttcaaggaacattgcaaggtcggtattggccctgaaagcggtgatttgtccttcccgaaatttgaaaaaattgccaaggctttcggttacccatattttagtgctcacagcaacgctgaaatgaaaaatgttgttgatgaagttctggagttggatggtccggttttctgtgagatttttacagataccaaacaggtatgggagcctaagagcagcactaagcgcttacctgacggcactttggtcagcccccctctggaagatttggctcctttcctgccgcgtgaggaactggaaaagcagatgtttattccgctgataccagaagtgtaaagggtgcatttttcaaaatgaagaagatacaaagagaaatccgcaccgccgtcatcaccggccctacgggggcaatcgggatggcgctgtgtgcaaagctgctggcggagggcgtgacggtctacgcggttacccacccgggcagcgcgcgggcggcgctgctgccgcaggacgcgcggctgcatgtggtgccctgcgacgcggcggagttggccgcgctgccggagctgatcccggaaaaggccgatgcgttcttccactttgcgtgggcgcatacgatcggcccgggccgcaacgacatgccggcgcagatcgagaacatccgctacaccattgcggcctgccgcgccgcggcgcagctgggctgccaggtctttatcggggccggcagtcaggccgagtatggccgcgtggagggcgttctgaccgcgcataccccctgcttcccggagaacggctacggcatggccaagctgtgcgccggccagatgagccgcgtcgagtgccaggcgctgggcatggcccacatctggacgcgtattttgagtgtgtatggaccgcacgacggcccctccacgatgatcagcggtaccatccgtaagctgctgcacggcgagaagcctgctctgaccgcaggcatccagcagtgggattatctgtatgcaggcgatgcagcggatgctttctatgcgctggcggtcaacgggcaagatggtaaagtctatccgctgggcagcggtgtggcccgtccgctgagggactacatcgaagcgttgcgcaacaccattgaccccgcactgccgctggggcttggtgaggttccctacggcccgctgcaggtcatgcacctgcaggcggacacatcagccttgcaggcagacacaggttggtatgctgcaaccacatttgaagaaggaatccgtaaaaccattgaatgggcaaggaaagaaacaaaatgagtgaaaaaaagacgatttcagtaatgattccctgctacaacgaggagcagaacgcccaccccatctatgaggctgtgcgcgatgagttggtcaagagttgcccgaactatgactatgagatcctgtttatcgacaacaagagcgaagatggcacgcgcgccattatccggcagatctgtgccgaggataagcatgtcaaggcaattttcaatgtcaagaactttggtcagtttaatagcccgtactacggaatgattcataccaccggtgactgcacgattacgatgtgcgcagattttcaggatcctgtggagatgattcccaaatttgtggccgaatgggaaaaaggttataaaatcgtaattggtcgtaagactcagagcaaggaaaacggctttatgtattggctgcgtggttgctattacaagacgatcaagaaaatgagcagttgtgaacagattgaacagtttaccggattcggtttgtacgacaaaagctttattcaaacattgcgagaactgaaggatccgacaccttttatccgcggaattgtggcggagcttggccctgagcgcaaagaaatcgagtatacacagccacagcgccgcgcaggcaaaacccataacaactggtatagtttatacgatgctgcaatgcttagctttactagctacacaaaggtagggatgcgtctggccacatttgttggattcatttttgcgggaattagctttttgtttggactcttttatttgattgcgaagttgttgttctggtataactttacggctggttatgctcctatgatgattgcgattttctttatgggcggtattcagttggcttttcttggatttcttggtgaatatgttatggctatgaacacacgcatcatgaatcgcccgctggtcgttgaggaagaaaggctgaattttcagcaggaatccaagtaaatgagaaaatacaaaaccgatctttttcactttttacagaataagtgctacatggccgcgttgatgcttacattgctgctgagctatggctattccattgcaacgatttcggtcggaattgacaccttagagggagaccgctatgttggatccggcggtgtaatgctttcaactgggcgattcggcatgaatttttgggcagggcttttgggatacggaacggcagaccctagctatcagcccggcatcgacctgttagctgctatacttcttggggcagccgctgtgcatttttgcatgctgctgcacaaggtgtccaatggtcgaatcagtatgttcggctatggagtattctcctgtatatttatctcttatccgctgataaacgaaatatgggaatacagcggagcaaatgtttgcgtttgcggtggatatttgttggatgcggtagcactaaatttactttgggatagttggcatcagtcaggggtgcagaagctgctgcggtttacagcggcttctgtctgtgtgttaatcgtttgctcgtcttatgaatccttagcggttgtatatgtattagcggtttttgcgatgctctcgctgcaagagtatgagagcaaagaaaagacacggtttttggcattagtaaaggaaggactatggtatgcagcggcattgatagtcggggtgtgtctgcgcgtgtttctgcaaatgcttatcaacatggtactgcctgcgcaggccagcgcaaatggcgcaacggcaattgcgtgggtgttctatccatttgaatacctggcaaagctgctgataaaaaatttgattatccagtattggttgcgcgggtgcttttatttaccaatccgtgaattgacgattgcagtaatgatctttgtgccgatgattgtgattgtagcaatgcggtgtcgaaaaaagtatctgctatttacaggtgcaggcatgttgctgtcattggtattactctcgctcttgcaaggtatatattctgcttaccgtacatgtcagacatttgccctgttttttgctttggttgtacttgcagtatatgaaattctttgtaaactgtttcataagcgaaatttgattgtggcggcggtacaattaggtctagcagtactatgtgtccatcaggcaatgtatctaaaccatatgcttgcattgaattatgaacgatcaaatgaagaagcggcggtagtgagatctatcggcaccgagttagagcagagctatgacatatcaaagccggtagttttggtaggtcaatatacactgggaggcaatattactcgatatacaactgcaaatccgaatcagagcgttatatacaaacagtttcgggaacataagccagattgggaaacgggcgatattgtaaaatatgtggatacaaactgcaattccgtgttgacctgggcggctgttgcttttggtgagcttgatggtgtatatggttcggcggcagaaaacctgttccaatactatgggtttaactttactatgcagcacagtgaaattctgcacaaacaggcacaagcctacgcagaagaacatgctctgccagggtatcctcaagctggctcgattgtggatcgtggggcatacttgcttgtaaatttgcgatagggaagagccaaggaggttctctctcgtattttcaggcaagccgaacgcacagtgggtcaaaagtaccaccgtacaattgagcttttctcaaaacaggaaaacgtccagccacaaaaggtcagaggcattccaaaatctgcttgcaaggtaaccctcggtatcgcgcctttcggaaacgaagctgcagcttaactacagcaaaaatatgttcaaccttggcgcgtacagaggatttctcatccggaataaaggtgactccgctagctggacgaatatacaagttttcggaattgtaaaaaatccgatttacaagggctatatgtaccgcagggtagtctgctgcacggactatcttacccacaaatcagtcagcatcccggaagaggaacgggagtatgtcaagggaaatttcccgcccattgtatcggaagagctgtgggaaaaatgcagaaggcgcagagcaagctgcggaccgcgaaaacaaggatcggcagcgcagacatacgggaatgcaggaacagcgcagggagataaatgggcctgccgcctgtcctgcggccgcagagcaggaatgtatcggcaattcaagacacccagcagcatacgttatgagtgccggcgcgcaaacccgcagacaggtgctgagaaaaatcaaacgggagaaggcactgccatcaagccttcgggagcaacggcaggtaccggacaagggggatgctcacccggagagaccccttcccaactgaaaaggcagccgggaatttttgggcgtatttgtccccgaagcttttgccatgcccctaaaaagccagtgcgtcctcgatcacatcgttaagctggcgcgggtcaagctggcccgcagtacagcggtcggccaggtcggcggcaaagagtcgggaggtggacacatccgcggcaaggcagaccttctggcattgtccggcctcaagacgcagggccagaatgccgaaggtggtataggagcctgtttcgggggtggacaacttttggcggacggcgcggtagatgtacacgattttcacctgctttctctgaattattatacaataagcataggaaaagattgacaataaatggaaaagaatgtaaaatggttacatcaccggaagatgctggaatatcaacttttttcactataccacattccggtgtacaaagtacacagccagtgaccgggaagtttggcggtacattatgtgccgcctgtcacagggctccccggcggcgatttgcgttcaaaagaaggggagttggaaggtatggtcgaacatcgaatacgcgtggcagaggcaatcgctgcagcgcgtcaggacgcaggggtttcgcagcgtgaattggcggaacgcctcggtcgggacaggcgcacgatccagaaatgggaaaagggcgaaatgaagatcacgcttgaggattttctggatattttcgatgcgctgaaaatcccggttgaggcttactccaagtgggtccgccacccggagctgttcccccggggcctcgatgatatttgcggcttttccactgacaagaagcgcagtgcactggcagactactacaagcatcaggcctcgccgcttgaggtcgagcaggaatactactttctgtttgccaaccacggcagctgctgcgacggcatgtaccagcagtggatggcaaacctgatgacgccgctgcgcgaccgcaaacgcatctgcggccagatcatcgacaactacaacgaggctctggccaccggcaccatcactgacccggacgccccgcagcccaacatggagatgctgcgggcctgctatgaggccagcgcccagagcgtgcaaaacggcgacaacggctacacactgcacggcctgaaagaagcggaataaaaaccgcgccctctgcgtacaatctgcgcagggggcttttgtatgtctgaacttgtgcgcagggtgcgggcgcgggataaattcggcgcgctgcccacctttgatgtaccgtttcttattcttttgctgctgctgctcagctatgggcttatcatgctgttttcagccgggtatgcagttgcgctctaccgccgcggcgatgcctacacctacatccgcccgcagctgctgtttgcggcgctgggggtggcggccatgtacgcggccagtctggtggactaccatatctggcaccggctggcctggccggtgctggccctgtcgctggcgctgctgacggtcgttctctttatgccggagtacaacggctgcaagcggtggatcgtgctgcccgggctgggcacgctgcagccaagcgagatcgcaaaatttgcggtggtgctggtgttttcccacattatatcgctgaatcatgatcgaatgcggtcgttttccaccggtgtgctgccgtttgcgctgattctgggcgttgtcacggtgctgatgctgcttgagccgcacctctccggtacgctgctcatcctcgcaatcggggcggtgcttatgtttgtgggcggtacggggctgcgctggtttgcgctggcggggggcttgggggcggcggccatcgcggcagcggtggtgctgctgccgcagctggtgccctatgccactgaccggctggcatcgtggcgggacccctttgccgacccgctgggggagggacaccagaccatccagagcctgtatgccatcgcgtccggcgggctggccgggctgggactgggcaacagccgccagaaatacctgtatgtgccggagccgcagaatgactttatcttctcgatcctgtgcgaggagttgggctttatcggcgcggcgctggtcgtggcgctgtttttgctgctgcttctgcgcggcatgtccatcgccgtgcgggcgcgggataaattcggcgcgctgctgacagtgggatttgtggtgcaggtgatcctgcaggcgatcctcaacatcgcggtcgtgacgaacacgatccccaacaccggcatcagtctgccgtttttctcatccggcggcacaagcctgctcatgctgctcggcgagatgggcatcgtcctttcggtgtcgcggcagaccgacatggtgtaagggtgccggatggatttccagtttttcccgccataaacatttcacactcccacggttgaaaccgtgggggttttgttttataattatactgcatttttgtgtgaaagaggtgccgtatggcgaacccgcaaaaccaaaagccgccctttgccctgcgggcgctgggggcctttgcagccacattggcggtgctgtttgcgctgctgctggcggcgtatgccctgcccggcgggccggtgcgcgaccatgtgtatacttccgcgcagacgatcgctgaggaagggctgtacccggaatacttcggctttaagctgttccagatggacaactacaccgacaccgtcatgctgtttgaggcggcctccgccgatgaggccccgccgctgacggccatgatgacgaacacggcctacaatgtcgataactttgagacgctggctgaggacctgcaatggtacatagaaaaggacttgagcacaggcgcgcagcgcaccgatgcgcccgcgctgacgcccttctcctacgcgcggtactggcacggctatctgatctggctgcggccgctgctgctggtcacaacgatcaccggtgtgcgcatcgtgcagtatgccgtgctgctggcgctgctggccgccgtgctgtggctgctgcgccgccgctgcgggctgcgggcctgcctttggtttgccgccagccagcttttggtcacagtgttctgggtgccgcatcaggtgcagtattttacctgctttgctcttggctacgcgggctgtgtctgggtgctggcaaagccccgccgcagcgatgccctctgtcttgcgctgctggtgctgggggcggcaacggccttctgcgatctgctggtcacgccgatccttacgctggggctgccgctggtctgctggctgttggagccgcagcagcgcctgcgcgccggtctgccgcagtgcggcgttgtggtgggcggcagcctttgctggggtgtggggtatctgctctgctgggcctccaagtgggtgctggcggggcttgtcaccgggcagaatgttattgccgatgcgctgcatcaggtgggggtgcgcaccgccgccgatacatggcacggaatggaattgacatggggtaatatttttgcgtttgtatacaatgcgttgaacgagcggcggctgctctggccgcttgctgccgccattgtgctgctggctgcgctgtttgtgctgagcatccgcggcaggcagccgcttatccgcgcgctgccgctgctgctctgcaccctgatgactcccgcgtggttcatcgtgctgcgcacccacagcatccagcacggctggttcacatggcgcgcgctggggctgacgctgttttccggtatggcatttttgtattatagctgtgacatccgcgccgtggggcggcgcataaaaaggtaacatccgcagaggatagaggaaagtaaaaatgaacgaattgaagacgaaaaacgatacaccggccggggatgcccggccgaagcagagccgctggcgccggctgcccagaggcggccgcgcagccgtggtcgcgctgggcatcgcggtgctgctggcggtggcggcgttcctgtatgtcaacggcaagcttgacctgctgcgctacaatgacggcagcgtcagcgagatgggcgagatcggcgccgaggaggatcaggatctggacggcaccggcctgacccacaccgaggccgatatggcagtgcccgagggcagcccctttgctgatgaggatgtgctgaacatcctgctcgttggcacggacgagcgcacagaggccgtcaatgatgccgatgcctttacccatctgaaccagctcgacggcacggaggatacgactgagttcagtgatgatgcccgtgccgacagtatgatccttgtgtcgatggacatcaaggatcatatcatccgccttgtgtcgatcgagcgcggcaccggcgtgcctattctgctggacggctatgaggaccagtacgactggatcacccacaccttccgctacggcggccccaagctgacgatgaaaacggtggaggagtgcttcaacattgaggtggaccactttgtccgggtcaacttcaactcctttgtccagatcgtcaacgccgtgggcggcgtcgatatcgacatcaccgagatggaggccaaggcactgaactgggaggtgccctccaactccatgctgatcgtcaaccatgtggaccccggcccaaaccactttgacggctacactgcgctgcagtacgcccgcctgcgcaagatcgacaacgactggaagcgtgtcgagcgccagcgcactgttatcgaggctgtgctggatcaggtcaaaaacgccagcgtcatggagctggacaacctgctcaatacggtgctgccgctgatccagacgaactttaccaagaccgagatcgccgcgctgctggtgcagttgccgggctttctgggctgtgatgtgcagcagatgtcgctgccgctgcagggcacctacggtgtgcgcaccggcatggataaccgcctgatgtatgacccggactgggtggtgaacatcaaggcgctgcaggatttcctctacaatgataagaccgccgaggaggtcattgccgccacgccggagaccgccgccgcagaggccgcgggtgagctggtcatcgccacccgcgagaccgccggcgcggacgaccccgttgaggtgtacaacaaccgctacctccaccgtgtggatatgacctacccgctcgatgcctcggactttgggccggatgactaccgcgtctatctggccgataccgacaacctgcgcggcagcgagctgcgcgccgcgctgatcgaccggctgtacagcaccggggtccgggtgctgggtgtgcccgacggcgcagccgccggcatgctgctggacgactacctgcagaccggcaatgccgcaagcctgagcggctacctgacggcgctgcctgcagcggagcgcgacagcgcccgcgccctgtggcagcaggtccgtgccagccaccccggtgcccttcatgccgtggggcttggggccgatgcccgccgcgcaacggtcgcgcgggcgctttcggtgctggctgacaacagcagcaaggcccccgaggaggagatcgcacaggccgtgcaggcgatgcgcggcggtacgcccgccgatgccgtctactggttcaaggccgcaatggcgaaatatccccgccagatggagcggttcctcggtgaggaatatgccaaggcgacccgcctgtattacggtctgcagggcacgctgaacatcagcagcccggaggagctgccgctctacgatgccaaacagctgctgcgcagctatccggaggacggcatcctgctctttaccgatgaatccagcgcaatgcagcaggagggcagcatggccgccgcgctgcaggcagagctggacgaccagccgcgtgaggaggatgaggagccgggcagggtctgctccatcgcggctgtctacggcacatggagcaacgccggcagctttacccccgatgaaaccgagacggcttgggatgccgacagcctgaccgagtatctgggcagtgatgcgctgcgcggcaaggatatgctgctggcgctggacgaggaggacagcccctacctgcgcaagcgctgcctgctgaaggatgccgatgcccccgtgggcgagcaggtgcaaaagctgtttgtactggacaaaaacaacatggcctcgccggaaactgcgggtgcagagtaaaggcaacaccgcacaattcccgcctaacggcttaagcaccgctccggcggatctccgcgccaagagccgccgcaagcggcggttgcgctccgaagcgcctcgctgcggctcggtgtgcggcgcggcatctgcgttgccaaaatgctcgataatacacaaagtattatctgcgcttttggcttagcatctgccgcacctcgctcgccgtatcggcacttagaattatgcggtattgcctaaaaaatgaaattgggtgttgacaaacgcccgcaggtgtggtataaatgctttaaaccaatgaagcgaaagtaaaacagacagcgcagtcacagagagcccccggggctgggaacggggcacagagcgggtctgcacaatggttcgcggagggcacggggaaacggagtgatccgcagtatccgttgacgggcagctcccgttacagagcaggggaatgttggttccctacagagtggccgcgatccatagcagcggcaagcaaggtggcaccacagatttgttttatctgcccttgcacaggagagattctgtgcaagggcagttttgttttcaagcatgagggggagaggaaagcatgaaaatgagcctgatgaaagaacgatggcaagcctgaatttgtaaaatgagtccgcagacctatttgcgcaggagcggtcaatgaccgcccctacagccacaacagtacctgttttacaaataaaggagaatttaccatgaaaaagtttgttgctgttctgtccgctgccgctatgatgaccacgctcgccgcctgcggctccaccgccgataccaccgcttcctccgcagaaagcacggccgataccgctgccaagagctgcaaggttgccattgtgcagcagctggatcatgccagcctcgatgagatccgcgtggcgattgaggccgagctggacgccaaggctgccgagaagggcattgcaatcgagtacaaggacttcaacggccagaatgacgccacaacgctgaaccagatcggcacgcaggtcgtctctgatgggtatgatgcggtcatccccatcgctacgctggcagcccagtgcatgaccaccgcctgcgagtccaccaagaccccggtcatttatgcggcaatctccgaccccgcagccgccaacctgaccgacattgactatgtgaccggcacttccgatgcgctgaacacccagtccatcatggatatgatgtttgccgtacagcccgacatccagacagtcggcctgctctactccaactccgaggcaaactccgcgacccccatcgcagaggccaaggcctacctcgaggccaagggcatcgcctatgttgaaaaaaccggcaataccaacgatgaaatcatgaccgccgcctccagtctggtcggtcaggtcgatgccgtctttaccccgaccgacaatgtggtcatggcggcagccgctgccgtttccgagacgctgaccaaaggcggcatcccgttctacaccggcgcggacagctttgtcacggcaggtgccttcgccacctgcggcgtcaactataccgagctgggcacctacaccgccgatatggcgctggaggttctggaaaccggcactgtgcctgagtaccacgtcatggacggcggcatcatcaccgtcaacaccgagaccgccgccgcgctgggcgttgactacagcgccttcaacaagctggccggtaaggtcgttgagatcaccacggcggaataaaccctccgggaagagaccgtaggggcgcattctatatgcgcccgggatgcctgcgcagccgcagcgtcccgcgggcggatatggaatccgcccctacattgttgtataatagactgtaccattacttttagagaggaagttaccctatgtttaccgttgccaccgtgctgaatgcactggagctgggcttcatctacgcgctggttgcgatggcgctgttcctgagtttccgtgtgctgaacatcgccgatatgacgaccgacggtgcctttacgctgggctgtgccgtctcggccaccgccgctgtggccggtcacccgtttttggggctgccgctggccatgctggccggtgccgccgcaggctttgtcacggcgtttctgcagacgaggctggcagtgccctccattctggcgggcatcatcaccaacacggggctgtacacggtaaaccttgcggtcatgggcttttcctccaatgtgccgatgctcaagaccgtgaccatctttacggcggcgcagggcgctctcggcgagggtgcccccgccaagctgctggtcgcagtggttatcacggtggccgtctgcgccctgctcatcgcgtttctgggcacccggctgggcctgtccatccgcgccaccggtgataaccccgacatggtgcgcgcctcctcgatcaacacggctttcaccgtcacggtggggctttgcatcgccaacgccatgacggcactgtccggtgcggtgctggcgcagtaccagcgctctgccgacatcaacctcggcaccggcatggtcgttatcggtctggcgtccctcatcatcggcgagacgctcttcggccgcggcggcatgtgggtcaaggctgtggccgccgtggcgggcagcgtgatctaccgctttatcatcgcgctggcgctgcgtgccaatgtcccctctgaatgtctgaagctgatctctgccatcatcgtggcgctggccatcgcggcaccggcgctgcgcgccaaggcagccttccgccgccgccgccgcgcccatgccggaaaggaggccgcccgccatgcttgagctgaaaaatatcggtaagaccttcaatcccggcaccgtcaatgagaaggtggcgctgcagggggtggatctccatctggcgcagggggatttcgccacaatcgtcggctccaacggcgcgggcaaatccacgcttttcaacgccatcgccggtgagttcatcgcagataccggcacaatcacgctggacggcaaggacatcactttcctgccggacttcaagcgctccaaggctatcgggcggatgtttcaggacccgctgcgcggcacggccccccacatgacgatcgaggaaaaccttgcgctggcctttctgcgggcgtccgggcatacctcgtccttctcgcgcatctcccgcaaggaccgcgcgctctttgccgaaaggctctccgagcttggcctcgggctggaggatcggatgaagcagccggtggggctgctctccggcgggcagcgtcaggcgctgaccctgctgatggcgaccctcgtcacccccaagctgctgctgctggacgagcataccgccgccctcgaccccgccacggcggataaggtgctggagctgacaaagaagatcgtggccgaaaaccacctgacctgtctgatgatcacccacaacatgcacgatgcactcacccttggcaaccgcacgctgatgatggaccacggccgtatcgtgctggacatcggcggcgaggagcgcgcccacacaacggtggacggcctgctcaaccgctttgccgagaatgtcggccatgcgctggacaatgacagaattttgctgagtaaagaggcataaaaagccgcccgcacgatgaaaaatcgtgcgggcggctttgttgtgcggttacatcggcgctacatcgaagcggtagatcgtggtggagctgtagggctggtcgggcagcagcgtagtatcggggaagttcgggtggttcggtgcatcggggaaatcctcagtctcaaagcagactgcatcccgcgcggcgtaatgggcgccgtccttgccctcggtcacgggcttcaggaagttggctgtgtacaggtgcataccgggcagggtggtcaggacctccatgcggatgccggtctcggggccgaccgcccaggcggtgtggcgcaggccgctgtcacggatgatatagcactggtcgtagccgctgcagtcggtcagcggcttgaagtcggcaccgatgtccagcccaagggtcttttcttcggtaaagtccatcggcgtacccttgaccggcagcttgcggccggtcgggatgctctgcgcatcagcgtcaagataggcatcggcgtccaccgttacgcggtggcccagcgcactgccgctggcgtggccgttcaggttgaaatagctgtggttcgtcatgttgcagacagtcggcgcatcggtcatggcggagtagcggatgaccagcccgctcttggcaaggctgtagcggatcttcagctccagattgccggggaaaccgtccgtcccggcagggctgaacgccgtcatcgtcacgctgtcggtctcgccgggggtcagcgcaacatcaaacagcgtgtggttgaagccgtgcaggccgctgtgcaggcagtttccgttctggttgggggtcacatggacgatctcctcatacagcgggaactgcgcgcccgcaatgcggttggcaaaccggcccacggccgcacccatactgtcggtgttcagctcatagtcggcagcggtggggtagcccagcacaacatccacagggttgcccttgcggtccggcacaaggatgcggtggatgacagcggcgtagctgagcagctgcacctcgataaactcattcttcaacaccgccagcttgacggtctggccggtggtggacttgccgaaatcccggatagaaacggacatgacagaagcctcctttatttttcagcatcggcggggatgccctgcgcggcaagatcctcgcgcacgctctcggccacgctgccggtgccgtagttcagcatacggtttacacggctgacggtggcgctggaggcacccgtctcccggcggatctcgctgtagaccttgccctgcaaaaggcagccggccacggcatagcgctgctccattgtgcgcagctctgtcacggcgcaaaggtcgtcaaaaaagcggatgcattcctcaagcgtgttcagtcgcaggatcgcctcatacagggcggtgttacgttcattgtgctgcatagcgttcaggcgcatgtcgtgcgccgacctctttctttgtaaaatttgcttttgtttgcggttggtatctccctacattctagcaaatttgactaggcaagtcaatacactaaagtgcgaaagtagtgccaaaaccgcttgcatttaacaccaaattgttgtattataaaggtactgcttttatggggagaatcgtatgccgactacactgctgatcgtctaccgcgtgctgggcacggtgctttttgcactggccgcagccgcgattgtggaaaaataccgcaccgtgcgcggggctgtgctgctgtccgcccgcgtactggaatgccgcaaggccggctccaccagccccggcgcggcggccggcggctatcgctatctggtcgagctgcacgccgagggccggcggctggaaatggagacaaacgactccttctggttcaggcatgacaaggacaagggcaagatcattcaggtctggtacaaccccggcgcccgctgtgttgagcgcaaaagctgggagaccgaaattttctcggcattgctggccggtatcggtgcggcgctgctgctgatccgctgaggtgactatggattggatattgtatctgctgctggcgctggccgcagcgggggatattttgctggccgtggtgctggcaaaggtcatgcgtaaaaacgcggggccggagcagaagattgatacagcggacgattttgtccgcgccgtgacgccggtgctgcagagcgaaaccgacctgctggccgagcagctgcgtgccatgcagggggaaagcgcccgcaccacaagcgcaacgctgcgcgatttttccgccgtgctggccgaaaatcagcgccagagcgcagccaacagcaccgcccggctggaggccatcgaccgcgccggggcagcccgccagcgcgcggccaacgatgccctgcttgcccagctgacgatgatggaaaaccgcctgaaaaatctggaggattccaacgctacccggatggacagtgtgcgcggcgcgctggtgcaggggctgaatacgatccgtgccgacaacaacaaaaagctggatgagatacgcggcacggtcgaggaaaagctgcaggacacgctgcagcagcggatcaatgactcctttaagacggtcagcgcccagctggagcaggtctataagggtctgggagagatgcagaatctcgccgccgatgtcggcagcctcaagcaggtgctttccggggtaaagacccgcggcatactgggcgaggtacagcttggcgcgatccttgagcagatcctggcccccggccagtatgaggaaaatgtggctacggtgcccggcagcaccaaccgcgtggaatttgcggtcaagctgccggggcagggcggcccggtatggctgcccattgacgccaagttccccggcgatacctacgcccacctgcaggcggcgcagcagcgcggcgatgccgccgctgtgaacgcgatgcgcaaggcgctgaacaatgtgctgcgcgctgaggcaaaggatatccatgacaagtacatcgaggtaccctacaccaccagcttcggcatcctgtttctgccgtttgaggggctgtacgccgaggtcgtctccagcggcgtgaccgaactgctgcagcgcgagtatcagatcacagtcgcaggcccctccacgatggcggcactgctcaacgccctgcagatgggcttccgcacgctggcgatccagaagcgctccggcgaggtctggacgattttgggtgcggtcaagactgagtttgaaaagttcggcaccggcctgcagcagatgcagcgccacctgaatcaaaccggctccgatctggaggagctgatcggcccgcgcagccgcgccatcacccgcaagctggagtcagtgcagcagcttgacccggacgccgccgcagaactgcttggactggaaaaataactgcaaagcatggcatttttgccagaatccgcccccgcaagggggctttttctatgccgctgcccactttacacggcgggtgcgctgtggtatactgaataagttattgaacagtcaacaacatgcggcgctgccgcacgcccataaaggagttactgccatgatccgtattgttaccgattccgccgccgatctgaccgcagcggaactgtccgcccccggcgtttttgtggtgccgctgtctgtcacctttgcagacggcacaacccagcttgatgacggcacgatgacgaaggatgaattcttcgtccgtctggcagaggacagcaagctgccccgcacaagccagcccagcccggccagctttatgcagctgtatgaggacgccgccgcagcgggggatgaggttcttgtaatcaccatcggccagaagctgtccggcacctaccagtgtgcgcatctggccgccgctgatgtcggcctgcaggcgcatatcgtggactctgaggcggcttcgcagggtgaggcgctgcttgtccgtgaggcggtgcgcctgcgcgacgaggagggcctgacggcggaggagatcgccgctgtgctggagcagttcaagaagcgggtgcgcatcgtcgccgtggtggacagcctcaagcatctgcagaagggcggccggctgccgacagcggtggcgctggtgggcggcgcactcggcatcaagccggtgctggccctgcaggacggcgctatcaagctggtggacaagggccgcggccgtcccggtgcgctggtcgccatgttcaagcagctggacgcgctcggcggtgttgacccgcgctacggctatacgctgctctacagcgataacaagcagcttgttgcaccggtacaccactacatgcaccagaatctccaactgaccggcggccgtgtggcccagcttggccccaccatcggcacccatgtcggccccggcgtggtcggcgtggtgtttgtggcgaaggagtaataaaataaaatgtaggggcgagccatgctcgcccctacgaatcgggcttctccgttcggagaagctttttttattttccgctaaaaagcttattcagcagatagacccccagcaccagcgcaccgaggacgaggaaaatccccgccataccggcgcagagcatcgagagggtgacgggcagcagagcagttgacatggcgcaagcctccttatacataaccgttcatcagggtcaggatcaggccgccggcgatgaccgatgcgatctggccagagacattgacgctgatcgagtacatcagcaggaagttctggttgtcctcggccagacccatctggttgacaacacggccgctcatcgggaaggcggaaatgcccgccgcgccgatcatcgggttcagcttcttgccctcgggcaggaagaggttgagcagcttggcaaagaaaacgccgcccgccgtgtcaaagacaaaggccaccagacccagcgcaaggatcagcagggtgtcggggcggacaaacttgtcggcggtcatctgcccggccacggtcaggcccagcacgatcgtgatgaggtttgccagcacattctgggctgtctcggacagggcgttcagcacgccgcactcgcgcagcaggttgccgaacatcagaaagccgaccagcgccacactggcgggtgcgaccagcccggccagcacagtgaccacaatcgggaacaaaattttggtggttttgctgacgctgcccttctggtagggcatacgaatcagacgctcctttttggtggtgcaaaggcggatgaccggcggctgcacaatgggaaccagcgccatatagctgtaggccgccaccatgatagcgcccagatacttgctgcccagcgtgttggcgacaaagatggccgtggggccgtctgccgcgccgatgacggcgatggaggctgcgtcaggcaggtcgaagaacagccccgccagcaccagcgtgacaaagatgcccagctgcgccgccgcgccgaacagcatcagccacggcttttccagcagcgggccaaagtcgatcatggcaccgatgccgatgaagagcagcagcgggaacagctcgttggacataccggcgtcaaaaagcgcgctgatcgggccaacggtctcgccctgtgtgatggcgccggacatcggcaggttgacgaggatcgcaccgaagcccatcggcagcagcagactcggctccatttttttggcgatggcaaggtagatcagcaggccgccgatgacccacatgaccaccatctgccaggtgaggttgccgaggtttgcgaacagcccggcaaaggtttgcaggatttgcataagctccctcccatgggttatgggcggcagggcaaaataaaaagacccctgccgcagaaaaaactgcggcaaaagtctcagaattgcagtatgccccggagccgcatcggacggctcgtggtgacgaagcgatacggcgcggcgacccgcgtcccttactcccttttacctacttgatagtataacgcagggcggaagaatttgcaagtggaaatttggcggcaaaggaaagcaaaacaaagccctcagtataccgagaagtagccgatatgctccggctcgttgtcctcaaccagcaccgtgaagccgcaggggttgacctcggtgctcttgccgaaggcttcctccgcaatcaggtgcgggccgcggttcaggatgatctccgccgtctgggttttgcccacgcggcggtagtgcagcacatcgccctcggcacggatcagctcaagccgcccgccgtcaaaggcatcgcagctgcggcgcagggcggccagtgttttcatcgggccgcgcagccgctgctcggtggagttccagtcaaagaacgcccggttgaaggggtcacggtagccctgcatggcgatctcatcaccgtagtagatgcagggcacgcccggcagggtaaagatcatcgcataccccagcagcaggtggcggatggcactgtccatctggccggacgggatgcagcgcttgctctgccaatagcggtcgcggccgttgcagggctcgcccgcaatggcggtgatggcgcgctcggtgtcatgggtcgagaggaagttcatcgcgcagtccagcgccggggcagggtagttctcacaaatttgcatcagggcatcggccacagcggccacatcgccgccgtgcaggtaatccagcgtggcattgcggaagggataattcatcacggcatcgaggccgtgcccgcgcaggtaggtgcggcgctggccgaaggcctccttcgtggtggcgtcctcccagacctcacccagcagcagcttgtcctcaccgtgggatttgacggcggcacgaattttttcaatgaaatcatcgggcagctcatcggccacatcgagccggaagcccgaggcgcccagccccagccaggtgtcaataacaccgcccttgccgcagatgaaatccacataggagggcgaatcctcctgcacctcgggcagtgtctcaaagccccaccagcagcggtagccgctgcggtagccggagtcaaagtcgtaccagctgcggtagggcgaactgcggtcgcggtaggcaccgcccgggccgtagcggccctcgcggttgaagtagaccgagtccgagccggtgtggctgaacacgccgtcaagaatgatgcggatgccctctttggcggcggcggcgcaaagggcgctgaactcctcattcgtgcccagcagcgggtcagcccggagatagttggccgtgttgtagcggtggttggcgtgggcctcaaaaatcgggttcagatacaggcatgtgatgccgagatcgcgcaggtacggcagcttttgctgaataccggcaaaatcgccgccgtagtagtccatgttcaggtagccctcgctctgctcagtcggccagaagtagggctcaccggtcttgtcggcgcggtagatgcggtcggcaaagggcatctccttgccggggttcccttcgcagaaacggtcggggaagatctggtacattgtaccgtttttcagccagtccggggtcttgaagtccggctcatacacggtcagctgccattcctgcccttcggtccagcttagcacgccctcgccgccgggggtgcggtagatgcggcggaaatcggtgtacaggtcaaagtggtaaaagtacagccccgaggtggtgggcgttacggtcagcgtgaagtggttgatgttgggtgtctgcccggtgaactccatgcggtagtggacaggggattcccgatccttggtcagcaccagatgcgggtcaacatagcccagattttcgggcaccgtcaggttgaaggtcacagcctgcccggcgggaatcgccccgaacggggctttgcaggcggagtcgaggctgttgtagaatgtgtgggacatacaagtctcccctttgtgttagcgtaaagccttcccccaaagggggaaggtggccgaaggccggatgaggggcagcgctgccgtgattgcccttgaacgggcagctacggcaagttcgcccctcatcagtcaccttcggtgacagcttcccccaaagggggaagcctatgcaaaaagccgtgccctgtgaagggcacggccaagatcaagtaacagaattatttgacgggagtggcgccccagatgtcacgcgcatagtccatgatggagcggtctgcgctgaagatacctgcgttggagatgttcatcaggctcatgtggttccacttctgcttgtcgcggtacagctcctgcagatcgtgctgggcacggcggtaatccttgaagtccgccatgaccatgtacgggtcagagttgcgcaggttgctggtgacttcgctgaagttttcgccgttccagcccttctcaaggaagtccagcacggccatagcggtgttgtcgccgctgataaaggcgttcgggtggtagcccatgcccttcagcgcgttgacctcgggggtcagcatgccgaagatgatctcgttttcgtggccggcggcatcggcgatctcaacattcgcgccgtccagcgtgcccagcgtgatcgcgccgttcagcatgaacttcatgttgccggtgccggaagcctcggtgccggccagagagatctgctcggaaacctcggaagcgggcatcaggcgctcagacaggctgacgcagtagtcctcgaggtagacgatgcgcagcttgccgcgcacggcgggatcttcgtcgatcatcttgcccagcttgcagatcatgcggatcatctgcttggccatgtagtagccgggggcagccttggcgccgaagatgtaggtcttgggggtgaactcggcgttggggttgttcttcaggtacaggtactcggccgcgatgttcagggcgttcaggtgctggcgcttgtactcgtgcatgcgcttgacctggcagtcgaagatggagtcggggtcaatgacctgaccggtggacttctgcagatagttggcgaacaggaccttgttctcgcgcttgaccttggcggcagcagcctgcacggtcttgtcgtccacgaacttctccagcttcttcagctcggcagcatcggtcttgaagccgtcgccgatggtctcctccagcaggctggtcaggccggggttggaggccagcagccagcggcggtaggcaatgccgttggtgacattcttgaacgcctgcggcttgtacaggaagtaatcatggaagacgctgtccttgatgatctcgctgtgcagcttggaaacgccgttgatggcgtggcaggtataggcgcagatgttggcggtgcggacctgattgtcgccgatgatcgccatgtagtcgatcttgccctgatcgccggggaaggccttggccagatcggcgcggcagcggcgatccatctcgcagacgatctgccagatgcggggcagggtggagcggaagatgtccgcattccacttctccagcgcctcgctcatgacggtgtggttggtgtaggcgaacaccttgcggcagatgtcgaaggcggcgtcccactcatagctgcactcgtccagcaggatgcgcatcatctcggggatggcaacggtcgggtgggtgtcgttcagctggatggcaaccttgtcagccagattgtccagcgtgccgtactggttcaggtggttctgcaggatgtcggcgatggacgcagcagagaagaaatactgctggcgcagacgcaggatcttgccctcggtgtggttgtcgttggggtaaaggatcttggagatcagctctgcggaggcagactggctgatggcggtgttgtagttgccggcgttgaagctgctcatatcaaagctgggggccttggcctgccacagacgcagcttggaaacaccgttggagccgtaaccggccacatacatatcgttgggcacggcgatgaccgagttgtagttctcgtactttacatggtggaagccgccctcccaggtctcgatggcctggccgtcaaagcggatctcctgtgcctgatcggggtggctcttgatccagacctgaccgccgggcagccagttgtcggcagtctcctgctgccagccgtccacgatcttctgcttgaagatgccgtactcatacaggatggagtagccggtgccggggatgcagtcggtggccatgccgtccagatagcaggcggccagacggcccagaccgccgttgcccaagcccgcatcgggctcctgctcatagatggtgtcgatcttgacatcggcatcggccagcacgctctcggcaacctcattcaggccgaggttgaacaggctggtgcgcaggctgcggcccatcaggaactccatgcagaggtagtagacctgcttcttgccctcacccaggattttggactggaactgcttctggcggtcggacataatctggcgggtgatcatggccaggcagcgatagatctgatcggcggaggcagtgtcgagggtgacattgcactcgctcatcagcttgtccttgagaagcttctcaaattcacgctttgtgtatttcaaaatcgttctctccttacttctttcgatatagcttgggaatactgatttttgcgcttgtatttcgtgtgcctacaaaagcacactatagattataacggtatttgcccgtgtgcgcaagtcaaaattgcctgtttacagcttttttatacaattccgtcaaaaagggcttttgtaaactgtggatttgtattataataatggcatgattctgcgccgtcactgcaaaaaacgcgcgcagaccggaaggagtatgattatgggtatggcaacctcgaaagtgcggctgaacatctgcggctcgagctatgtggtcaacacaagcgagagcgaggattacatgcaaaacctcgccgaccgccttaatctggacatgaacgagctgatggcgtcctcgaactctgtctcgatcacgacagcagcggtcatgacggccctcaactaccgcgatgagctggaaaaggccagtggcagcgccgacaatatgcgccgccagatcaaagattatctggaagatgcagccagcgccaagatggctgccgaggaggcccgccgcgagaatgtgtcgctgaagcgccgcatcgacgagctggagcgccgtctgcgccgcaatcagttccctgtggaggacgaatgagccgccccgagattctggccccggcgggaaaccgtgagatgcttggcgccgctgtgttcagcggcgctgatgctgtttatctggggctgaccggctttaacgcccgccgcacggcgggcaatttcaccccggaggagctgcgggaggccgtggctttctgccatgcgcgcggcgtcagggtccatgtgacgctgaatacgctggtctatgaccgggagctggcgggtctggccgatgcggtgcgcgccgtggctgcggccggggcggatgccgtgattgccgatgatcttgccacggcgcagctggtcaagagcatcgcgccgacgctgcacctgcacggctcgacccagatgagcgtccacacaccggagggggcaaaggagctggctgcgctgggctatgaccgggtcatccttgcgcgcgagctgtcgctcgatgagatccgcgccgtctgcgaggccagccccatcgaggtcgaggtctttgtccatggggcgctctgcatggccgtgtccggccagtgcatgatgagcgcatttctgggcgggcgcagcggcaaccggggcgcctgcgcagggccttgccgcctgccgtttgatgcaagccccggcctgcgcccggggcagccgggccgggcctgccacctgagcctgaaggatatggactacatcccgcatctgcgggagctgatggacgcgggcgtggccagcgtcaaaattgagggccgcctgcgcacgcctgagtatgcggcggcggtcgtcacggcctgccgcgccgtctgcgcggggcagccctacgatgaaaagttggtgcgggacatcttctcccgctcgggctttacggacggttacctcatgaaccgcaatgacggcaaaatgttcggtgtgcgcaccgaggcagatgccgaggctacccgtgccgccaccccgaaagcacgcgagctgttccgccgtgagctgcagcgcgtgccggtgcgctacaccgtcagcggcggtgtggaggacggcggcatcaagctgacggctgccgatgcggacggccacagggtcagtgtctacagcgccgatgagccgcagcccgcccaaaaggacccgctgcccggcgttgagcgcgccctcggcaagacgggcggcacgccgttcgttatggcggggctgaccgccgaggcaggggaggggggtctgggcttcctgcccggctccgcctggaacgaaatgcgccgtgaggcgctggacaagctgctggaaaagcgcagcgaggtccggccccacgccacgcaggatataacgctgcccgcctacccggcgcacaccgtcgggcaggtcccggcgctggctgcccgctttgccaacgcggcccaatgcccggcggacgctgtggaaaagctgcaatacctgattttcccgattgccgaggctgagagcatccccgccgcatggcgcggaaaaacgctgctggagctgccgcgcgttatgttcggaaagctggagcaaaagaccgccgcccggctggatgccctgcaggacgcaggctttgcaggtgcggtcgtcaacaaccccgcgcagcttcgcattgcggacggctggacgctgtacggcgggcttggtcttaatgtcacaaacccgatgagcgctgcccgctatgcgacgcttggcatgcagggcatgctgctgcagcccgagactgccctgaccgccatgacggccatcgcccccggtgtgccgacggcggcgctgtgctacggccacctgccgctgatgctgacccgtgcctgccctttgcgcaatgtgcgggactgcggcaaatgtcagggcggcggcacactgcgcgaccgcaagggccgcgactttaccgtgacctgctcggcccccggcggggccggtgtgcgcacggtgtacaaccctgtgcccctctatatgggtgagcgcctgcgtgagatgccggtcgatgtggcgatcgcagcctttaccaccgagaccccggcccgcgccgcccagattttggcaatgcttttggacgcccgcccgtttgacaatgagtttacgagagggctatactataccaataactaaatagataaaagataacagataatagataataaatgatgtgaagtttttgcccgcagggcaaaaacaaaattttaagcggcgcgcagtgccgcgatccacttgcttttttatctcttatcttttatctattatctttttttggaggttcccatgacccctattgtaaaatataaaaagctcgacccgcgcgccgttgtgccgcagtatgccacccccggtgcggcggcggctgatctgtgcgcactgctcgatgcgccgctgacgctggccccgatgcagcgcacgctggtgcccaccggccttgccattgagttgccggatgcagggtgcgttgccctcgtctacgcccgcagcggcctgtccatcaagcacggcctctgtatggcaaacggtgtcggcgtcattgacagcgattaccgcggtgaactccgcgtgccaatggtgaatctgtccaacgaaccctataccatccagcccggtgaacgggtcgcccagctctgcatcgcccccgtctggcaggcggccttcacggccgctgatgccctgagcgataccgaccgtggtgcgggcggcttcggctcaacgggaaagtaaaaaacagaaaggcttcccccgcggggctgcgcccgcaggcgcgtgtcggagtgcaaccgccgtaggcggcacttggcacggagactgaagctgtcgccgaaggcggctgatgagggccgaccttgcggcaataacccgcttatgggcagccgccgtaagtctgcccctcatccggcctcggccgccttcccccgcgggggaaaggcaattttaccctaaggcggcttacttaggcacacttcgacacacccatctgcttataataaacgagaaaggaagcacaccatggctctgatccttgcctccggcagtccgcgccgccgtgagctgatgtcccttatcacgcccgaatacaccgtgatcaccagcgagcttgacgaaacgaagatcgcggcggattccccggcccagctggccaaggcccttgccactgccaaggcccgcgctgtggccgaggaacgccccgatgacatcgtctgcggctttgatacggtggtcgagtgcgagggggaggtgttcggaaagccaaaggacgaggccgatgcggtgcggatgctgcacgccctctccgggcgggagcatcgtgtccacacgggggtctgcatctgctgcggccgccgcgcggcagcaacggtggagacaacgatcgtccatttttcgcccattgacgaagcggatctgcttgcctatgtgcgcacgcccgagccctacgataaggcgggtgcctacgcaattcaggggcatgcagcgctgtggtgtgccggcatcgaaggatgctactacaacattatggggctgccggtccaccgcacggcacagctgctgcgggaattccaataacgccgtacagccccgcagacgggggactgtatggaaagaatctgcaacttttttacatgctttttcgggagaatacacgctatgtttaccaaagacatcggcattgatctgggtaccgccaacacactggtctacatgaagggccgcggcatcatcatgcgggagccgagcgttgtcgccgtggacccgcgcagcgatgagctgcgggtgcgcagcgttgggcatgaggccaaggcggtcatcggccgtgcgccgggctccattgtggctgtgcgcccgctcaaggacggcgtcatcgccgactttgacattacggccgccatgctgcagagctttatccgtcaggcctgcggcagcaccctgctggccaggccccgggtcgttatctgtgtgccgtccggcgttaccgaggtcgagcgccgtgccgtgcgtcaggcagccgccaaggcgggcgcgcggcaggtcacagtcattgaggaaccgatggctgccgccatcggcagcggcctgcccaccaccgatgcagtcggcagcatgatcgttgacatcggcggcggtacggcggaggtggccgttatcagcctgtcgggcatcgtggccagccgcagcgtccgctgtgcgggcgatgcgcttgaccagagcatcatcgccttcatcaagcgcaaatacaacctgctggtgggggagcgcacggccgagcagatcaagatcgagatcggctccgcctgcccgcaggaccccgagaccagcatggagatcaagggccgcaacctcgtggacggcctgcccaaggacattctgatccggtcggaggaggtccgcgatgcaatgagcgaatgtctgctgcgcatcgtggaggccatcaaggatacgctggaatgtaccccgcccgagctgtccagcgacatcatcgaccgcggcatcatgctttcgggcggcggtgcactgctgcgcgggctggataccttgatccagaacgagaccggcattgatgtccatatcgccgaggccccgctcgactgcgtggcgctgggcgccggggccgtgctggataaccccgagcttgccgggcgacggaaagaagagatgagctacttataaaatgagggccttcccctttgggggaaggtggccgaggccccgcccgaggtcggatgagggaaaaccttgccgtattgcccgtgaactggcagtgttggcgagctcgcccctcatcagtccgcttcgcggccagcttccccccctagggggaagccttttctttttcctgccgaaccgccgaaaaaaagattgacaaacggcgcgtttccagctattattaagttgttcgcatcttcccggaggaataccatgcccttgccaaagtctatgatcgaggcggagctgcccgcccgcgcacagcagggggatgaaaatgcgcttgccgcgctcatcgcccgcatgatgcctgccatccgcaagggggccgccgactgtacggccccggggctggattttgacgatgctgtgcaggaggggctgatcggcttgttccgcgctgtgcgggagtatgaccccgcagcgggcccgacctttgccgcctttgctgcggcaagcatccgccatgcccagcaggacgcccgccgtgccgcgctgcgcaaaaagcatgcgccgctgaatttcagcgtgccgctgcccgacgcacagcaaagcaccgacacccgccccggaccggaggaaattgccatctccggcgaacaatatgccgacacgatgcgccgtatgcagaccgagctttccgagcttgagcgccgggtgctgatggccggactggagggcaggacccccgcgcagaccgcgcaggaattgggtctgcctgccaaaaatgtggccaatgctctggcccgtgcccgccgcaagctgcgtggcggacaaaacccctaggattcaggtgatctgcctgcatcatatatcaacctgcccccagtagcgcctaaaatcagttcagttggtccattcccattgcgttgttttagattcttccgcgggcaaaataaacacagaggagatacccactatgttcgaagacaagactttggtatgcaaggattgcggcaaggagttcgtttggaccgccggcgagcaggagttctacgccagccgtggttttgagaaccagccccagcgctgcaagccctgccgcgatgcccgcaagaactctacccgcggtgagcgccagatgttcgacgccgtctgcgccagctgcggcaagacctgcaaggttcccttccagccccgcgaggaccgtccggtctactgcagcgagtgctttgccaagatgaaggagaacggctgattttacgcggtttcgtgtaaactgagttgaatttttccattccgcgccccggcctaaccgccggggcgtggtttgttatgggggacggactatgacggtgaaacaaaaaacgcagcgcacagtatggctgctgggtatcgcggcgctggtgctggtgtggtgcagcaaatcctcgcccctgtatgccttcaacgactggatggacgcaaacattttttttacgatgggcaagtcgatgctccgcggaagggtgctgtaccgggatgtgtttgaccacaaaggcccggtgctgtatcttctctacgggctggccgcctgtgtggacgataccggctttggcggcgtgctgctgctcgaaacagcggcctttgcggcctttctctggctggggctgcgcagtgccgaggtgatttgcggccgggcgctgcaccctgcatggacggcactgcccgctgcggccattgccgccagccgcgccttttcccacggcggcagtgcggaggagctgcttctgcctctgctggcggcggcgctttttggcgccgtaagcaccctgcgggcatcccgccccatgtcgctgcgccgtgtcgtgctgcacggctttttggcagggtgcgcactctggctcaaatacacggtgctgggcttttaccttgtctgggcggtactgctggcggtgctctatctgcggcgcggctggcgcgggccgctcggccgtgccgtcggggcttatctcggcggcatggcgcttgctgcgctgccgtgggtcgtctacttcggcgtgcagggcgcgctgggggactggtttacctgctacttctatgataacatcttcctttataagggggcagacggcggtgcggcggcgctcgcacagcatctctggtgggcggtgcgcgatgccctgcctgctgcggtgcttctggcgctatttctactgtgggcggcgcttcgccaacccgctgtagcgggagccgtggcggcccttgcggcgggtctggcctttaccagcctgatgggcgggtatcttgtctactacgggctggtgctgagtgtttttgccccgctggggctggtgccgctgacttttcttgtggaaaagtgcaaagcccccgccgccgcaaagcggcttgcaccggcagccgccgtggcgctggcgctggtctggtgcgtgatgcgcagccccaaccgggccttgcgctggcgcacggccgacagtatgccgcagcgccgctttgcccggcagatcgacggcgcaagcctgctcaactacggcacgctggacggcggcttttacacggcggcgggcgtgctgccgccctgccggtatttctgcgtgaccaacatgccgttggatgaccagtgggccgagcagaatgccctgttggcagaggggggcgtggactatgtcgtggcgctgaccggcgatctgggcacagcgttcccgcgctatgcggtcgtggatcagtgcagctgcgacggcggcgaggggctgctgacatggtatctctataagctgcaggcatgatttgcgttttttgcctgcgtgctgtataatggtacacaggcagccctttgcgcttctgcccctgatttcagcagatatgactctgcacaatgccagaaaggcggactatgaaaaaaacactcacgccccgccgcgcagtctgcggcctgctggcggcgctggccgccgcagctgcggtatggctgctctgccgctgggtcggctatgatctgcagctccggctcggcgataagcagcagtttgagatcgtcaacgatgactacagccagatcatagatgtcccggacgagggtcttgtgcagacctttccgctcaaggcagggcagagcatctgcggcgtgcggctgaatttcagcacccacgatgcgctctataaatgcggcatggtcatggtggatctctacgatgaggctggtcagctgctggggcagggggccggaaacttcctgaatatcttcaacgacagcttcacggcgttcgcgtacagcggcagctacacggccgaaaaggacgagatgctgaccctgcacatctacaacgaggtcgcgtgggacggcccgctgggtctttgggccagcgagggcacggtacccggtatgccgctgtatgccggagatactgcacaggacgccacgctggcgctgcagatcatgaccgacaggtcagccgactggccgacccggctggcacagagtctggcgccgctgctggcggcgaccgcctttgccgccgtgctgctctgtgtctggcgtgccccggcggtgctctatctggcagtggtgggtcttgcctgcgggctggcctttatgcgggtcacgccggcgctgaccgcccccgatgaatacacccatctggccgccgcctatgagcaggccagccgatggaacgggcagaccgccgccgatgaaaacggccgtctgcttgtgcgcgcctgtgatgcaccgtactttggcaccagaacgggggacatcggcatcttcgcctacaagcaggccgaggctgtcatcgagcaggcgcagaggtccgggcacgccgacccggcactgaccgtggtgagcgaggcgaaggcagggcagggcagcggcagctacctgccgcaggcgttgggcatctggctggcgcgggcgcgcggtgcggatttttacacaatgctgcgcaccgggcgcatctgcaacctgctgctttatctggcactggcggcgctggctgcggcgctggccccggccggggtgcgcgggctgctggcctgcgtggcgctgctgccgatgccgctgcaattagcgggcagcctttcgcccgatgcctcggtgctgggcacggtgttctgctacacggcgctctgcctgcggctctgcggcaaaaaggccgcgctgtgggagaagctgcttcttgttgtgctgggcggcatcgtcggcccggccaaggccatctatctgcccgtggtgctgctctgccttatcatcccggcggaaaacctcgccgggccgcagggatttgtccgaggcccgtttgggctgcgcgtgcgctcgggacggctgatacaggcggcaacgctcgtgctggcgggcggcctgtggctgaccgccaacctcagtgcgcttgcctacgccgcgcgggatgtgagccgtgccgtgctggcggcgggcgctgcggcgctggcggtcatgctggtgcttgtgctgcgcctttacgcatgggcgcacaccgatgcccgcagactgcgccggttgcgccggggactgacggctgcggctgccgctgcggtgctgggcggcgtgtttgccctctcccgcatgggcggcgggctggaccccgatcagcttttgatgacgaaccccaacggcgattccatctggaccttctcgctgggctatatctgccgcaatctgcccgccacggctaagcttttgctgcgcacgatccctgagcagggcgcgctctggctgcagggcgttttgggcaccacgctgggggaaccgatcgtttaccgcctcgatgtaagctggctgctcggcgttgggctggtgctggcactgctggcggcggcgctgcctgtgcagggcgagcagccgctccttggccaccgcgcggcatgtggcacggcgggcatcatcctctgcgttgtggcggcgtctcttgtcgtggcgctgaactggacccccatcaactaccagacgcttttcggtctgcagggccgctactggctgcccgtgctgccgctggcgctggtgctctgcaagcgcgcgggcaatatcagcctgcggcgcaatgcttcccgcggggcggcgctggccgtcaccgcctgtacactgttgaccctgctgcagggctttggcttgtacgccagctggcagctggtatcataaaaagataacaaaacccagataaggagaaccatcttatgactgttacgaagaataccatcattgccgagatcctgaacaacgaccccactcagggctgcgtgcccatcttcctgtccaccggtatgcactgcctgggctgcatggcctcccacggtgagactgtcgaggaggcctgtgccgtccacggcgttgacgccgatgagctggtcgcagagctgaacgattactttgcacaccagtaatgcaccgcggctggacgcccgccttgccgctgccttcgactttgtacggccggggcatgtagcggcggacatcggctgcgatcacggcaaattaagcgccgcactggcgggcagcggtcgctgcccgcttgttttggcttgcgacctgcgccccgacccgctgcagaaggcccgcatgacctgcgcgccttacggggaacgggtgcaattccggctgggcagcggcctgcaggtcctcgcccccggcgaggccgaggagatcatcatcgccggtatgggggccgaaaccatcatagaaattctggaggtagccccttgggtgtttgacgggcggtacaatctggtgctggtgcctgccaccaagcacagcatcctgcggcgctggctggcccggcgcggctttgccctcaaggcggaaacgctttgtcaggccgcgggccgctggtacgcagtcatgaacgcgcagtacaccggcgcgccctctgaaccggacgggctgtactgcctgaccggtctgacgcagggccagcccggctgcgcggattactatgccagccagaatgccaagctgaaaaaataccgcctcggcctgccggacggcgcagaaaaggacgcggtgggggcgcttatcgcggaattggacaggctggcggaagggtgaacgttcacgggcggatatggaatccgcccctacgggctccacttgtaggggcgcatcccatatgcgcccgcagggtgttgccacgcatacaaactttttggagggattatcatgtcagtaacggtacggcagattttaggtctgctgcaggcggcggccccgcaggagctggccctcagctgggacaatgtcggcctgctggtcgatgcgggtaagccggtggacggcgtcctgaccgcgctggacatcacccccgcggttgtgcgggaggcggtcgaaaatgactgccagcttattgtcagccaccatccggtcatcttccagcccatcaaaagtctggccgccgatgatgtgcccgcgctgctgatgaaaaacggcatctccgccatctgtatgcataccaatcttgatgcggccccgggcggcgtcaatgatacgctctgcgagattctgggtattgccgccgaggggcgcgaaagctttgccgagggctgcggccgcatcggcaccacgatgcccaccaccgtggaggcgctggcaaaattctgcgccgatacgctgcacaccggtgtgaaatatgtcaacggtgcccgggaggtcacctgtctggccgaggtcagcggcgggggcggcagctacctgcaggaggccatcgaccgcggggcggactgtcttgtcaccggggaggcagcgcatcatattgcactgctggccaagcagaaggggatcggccttgtggttgcaggccactggggcaccgagcatgccattgccgacgtgctggctgcgctcatcgccagacagttccccggtctgactgtcgcccacgctgaggccgataccgatccgtattgctatttgacctgataaacgcatttttacttttataaaagaggaaacatccatgtccttagatgccgcaacgctggcgctggtcgccggtgaactgaaaaataccctgctggatgcgaaaattgataaaattttcgagccgacccgggatgaggtgcttatcacgctgcgcacccgcaccgagacgcaccgcctgctgctgtcggcgcgcagcggctcggcccgcgtctgcctgacgcgggaaagctttgaaaacccgctcacgccgccgggcttctgtatgctgctgcgcaagcacctgacaggcggccgtctgatcgagctgcggcgcgagccgggggaccgcatcgtctattttgatttccgctgcaccaatgagatgggcgacctcgtcacaaacacgctggcggtcgagctgatggggcggtactccaatctggtgcttgtccagaacggccgcatcattgatgccctgaagcgggtcgattttgacgacagcgaggtccgccagctgctgccgggccttgcctacacgctgccgcccaagcctgcaaggccggactttttggagacgagcgccgccgccatcgtggcggcggcctgtgagaaggaactccccgttgcgcaggccctcggcaagacggtggccggcgtcggcccggtcgttgtgcgggaggccgtctgccgcgcgctgggagagaccccggcgctggcctgcgatctgaccgctgaggaaaaagcaaggctggcagcggccatcgacgagctgaaggcggagcatgcccgcggcggcacccccacggcggtgcggctgccccagccggacggcgcacccaagccggtggagttcagcttctttgtgccgcagcagtacggcaacgcagcgattttgacgcagtaccccagctacagtgaaatgcttgaggactactacgccaccaaggaccgtgccgagcgcctgcgccagaagagccgcgagctgtacaaggctgtccacaatatgtacgaccgcgctgtccgcaagcaggcggcccgcaaagaggaattgagccagtctgccaaggccgatacgctgcggctgtacggcgagctgctgcaggcgaacctctgggcgctgcacaagggcgaccgtcaggtcaccgtgcagaactattacaccggcgaggatgtgaccatcaaactcgatccgcgtctgggcggcatcgagaacgcgcagaagtatttccgcgattataaaaagaagcagaccgcccacatcatgctgcaaaagctgctggtcgagggcgaggcggagatcgaatacctgcgcaccgttctgtatgaggtcgagtctgcgcccggcgagatggcactgaacgagatccgcgccgagctgaaaagtcagggctatctcaaatactacaagcagcgcgaccgcaagcagaagtcggcggatttcctgcggtatacctcaagcgacggctttgagattctggtcggccggaacaatttgcagaacgataagctgacgctgcacaccgcgcgcggcaaggatctgtggttccatgtgcaaaaggctcccggcagccactgcgttgtcatgagccggggggaggatatccccgacacgaccagacaggaggctgccgagctggccgtgctgcattccagccagaacggcggtgcaaaggtgccggtcgataccaccgaggtgaagaacatctggaaagccaacggcgccaagcccggcatggtcctgtatgaggtctacaccaccgtctacatcaccccgcgtgccgggctggaggaacagctgaaaaagcggtgaatgcaggggatggcgttcccgccgccctgcaggccgatacggacagcgccccctacaatctgccgcacggtaggggccgggcatgcccggcccgcggccttcccgcaggaggtcgtctgccatacagctgcgggccgcacatgtgcggcccctacagggcatctttcgatgaggtacgttatgaaaaaatgcgctgtaattcttgcatctcttatttttcttactgcgtgcgcttctgccccggcgggcagcatcaccccaacgcctgacccgaccgcaacacctgccataaccccggcgcctaccgaggctccgactgccactccgtccccgacgatggcggtgtacgaggaagtctccttcgatgattggcgggacggtgcaggctgcacgatgccggactacacattcagtgcgccgcataaaccactgctgcagcagggcgaaaaagctgcctggcccaccgggggcgtgacgctccgttactcggcagattcgctggaagaagtggcgaaaattttccacacgacggtggaaaacataaaagagctgaacccggactggcaggataactatagccgcaacggcggacgctactgggacctgaaagtgcaggctgagccttacacagtgcctgagaacaatgtcgtcaccgtcacagtcaatgcgccatgggtcgagggctgctacgaccgcacagaagtcagcgatgttccagcttcgctggataagcaggcccgggctgcgctggcctcggcgtattactttcagtaccattggtttgggatgcatgcgggctttatgcccttcgagtctgtggagggcttgccgggatggcttcggggctatgcgacggacggcgcgttctacacaaagttctcggagttcagcagctttctgcacacggtctattccgatgcttggatcaatgatatgctgagcatggagcccgcgccttttgcggagggcgagaatgacacgatcctgacgatagatggtgaccgcggcagtaatattgcttactgcgggcatgtctttacggagccggaattacagcctgacggcagccttacattttatcaggtcgtgctgacttgtgagagcgaggacttcgcgggctgggcaggggatgaccctgttgtgcctgatacagccacgctgagccccgtccgcctcatccccaccgagggtggctggcgagtggatgaattggagctgccgaattaaatgcctgcaggggccgggcaggcccggcccctgcaaagcaatgacttttcacactgcaatttagatgaaaaacggggcttctttccccgaaaaccatgcactctgttgaaagccctcccggcaaacgctactttcggcataacgtaaaaatttctcaaaaaaattttataaaaatgccaaaaaacacttgcaacgccgggaaacgtgtgctataatctttcttggctgcggaaggcttgtgcagataaaacaagctgcgcaagccgcgatatgcgttgatgcgggaggttgccgccatatagccgagaggctggcgggtttttccgcggagtatgtccgatcttagaaccgggcgaaagaattacggaaacaaagggatatgtacgccactgcattctgcggtgcggaccaatgttcaccttactttgtaatgattctttccgggagaactgtgtaaaacggttcaccggattttgtcatgcgaaaaggttgaacacccggaaacgtgtgtaatttatcggctcgcctaaggcgcaaaattttataggaggcgaatgcaatggcagtcaaagaaaaaatcagaatccgtctgaagagctacgatgcatccctgatcgatgctgcggcacagaagatcgtggagaccgctaagcgcactggcgctcgcgtttccggcccgatccctctgcccaccgacaaggaggtcgtcacgatcctgcgcgctgtccacaagtacaaggacagccgtgagcagttcgagacccgcacgcacaagcgtctgatcgacattctgaagccgtccaacaagacggtcgaggctctcatgagtctgcagctccccgccggcgttgacatcgagatcaagctgtaatcgagtttctacattataatggccgatacgcgcggccgtgatccgtgaacggtcggcgtgtaatgaaaacacggtaaagcaccatctcgctgcaatgcaaacagcggagaggtcatgttgatgggaaaccaccaaccaataacctttacaggaggacaaacacaatgcaaaaaggtatcatcggcaagaagctgggcatgacccagctgttcgacgccaacggcaaggtcgttccggtcaccatcatcgaggccggcccctgcaccgtcgtgcagaagaagaccgttgagtctgacggctatcaggctgttcagatgggctacggcgaagtgagcgccaagaaggtcaacaaggccgccaagggtcacttcgacaaggctgacgttgcccccaagcgcaccctgcgtgagttccgctttgatgacatcgctgccgtcaacgtcggcgacatcctcaaggctgatgtcttcgcagagggcgacaaggttgacgttgtcggcaccagcaagggcaagggctatcagggcgttatcaagcgctttggccagcaccgcctgcgtgagagccacggcaccggccctgttgcacgtcatgccggttctaacggctccacttccagcccgtcccgcgtgttcaagggcaagcgtctgcccggccacatgggtgcggtccgcgtgaccgttcagaacctgagcatcgttaaagtcgatgctgagaacaatctgatcgcgatcaagggtgcgatccccggcccgaagggctcggtcgtgaccatccacgacagcgtgaaagcgtaaaggaggaaaacacaatggcacagtttgatgtcgtcgatatgaacggcaagaaggtttccaccgttgagctttccgacgccgtgttcggtatcaccccgaacgagaaggctgtccacgaggcagtcgtcaacttcctggcaaaccagcgccagggcacccagaacaccaagatccgtaaggaagtccgcggcggcggcaagaagccttggcgccagaagggcaccggccacgctcgtcagggctccatccgcgctccccagtggacgcacggcggtgttgctctgggccccaagccccgcagctactactacaccatcaacaagaaggtcaagcgtctggctctgctcagcgccctgtctgacaaggctgccaacggcaacatgatcctggttgacaagatcgccgctgacgagtacaagaccaagaccgtcgttgctttcctggccgctgtcggcgcaggcaagaagaacctgatcgtcaatgacactctggacgccaagttcgtcaagagcgccgccaacatccccggtgtcaagactgccgctaccggcatcaacacctacgatgttgtcaacgccgacaagctgatcctgagcgttgacgctgccaagaaacttgaggaggtatatgcgtgatgaaattcgcacaggacatcgttctcgcccccgtcatcaccgagaactccatggctggcatcgctgacaagaagtacaccttcaaggtcgctaccgacgccaccaagatcgacatcgccaacgctgttgaagagctgttcggcgtgaaggtcgccaaggtcaacaccatctccgtgcgcggtcgttaccgccgccagggcatgcacgccggctacactgccaagagcaagaaggccatcgtcaccctgactgctgactccaaggagatcgagttcttcaactccatggtctgatgacctgacaagccgcaaggctgtcactcaggaccccgccgaggggtccgcttatggggatatgaccccgagaataattcataagataacaacaaggagatcaacatggctatcaaaaagtacaagccgactacccccggccgccgtggcatgactgttactgattacagcgtcctgtccaaggttgagccggagcgcagcctgctcgagtccaagaacaagcatgccggccgcaacaacaccggcaagatcaccgttcgccatcgcggcggcggcaaccgcgtcaagtaccgtgtcatcgacttcaagcgcaacaagtttgatgtccccgccaccgtcaagacgctggagtatgacccgaaccgttctgccttcatcgcactcatcgagtacgaggacggcgtcaagagctacattctggctcccgatggtctgaaggttggcgacactgtcatggctggccccaacgctgacatcaagcccggcaacgctctgcccttcgagaacatccccgtcggtaccatgatccacaacatcgagctctaccccggcaagggcggccagctggttcgttccgccggtgtcatggctcagctgatggctaaggagaatggctacgctctggttcgtctgccctccggtgagatgcgcaacgttcgtctgaactgcatcgccaccatcggcgttgtttccaacctcgaccatgagaatgtcaacctgggcaaggccggccgcaagcgccacatgggcgtccgccccggcagccgtggtaccgtcatgaacccctgcgatcacccgcacggtggtggcgagggccgcgcaccggttggtcattccagcccgcgtactccgtggggcaagcccgctctgggcctgaagacccgcaaacacaaggcccgcagcgacaagttcattgtcaagcgcgccaacggctaagggaggttactgaacaatgtctagaagcactaagaagggcccttacgttctgccttccctgtacaaaaaggtcgaggctatgaacgaggctggcaaaaagagcgtcgttaagacctggagccgttcctccaccatcttccccgagttcgtcggtcacaccttcgccgtccatgacggccgcaagcacgtgcccgtctacgtcaccgaggatatggttggccacaagctgggcgagtttgcacctacccgcaagttcaccggccacgtcggcgctaagaccgccggcaaataagagaggaggaacatcgaatggaagcacgggctattctccgttatgcccgcattagtccccgcaaggtttcgatcgtgatggacctcatccgtaacaaacctctggacgaagcgctggctatcctgcagtacaccccgaaggccgcctgcgagccccttctcaagctggtgaattctgctgccgctaatgcggaaaacaacttcaacatggaccgcaacaatctctacgtcgcagaatgctacgtctgccccggccccacgctcaagcgcatcatgcctcgcgcacagggccgtgcataccgcatcctgaagcgcaccagccacatgactgttgtgctgaaagagaaagagtaaggaggtaaacaaatgggccagaaagtcaatccccacggcatgcgcgtgggcgttatcaaagattgggacagccgctggtttacctctaagcaggcattcggcgacaccctggtcgaggatcacaagatccgtaagaccctgaagcagcagctgtacgctgccggcgttcccaagatcgagatcgagcgtaccgttgattcccagaccggtgccccccgcgtgaaggtcaatgtcttctgcgcaaagccgggcatcgtgatcggcaagggcggtgctgagagcgccaagatcgagaagcagcttgccaagctcaccggcaaggctgtcaacctcaacatcatcgaggtcaaaggcaccaccaccaatgctcagctggttgctgaggatgtcgcttcccagctcgagcgccgcatcgcgttccgccgtgccatgaagcaggccatccgcaacgctatgcagccccgtgaccgcagcgctacccccgcaaagggtatcaaggtcacctgctccggccgtctggctggcgctgacatcgcccgcgttgagagctaccacgagggtaccatccccctgcagactctgcgcgctgacatcgactacggcttcgccgaggccaacaccacctatggtaaggtcggcgtcaaggtttggatctacaaaggcgagatcctgaagggcgccaaagcccccgccaagaaggaaggaggcaaacagtaatgttactgccgaagcgtgttaagtaccgccgcgttcagcgcggccgcatgaccggtaaggccatgcgcggcaacaaggtcaaccagggcgattacggcctggtcgctctcgagccggcttggatcacctccaaccagatcgaggcagcccgtgttgccatgacccgttatatcaagcgtggcggcaaggtctggatcaagatcttccccgataagcccgttaccgaaaagcccgccggaacccgaatgggttccggtaagggcagcccggagtactgggtggccgtcgttaagccgggccgcgtgctcttcgagctggctgatgtcaacgaggagaccgcccgcgaggctctgcgtctggccagccacaagctgccgattcgctgcaaattcgtcaagcgcgaggagcttgacactgtaaaggagggtgacgctgaatgaaagccactgaactgcgcgaaatgaccgatgtcgagctgaacaagcagctcaaggacctgaaggccgaactcttcaacctgcgctttcagcacgccatcaaccagttggacaaccccattcgcatcgaggccgttaagaaggacatcgcccgcgtgatgaccgttctggctgagaagaatgccaagaacgcttaagagggagggtaaagcatggaacgtaatctgagaaagacccgtgtgggcgtcgttgtctccgacaagatggacaagaccatcgttgtcgctgttaaggacagcgtccagcaccctctgtacaagaagatcttgaagcgtaccaagaagttcaaggcccatgatgagaacaacgaagccggcatcggcgaccgcgttgagatcatggagacccgcaagatctccaaggacgtcaactggcgtctggtcaagatcatcgagaaggcaaaataatcagcctggtactttgaaaggaggacctgaaagatggttcagatgcaaacttatctcaaagtggccgacaataccggtgctaaggagttaatgtgcttccgtgtactgggcggtacccgcaagagatacgcaaacatcggtgacatcgtggtttgcagcgtcaagaaggctgctcccggtggcactgtaaagaagggcgacgtggtcaaggccgtcatcgtccgtagcaagcacggcctgcgccgtgacgacggctcctacatccgctttgatgagaacgccgccgtcatcgtcatggctgacaagagccccaagggcactcgtatctttggacctgtcgctcgcgagctgcgcgatgccggcttcaccaagatcctgagcctggctccggaatcgctgtaaggaggttttaattaaatgaacaatcttcatgttaaaaccggcgacaacgtaatggtcatctccggcaaggacaagggcaagaccggcaaggttctgcagacctcccccaaagagggcaaggtcattgtcgagggcctgaacatggtcacgaagcacgtcaagccccgccgtcagggcgagcagggcggcatcgttaaggccgagggcgctatctacgcctgcaaggtcatgcccgtctgccccaagtgtggcaaggccacccgcgtgggccattctgtcaaggacggcaagaccgtccgcgtttgccgcaagtgcggcgctgaactgtaagggaggagtacacaatggcacgtttgaaagaacagtatgtcaacgagatcgctccggccctgaacaagaagttcggctacaagagcgttatgcagatccccaagctggataaggtcatcatcaatgttgcagctggtgaggctaaggagaacgccaaggtcatcgacgccatcgtcgcagatctgggcctgatcaccggccagaaggctatcgtctgcaaggcccgcaagagcgttgcaaacttcaagctgcgcgagggcatgcccatcggcgcaaaggtcaccctgcgcggtgagcgtatgtacgagttcgtcgaccgcctcttcaatgtggcgctgccccgtgtccgcgacttccgcggcatcaacggcaactccttcgacggccgcggcaactacgccttcggcctgaaggagcagatcatcttccccgagatcgacttcgacaaggtcgatgcgatccgcggcatggacatctgcttcgtcaccaccgccaagaccgacgaggaggccaaggagctgctgaaggctctgggcgctccgttcgctaactaagggagggaactctaatggcaaaaacttctatgaagctcaagcagcagcgtcccgccaagttctcgacccgcgcttacaaccgctgcaagatctgcggtcgtccccacgcttacctgcgcaagtacggtgtctgccgtatctgcttccgtgagctggcttacaagggcgagatccccggcgtcaagaaggcttcttggtaagcccttgattgcttctgtctgaacgaataacaacactcttaaacacaacctaaggaggttagtggcatgcaaatcaccgatcctatcgcggacctgctgacccgcatccgcaatgctagcactgccaaacacccttccgtggatatccctgcatctaacctgaagaaggctatctgccagattctggttgatgagggctacatcaagggtatgaaagtgaccgaggacaacaagcaggggaccatcaccctgaccctgaagtaccaggagaacggtactccggtcatcgccggcctgaagcgcgtttctaagccgggcctgcgcatttacaccaactgcgaggatatgcccaaggtcatgaagggcctgggcaccgcaatcatctccacctctaaaggcgtcatgaccgacaaggcagcccgcgctgctcatgtcggtggtgaagttctcgcctttgtgtggtaagaaaggggtatagacaatgtcgagaattggaagaaaacccatcgtcattcccgccggtgtggaagtgaaggtcgatgcggccgagcacgctatcaccgttaagggccccaagggtaccctgcattccaaatttcaccctctgatgaatgttgctgtcgagggcaatgagattttggttacccgccccaatgacgagaaggaggcacgcagcctccatggcctgacccgcaccctgatccacaacatggtcgtcggtgttaccgagggcttccgcaaggatctcgagattcagggcgtcggctatcgtgccgccaagcagggcaacaagctgaccctgactctgggcttctctcatcccgttgagttcgaggacaccgataccatcaagatcgagctgaaggatgctctgcatttcagcatcgtcggtatcgacaagcaggaggtcggccagttcgctgccgaggtccgcggtgtccgcccgcccgagccgtataagggcaagggcatccgctatgttggcgagtatgtcatccgcaaggaaggcaaagccggcaagggtaaataataggagaggagaaacattatggtcaacaaggctgataagaacgttgctcgtctgcgccgccaccgtcgtgtgcgcggcaagatcagcggcactgctgctcgtccccgtctggatgttttccgctctgccaagcacatctacgctcaggtcatcgatgatgagcagggcgtgaccctggccagcgcttccagcatggacaaagatttcaacgcttacggcggcaacattgatgctgccaagaaggttggcgagaacatcgccaagaagtgccttgagaagggcattaccgaagtggtctatgaccgcggcggtttcgtttaccacggccgtgtgcaggctctcgctgagggcgcccgcgaggccggtctgaagctgtaaggagggagaagatacaatggccatgcagagaagacaagaagatgacggcatgatcaccaaggtcgtctccatcaaccgcgtttccaagaccgtcaagggcggccgcgttatgaagttcgctgccctgatcgtcgtcggcgacggcaagggcaacatcggctacggcgtcggcaagtccggcgaggttcccgaggccatccgcaagggtgagggcgctgccaagaagaacatgcgcaaggtctgcctgaagggcaccaccattcctcacgagatcgtcggcgagttcggcgcaggccgcgtcctgatgcgtcccgctgcccccggtaccggcgttctggccggcggtcctgtccgtgccgtgctcgagtgcgccggcatcaaggacatccgcgccaagagcctgcgttccaacaaccccatcaacgtcactgctgctaccttcgcaggcctgtgcggcctgaccgacgccgagagcgtcgctgctaagcgcggcaagaccgttgccgagatcctgggctaaggagggtactacaatggagaaagttaccattcgtctcgccaagagcctgatcggccgcggcaaagagcagatcgccgttgcgcactccctgggcctgaaccgccccggtgaggtcaccgagcagcccgacaacgcggctactcagggcaagatcgccaagatcgcccacctggtcgttgtgaccaaggcgtaatgcaaggaggtgcaagcatgaaacttcacgaactgaaagcttccgctggtgcccgcaaggccgtgacccgcaagggccgcggtgctggttccggcaacggcaagaccgctggcttcggccataagggacagaaggctcgcagcggcgtcaagaaggccggcttcgaaggcggccagatgcccctgcagcgccgtctgccgaagcgcggtttcaacaacattttcgcaaccaagtatgttaccatcaaggtgtctgacctcgagaagtttgaggccggttccaccgttgataccgaggctctgctgaaggccggcatcatctccaagacgctggacggcgtcaaggtgctgggcaacggtgagctgaccaaggcaatcaatgtcaaggtcgctgcctacacagcctccgccaaggaaaaaatcgagaaagcgggcgggaaggctgaggtgatgtaaggtgtttgaaaccttccgtaaagcatggaagattgaagacctgcgcaagcgtcttctgttcacccttctgatcctcgttctgttccgtctcggttgtgcgatccctgtgccgtatatcagcgcaggcgcactgaccaccatgtttgccggcggcaccggcgatatgctggagtacctgaacatgatgagcggcggcgcgctgagcgaatgtactctgttcgcactgggtgtgcagcccgccatcaacgcctccatcattatgcagctgctggcagtagccattccgtatctggaaaacctcaccaaggaaggtgaggaggggcagcgcaagatgcgccgcatcaccaactatgttggcgcgggcatcggtttgatgctgtccatcggctactacttcatcatccgcaatatgggcgctctgtcctacacggagggctttgcgggcatcttcagcgcggtcgtcatcgttctgtccttcacggcaggctctcagctctgcacttggatgggcaaccagatcgacaccaagggtatcggcaacggtatctcgctgatgatcttcgcaggcatcgtggcccgctggtccagcatctacactgctacgaccaacattctggcccgcgcccagaacggtgagccgttcttctacatcatgctgcccctgctggtcgttctggctctggtcgctgtggtcttcgtcgtcgtcctgacgaacgcggagcgccgcatccccgtccagtacgccaagcgcgtggtcggccgcaagatgtacggcggtcaggcaagctacatccccatcaaggtgaatatgaccggcgttatgcccatcatctttgcttcgacgctgtgcagcctgccgggactgattttccggttcatcaatctggatgcagcttcgcatccggcgctgtacgctttcttcagcgtattcaactacaacagcgcgctttacctcatcgtttatgtgctgctgatcgttgcgttcaactacttctacgttgcgatccagtataaccccgtggacattgccaaccagctccgtaaaaacaacggcaccatccccggcatccgtccgggcaagcccaccagcgatttcatcacgaagaccctgtccaagatcactctgatcggcgcgatcttcttggctatcgtggctggcttccccatcatcctcggcaacatcaccggcacctccatccagctgggtggtactacgctgctgatcgtcgtaggcgtggcgcttgagacgggtcgttctctggaaggctatatgaccgcccgttaccacaaagggttcttggaataagagaaagggaatgtgcgatgaaactgatccttttgggcgcccccggcgccggcaagggaactcaggcagagatcctctgcgataagctgggcatcccgaccatttccaccggcaacattctgcgtgcagccgttaaggaaggcacgccgatgggcaaaaaggcaaaaagttttatggacgccggtgctctggtgcccgatgatgtcatcgtcggcatcgtgaaggagcgcctggctgagcctgactgcgcaaagggctttatccttgacggtatgccccgcacgatcgctcagggcgaagctctggagcagatgggcgtggagatcgacaaggtcgtgaacctcatcgttgaggatgaggcgatcacccgccgcatgtccggccgccgcgtttgcgcaaaatgcggtgccagctatcacatcgtaaacaaacccagcgccaaagagggcgtttgtgaccgctgcggcggtgagctggccatccgcaaggatgacgagcccgccaccgtactggaccgcttaaaggcttaccatgagcagaccgagccgctggtagcattctaccgtgagcgcggtaagctggtggaggtgcccgatcagggttccattgaggccaccacggcgttccttctcaagcttttggaggcttaatcatccatgatccaaatcaaaaatgctgccgagctgcagaaaatgcgcaaggcctgtgccatcagcgcagcagccctgaaggccggcggcgaagcgatcgaacccggtatcactaccgctgagatcgacaaaatcatctatgactttatcgtgcgccacggtgcaaggcccaacttcctgcacctgtacggctttccggccacggcgtgcatcagcgtgaatgacacggtcattcacggtatccccacaaggcagcagcagatccgccccggcgacatcgtttcgatcgacaccggctgcaagatcgacggcttcaacggcgacaatgcctgcacctacgggtgcggcaagctcgacctcgaggcccagcggctgctggatgttacgaaggagagcctgcatcgcggcatcgagatggcgcgcggcggcaaccgggtaggggatatcggccacgcagtacagtcctatgtcgaggagaacggcttctcggtcgtccgcagctttgtcggccacggtgtcggcaaggagctgcatgaggaccccgaagtcccgaacttcggcaacgccgggcgcggtccgcgtctggtgccgggtatgtgcatcgcagtcgagccgatggtgtgccagtacaagtacgcggtaaagacactgaaggacggctggacggtcaaaacgtgtgacggcggcctggcagctcactttgagcataccatggcgatcactacggccggtgccgaggtcctgacctacggctgggaggaacccggatggactttgtaagaggccagctggtccgctccaaggccggtcgggataagacccgcacactggctgttctggctgtggatggaccgatgcttctggttgctgacggggacctgcgcaagctggacaaccccaaacgcaaaaagatgcagcatgttgcacctacgaccaccgttcttgagaacgagcttctgaaaagcgatcaacaactcagggatgcgatccgcgcgtatgacgcggcgcggaactgacggaacccttcaaggaggcaatcagcttgtctaaagaagatgtcatcgaagtagaaggtatcgttcgggaggccatgcccaacactgtgttcaaggttgaactcctcaacaaagagggtaagcccaatggccatgtggttatggctcacatttccggcaagctgcggaccaacttcatccgcatcctgcccggcgacaaggtcacgatggaaatgtccccctacgacctgaccaaagcccggatcacctggcgttccaaataagaagcgccttgtgttataaaggaggttaacatcatgaaggtaaaaccttccgtgaaacccatttgcgagaagtgcaaggtcattaagcgcaaaggccgcgtaatgatcatctgcgccaatccgaagcataagcagcgtcagggctaaaggtccgcggagcattccgcggaaaccgtacccaaaacgcttgggggccaagtgcgtagattcccggcgcaggccccgaccaggacatgggatgttactaatggaggtgctttatggcacgtattgctggtgttgatctgcctcgcgagaagcggatcgaggttggtctgacttatgtttacggcatcggccagtccactgccgacgagattctcgccggtaccggaattaaccctgatacccgcgtcaaggatctgaccgctgatgaagaggccaagatccgcgactatatcgacaaaaacaacatcatggtagagggcgacctgcgccgtaatgtcgcgcttgacatcaagcgtctgaccgagatccagtgctaccgtggtgtgcgccatcgcaagggtcttccctgccgcggccagcgcactaagaccaatgcgcgtacctgcaaaggtcccaagcgcactgtcgctaacaaaaagaagtaaggaggaactgagacatggctgctaacaaagcatctgcggcaaaaacccgcactaagaaaaaggagcgcaagaatatcagcgccggtgctgctcacatccagagcacctttaacaacaccatcgtgaccatcaccgatacccagggcaacaccgtttcctggtgcagcactggtgcgctgaacttccgtggctcccgcaagagcactccttacgctgcgcagagcgctgctgaggtcgctgccaaggccgccatcgagcatggcatgaagaccgttgaggtctacgttaagggccccggttccggccgtgagagcgctatccgcgccctgcaggcaaccggcctggaggtcaccatgatccgtgatgtgacccccatcccgcacaatggctgccgcccgcccaaacgccgccgcgtttgattgaaaggagaacatgagatatggctaagaatacccaacctatcgctaagcgctgccgtgctctcggcatttctcctgctgttatgggttatggcaagaagaccaccaatcgtaaccccggcggccagatgagaaagaagaagagcgagtacgccacccagctcaacgagaagcagaaggtcaagttcgtctacggtatcctggagaaccagttccatacctactacgagaaggccacccgtatgccgggtcagaccggcgtgaacctgctggttctggtcgagcgccgtctcgacaacgtcgtctaccgtctgggctttgccaagacccgccgcgacgcccgccagctggtttcccacaatcacttcactgtcaatggcaagcgtgtcaacatcccctcttatcaggttaagccgggcgatgtgatcgaagtcatcgagtccagccgttcttccgtcaagttcagcaagctgctgggcgaggaagctcctgtcgttctgctgccttcttggctggagcgcgacaagaacgccctgaagggcaccgtcaccaagctgcccgttcgtgaggacattgatgtgcccatcgctgagcacctcatcgtcgagttgtactccaagtaatcctcttaactgttttctacgatttttccaaccgaaccagcgctctcgggcgctggcttaacaaggagggtttttatgatggagatcgaacgccccaagatcgaaacggctgccctttccccggatggccgttacggtaagttcgttgtcgagccccttgagcgcggctttggcacgactttgggcaacagcttgcgtcgtgtgcttctgtcctctctgcccggtgtggctgtcaccagcgtcaagattgacggcgtggtgcacgagttcactaccatcgagggcgtgcgtgaggatgtcaccgagatcgtcctgaacctcaagggtgtcgctgccaagatctacggcgaagcccccaagaccgtccgcgtcgaggccgttggcccctgcgaggtcactgccggcaccatcaagggcggcgatgatctggagatcctgaaccccgagtggcacatcgccaccttgggtgagggtgccaagctggtcatggagctgacctttgacaagggccgcggctatgttcccgctgagcgcaacaagcaggccctgatcgagaagagcgacatcagcaccctgcccgtggacagcatctatacccccgtcctcaaggtcaactacacggtcgatcgtacccgtgtaggccagatcaccgacttcgataagctgattatggaagtttggactgacggcacctgcaatgcgcaggaggccctgagcctggcagcccgcgtactgacggagcacctgaacctgttcgtgaacctctgcgatgagaccggcgagaccgaaatcatggtagataacgaagatcagggccgtgagaaggcactcgagatgacgattgaagagctggacctgagcgtccgctctttcaactgcctcaagcgtgccggcatcaacacggttggtgacctcatcggtaagagcgaggatgagatgatgaaggtccgcaatctgggccgcaagtctctggaagaggtcatggcaaagctggacagccttggtttctctctgaccaaggaagacgaaaactaaccccccgcgacacgcggattctattgataaggagtgaatcgaaatgcccggtacccgtaaactcggtcgtgccaccgacagccgcaacgctatgctgcgcgctatggtgacctacctgtttgagaacggcaaaatcgagaccaccgttacccgcgccaaggaagttcgttccatggcagagaagatggtcaccctcggtaagcaggacgatctgcacgcaaagcgtcaggtcttctcctacatcaccaaggaagatattgccaagaaggtcatcgatgagatcggccccaagtatgctgaccgcaacggcggctacacccgcatctacaagatcggaccccgtcgcggcgatgctgccgagatggctatcatcgagctggtctgattagtcagataacttgatacaaagacaccgcttgccgtaaggtaagcggtgtcttttgttgcgagttgtaatgtgacaatttactgctttatcaaatatccaagcgggccggaaccgttcatacgcggcatcggatactcatcattctcgggataaatgacaaagaatcccaataattcaccggagtcattatgacattcaaaataaggggtaaattctcttccgttgcgggtattatataagaagttgaagagaggattcgttgtaaacttgaattcggaaatctcgtcgatatttatttcataactattactttttatatacggatcatggtgacctgcatacaaagttgcataaaatgaatctccggaagtatggtcaatatttaaatatgtaaagttattttttgatgtttcatcaagcgcccagttcccaaccagtccggattcattcagttgaatcgtataatcgcccgaggaaatatcagaaaggttccacccatcaagagtataattaaatattgctaaacaatcacgatatacgttgaaacactgagtatttgcaacgagagttatattcgcatttgcagtatctgaggaaggctcactgctaatattgcactcatcaatatgcatagtacaagtgtctgtgaatttaccagcctgcttgataccctgcgcagactcgacaattttatctgatagaagtgaaatatcttcataagataatacggccttgggcttgatttcctcagaagttggcgtgacactggttatattccatgttttatcaattaattcaccccatatatcataggtggcggtataagtgctatctgcattctctgcattcactgtgacggttacgctttcagtcttttcctttttatcgtaatttcgggatggaaaggaaagttcctgaatcgcaagattatagtcagagtagatatttgtagaatcttgtatagcagttttgatagtggcatcaggaattttatttgatgcaccacacccgcttaataaagcagaaacagtaatgctacatagtattacaatagaagttcgatttctcatttccgtcctcttttcattgaatcagtccttggtgtacgttacactttcgccatcttttgacaatgtgattttatttccgtttttagaaaagtcataggcttccgagatagcacccaaatagaaacggagctttccgtcctcaattttatatgtaatgccaagggcatcgttataatcgcaatctccgtcgctttcaaagttcagcgttttgggaaaattgtatgtcgatacatcggctgtatagtgtccgttcagcgttttggttccactgcacccgacaagaccgacaagcaaaagagccgcaagtgacgaggaaattgccgcttttacatttttgcaaatcatgataacctccacaaataaatactaaaagtgcgaataacgcgctcacaacaactaaagtatatatttacgcgacaataaagtcaatagtctgttcaaaggcggaaagaatatttatagactatatctataaataggggtgatactttgaacaatatgacgaaagaactgggaaaacggattcgcacagaacgcatagacaaaaaaatgacacaggaagaattggcagagcgtgcgggcttgcacccaacttacatcgggcaggtagaacgcggagagaagagcctgacgattaccagccttgaaaaaattgtggaggggctgggaatctctttttctgatttgtttgagaatattcagccaccgacaaagccgaccagctttgcgatgcgatgctatgataaaatcaacagttacccgcaggaaaagcaaaagcagttttacgaattactttgcgcagttgaaaaattgatgcagtaatgaccggcagcggtggggcacagagggagcagccgcattttatagggggcatcctgcggaaaaatgcgccgtttagtcaatgctttgttccttctttgcaaagaaggaaccgaagaaattccaaaattagataaaaacacagttttacacaaatttgacagcataccctttgcgttgtgcgcatatttatgctataatatctaaaatgtgctattgcacataaatctaataaagaaagagttgatagttccccaatggacgatggcagtatatttatgatcgtcgcactgataatcctgatcggtttgtctgcgtttttctcggcggcagagacagcgtacaattcgctgaatgagatccgcctgcggagcaaggcggaggacggtgacgccaaagcggcgcatacgctcgcactggtcgagcgctacgacagcctgctcagcaccattctgatcggtaacaacattgtgaatatcggtgcgtcctctcttgccaccgtgctgtttacccgccttgtcggcggtgtttacggccctaccgtctcgacgatcgtcatgaccctgctggtcctgacctttggcgagattacccccaagagcatggccaaggaaatgcccgaaacgctagccatgagctttgcccccgtgctcagtgcgctggtcacgatttttacaccgctgaacgccctgttcggtgcgtggaaaaagttccttgccaagcggtttgacaccggagagaaggacaccatcacagaaggtgaactggtgaccatggtcagcgaagccgagaaggacggcgagctgacgaaccgtgaaagtgagctgatccgcagcgccatcgagtttgacgatgtggaggcgcaggatgtgcttaccccccgcgtggatgtagtggctgtcgaggatgataccccgatggacgaggtcattgagcgcttcgccgagagcggctactcccgcctgccggtctaccatgacaccatcgacaatatcattggcgtggtacatgaaaaggactgctttgcggccctgcagaagcacgacaaaaatgtcaagctggaggaccttgtcggcccgacgctgtacacgaccagcgttacccagatttccgcgctgctgcgtaccctgcgtgagagcaagcatcatatggccgttgtggtcgatgaatacggcggcacggccggcatcatcacgctggaggatattctggaggaactggtcggcgagatctgggacgagcatgacgatgtggtcgaggatgtgcgccagcagtccgatggcagctggctgatctccggcagcgccagcgtggacgacacagccgaggagttgggcatcaaggaggatgacgacattgatgccgtggccatcggcggtctggtgcaggaaaagctcagccgtctgcccaaggtaggggataagttcatctggggcgactttgacggtactgtcacccgcgcgaccaaccgccgcgtgcaggaggtccgcctgatcccccgcaaggtccaggacgagaacgaaaagtaaataccgatagataatcagcgcccgccgagggataaaacctcggcgggcactgttttttattgtataggcagaaaccatgtaggggccgatgctcgtcatcggcccgcgggaacggtatatcagtcgcaaggctctgcggggtgggggcaccccgccctacatataacggaaaaatcggatgtggggcggcctgccctcaggccgccgtgcagtgcggtgattacggtacagctccgcggacaaaccatgttcgctcctacaggcattgccccatagttttccccctaaagaaaaacttcaaatttcaatttgcaaactttttgtaaaatccgccagaattttttgcaagtaacaccgcaaagcatgtctaaaccgcggaaaatggcgaaaatgttgaaattcttgccttgcagggctgattttatccgtctgctgtgctacaatatgaataaatgggttcttgtggtctgccacactgccctgatgaaaaaagtaataccagatggaagtaaggagtacctgtaatggctgaacagaatcttggcccgcgtgatttctttgccaaggaggatgcgatcgccgatctcggtctgattgcctgccccggtgcagaggagctttgcaaactcgtagacagtcaccttgtgcgctgggcgcgtgaggtcggcaatgaggaggtcgataccttcatcattccctgcgactgcccgcgtttccagtccggcgatgcgaaaggccttgtcaaggcgtccacccgcggtgacgacctgtacatcttcgtcgatccgggcaactacagcgtcacctacaagctcttcgggtatgagaaccacctctccccggacgaccacttccagaacctgatgcgcattattcaggctgtctccggccgtgcccaccgcatcagcgttatcatgcccagcctgtacggcggccgccagcatcgccgcgtcagccgcgagagtctggactgcgccttctccctgcagcagctgcgcgcggtcggcgtcaagaacatcatcacctttgacgcccatgacccccgcgtcatgaacgccgtgcccaccatgagcttcgacaatgtcatgcccacctatcaggtgctcaagtgcctgctgcatcatgtgccggatgtttccttccacaaggataacttcatgatcgtctctcctgatgagggcgccatgaaccgcaacatgtactactccagcgtgctgggctgcaacctcggcatgttctacaagcgccgcgactacagccgtgtggtcaacggccgcaaccccatcgtggcgcatgagtatctgggcgagagcgttgagggcaaggatgtctttatcgctgacgacatcatcgcctccggcgagtcgatgctcgacatcggctatgagctgaagatgcgcggtgcccgcaacatctttacctgctgcaccttcccgctcttcactgctggccttgacaagttcgacaaggcctacaatgacggcatcatcaaggctgtgctgggcacgaacctgacctaccgcaagccggaactgctggagcgcgagtggtactatgatgtcgatgtctccaagtacaccgcctacttcatcgccgccatcaaccatgacaagagcgtttcctccatcatcgacccgatgaccaagatccgcacgctgcttgacaagcatggtatccctatgggcggccagcagtaagcgcaaaataaattccgattcggtccgccttggcgggccgaattttgttgcagaactacggcgttttgtatataataacataaagcattaccatgcaagccccgcccggcgggcggagcgccgcagtattgctgcagaaaaaatgcaggggagagatatttatgctgccgatcgaacagctgcagaatcttatcaagggcaaaaaggttgcctttatcggtgcgggcgtcagccacaagcgctgcattgaacagtttgtggagttgggcgcgcaggtcacgctctgcgatcagaaaaagtcccttgaggatttcggcgcgtatgcacacacgctgcgccgcctgcatgtccgcctgagtctgggcgagcattatactgacggctttgccgggcaggatatcatcatgcgcacaccgggctacgaatattacaagcccgagctgcaggctgccctgcaggccggcacaaaagtcaccagcgaggtcgagcttttctttgagctttgcccctgcgagatcgtggccgtgaccggctcggacggcaagaccacgaccacaacgctgatctccaagatgtttgaggctgccggccgcaaggtgtttctcggcggcaacatcggcgctgcgctgttgccccagctggcggatgtgacccccgaggcggtcgccgttgtcgagctgtcgagcttccagctgatcagcatgcgcgtcagccccaaggtggcggttgtcaccaatgtgacccccaaccatctggaccaccataaggatatgcaggagtacattgacgccaagcggaacattctgctgtggcaggtgccgccctgccgcgccgtgctgggctttgaaaacgagatctcgcgcggtatgcagaaggactgcaagggcgagcaggtctggtttacccgcctgcatgagacagacaagggcgccttcctgcgggagagcgatgacaccctttgctatgcggagaacggtgtcgtgacgccgatcctgccccgggctgaggtcaagctgcgcggcctgcacaatgtcgagaacctgctggccgccatcgccgccgtctggggccgtgtgccggtcgaggccatgcgtcaggtcggctccaccttcaccggcgtggagcatcgcattgagccggtccgcacgctggacggcgtgacctattacaacgattccatcgcgtccagcccaacgcgcacgatcgccggtctgcgcagcttcaaccagaaaatcattctgattgcaggcggctatgacaagaagatcccctatgagccgctcgcgcccgagattctggcccatgtcaagacgctggtgctgatgggcgcgaccggcccccgcatcgaggcggctgtccgcggatgtgcgggctttgacgagagcgcgctgaccatcctgcacgcggacagcatgcagcacgcggtcgagctggcgcgcggtgccgcccggcccggggatgtggtcagcctttcgcctgcatccgcatcctttgatttgtacccgaattttgaggtcagaggacgggattataagaatatcgtcaacagcctgaaatgatgactacagcctgacccggccccctcgcagggaggtaagagaggtccctccatgattcaatccgtctccactgcggaacataaaaccgaatacctgcgccgcctgtccggcaagccttactttgaggcagtcctcggcacgcatctgcggctgttcgggcagcacccggccagcgggtgggctttctatctgctgcccggcacggcggtgctggagctgcgcggcggcagcgctgtggtatgcggtgcgctgcccggcggcagtgcaggggaggacgcccgcgaggaactggccggctttctgcggtttctctgcgccgaccggctgcgcaccgagcagccccttgcgttggcaggctggcagcccgccgcaccgctgactttgtgggagttgccgcagggcagtgcattgccgctgccgcctgcgtacccggcggagctggtgcgggacacagtgccctctatgctgccggtcagccgtctggtctttgccgagaatgacgccgaggccgatgagttctactccacggcctgcacggcgctggcccacggcgtgggggtgtgccatgccctgctgcaggacggccgccccgtctgcacagtcggctgctatgagcagagcgacaccgaaagctatatggcggcgggcgtgaccgacccggcctggcggggcaggggactggcccggcggctgatcgttgagatggcaaacgcgctggccgccgaccacacggtgcgctttgcctgtgagcagacgctgtgcggcttttatgagcagcttggatttgtacaaaacggcaaaataaactattatactacagattggaatatgcgatgatcgaacaattctacgacctgcgccccgaggtgctggcgctggaccgcaaggccctttccctctgccgcgagcagtttgcccatgtggaggagatccgcgactacaaccagctcaagatgctgcgtgcctttaccgaaagcggcgttgaggcacggcacttctgggggtcgagcggctacggcgtctgggacgacagccgcaataagctggaagaggtctttgcccgctgcatgggggcggaggcagcgctggtgcgcccgcagttcatgagcggcacccacaccttgacggtcgcgctttttggcctgctgcgcacgggggacaccctgctggctgcgaccggccgcccctacgacacgctggagggcgtgatcggcatcggcgaggcgggcaagggctgcggcaccctgcgggagtacggcgtcaggtatgacgaatgcccgctgctgccggacttcacccccgactacgacctgattgccgagaaggccaagaccgccacggtggtgcatatccagcgcagccgcggctacacccagcgcaatgcgtttgatctggacactatccgaaaggtagccgacatcgcccgcaaggccaaccccaacgcagtcatctttgtggacaactgctatggtgagttcacccagactgcggagccggtcgccttcggcgcagacattatggcgggcagcttcatcaaaaatccgggcggcggtatcaccccgaccggcggctacattgcaggccgccgcgatttggtggaaaaatgcagccaccgcttcaccgcgcccggcatcggcggcgatctgggctgcacgcaggacagcctgcgggataccttcctcggcttctactacgccccgggcgttgtctgcgaggcgctgaaaacggcgatctacgcccagtgtctgctggagctggcgggcgtcaaccctgtgccgcgctacacggccgaccacaatgacattgtcacctgctttgactcgggcagtgccgccgcgctgaccggcttctgcgcgggcatccagcacaacagcccggtggacagctttgccagccccgagcccgccgatgagccgggctacaccgacaaggtcgtcatggccagcggcagctttaccgagggcagcacgatcgagatctcctgcgacggtccgctgcgcgcgccctacacctgctatctgcagggcggcgtcaactttaccgccggccgcgccgccgtcctcaacgccgtgcagaacgcgtttttcgcggggtaagaaggcttcccccgagggggaagctgtcagcggctccgaccgctgactgatgaggggcaggtttgccattataacccctaaacgggaaaccacggcaaactcgcccctcatccggccctgcggggccaccttccccctctgggggaaggcttataggctgcatacaaaaatctcccgcgtatcgctggatacgcgggagcttttttgaaatcctgatttttagtgcttcacaaaatcacgcacaagcgcctgcagcaggtcatcacggtcgatgcggcggatgatggcgcgggcgttcttgtaggtcgtgatgtaggtcgggtcctccgacagaatgtagccgacaagctgattgatggggttgtagcccttctcctccagcgcacggtacacctgcagcaccgcctgcttgatctccatatcacggtcatcacggatggaaaatacagcggtaggctcagagatcggcatgtcaaaactcccccttgttaagatattactagccctattatactcaatatgcgtcaaatttgcaatacggaaaccgagaaattttatacagaaatccaagaaatgtggtctgtctgcgcggacagacttttgcattttgcagcagagtgtgctataatactcacaaaatgtccgtaaaggagatacagccatgaagttttccgagatgccctatcagcgccctgatctggacgcggtaaagcagcagttcgctgacctctgcgcgcggctcaaggccgccgaaagctacgccgaggcgcgcgcggtattcctcgaggaggagaagctcaacaagcatgtggacacgcaggcccagcttgcgagtgtgcgcaacacaatcgacacccgcgacaccttctacgatgaggagatgaatttctggaacgaggcgacgcctcagctgcaggagtgccagaacgcatggagccgcgccatgctcgattcgccgttccgcgcggattttgccgctgagtacggcgacctgatgtttgtcaacgccgagatcgccgacaaagctttttcgcccgcgatccttgacgagatggcgcaggagaacaagctctgcaccgactacggcaagctgatcgccagcgcccagatcccctttgagggcggcgtctacacgctgagccagctttccccgttcaagaacgaccccgatgatgcccgccgtctggctgcatggaaggcagagggcgcatggtataaggagcatcaggccgagtttgacggcatttatgacaagctcgtccacctgcgcgatacgatgggcaggaagcttgggtacgagggctacactacgctgggctactaccgcatgggccgcaactgctacaccaaggcagatattgaaaagttccgtgcagccgttgtcaaatatctggtgccgctggcggacagcatctaccgggagcaggcccgccgccttggcaagcagtacccgatgaacatggcggacaacgccctgatgttccgcagcggcaaccccaagccggcgggcgatgccgatgcgatcctgcggcagggcaaaaaattctatgaggagctttcccccgagaccggcgagttcttcaacaaaatgctggacaatgagctgatggatgtgctgtccacccccggcaaggcgggcggcggctactgcaccggtctgggcgattatgagatgcccttcatctttgccaacttcaacggcacccagcacgatgtggaggtcgtgacccatgaggccggccatgcctttgccgcctatatgaaccgcgaccgcatcccgtactcctatgtatggcccagcatggaggcctgcgaggtccactcgatgtcgatggagttcttcgcttggccgtgggcggacggtttcttcggccaggatgcccgcaagttccgctacagccatctggccggggcgctgaccttcatcccctacggcacgatggttgaccacttccagcacattgtctatgagaagcccgacatgaccccggaggagcgccatgctgagtggaaaaagctggccgccatctaccagccgtggatgcgtctggacggcgagatcccgttctacggtgcgggtgagtactggcagcgccagatgcatatctaccagagccccttctactatatcgactactgtctggcgcagaccgtcagcctgcaattctgggctatgctgcagaaggactgcgccgatgcatgggcgcactatatggcctacacaaagcagggcggcagccgtacttttaccgagctgctgaaccatgccgggctgaccaccccctttgaggaaagctgcctgcgcggcgtctgcgaggccgccaagcagtggctggacggctatgacctgacggggcttgtctgatggcggggcgcaaaaataagcacgcctacctcgatgactttgaaaaggatctgaacggcaactaccagtaccgcggcgcactttaccgctatgcggggacaccctcccgcggcagggcgctggccgtgctgtggctgtgctgcggcggcggtgcggcgcttgcagtgggcgcgggcgtgctgcccggcgctacggcccatgccccggtctggctgctgctgccctatatggcggcgcttataacggcgctgtatgcagtggtcgtgctggcgcgcctgacgcgcggcggcgacccgatgcgggcctatatccatgagcagaccgcacagaaattgcccactctcacgcgggcgtgcgcgctgttcgccgtgctggctgcggcagggcaggggagtgttgtgtttgcaaacggcgcacaaatgcttttgggtgcgcatggcatttttatactgcttgaaattttttcagctgccgcttttgccgccgctgctgcgttttcccggcggatgcgttgggaaaaagagtaatatttatacaactgtatatgcacgatttgaaatgcgtcccacttggcggtgggacgcattttttcttaccgtcacctgcagcggcgggcaaatacggtgtttgaacagagcaaaaaaagctccttttgcggcaggggcgtgcccagggcgggagagtgcctaaaatttttttctgaatttcgtcaaaaggtacaaaagtgtaatttactgttgactttttgtcaattttggggtattctaaagactaagtcactgtcgacaagtgtgcgctgtaaaggaacaggcagcacagaagggttttcgcctttctcgccttacgctcttggggagcagagggacgatttgtggatagggcaaaatataggaggttttacacatgaaaaacaccaagcaagtcattgcactggcatctgctgccgcactcagcgtcagcgtgctggctggctgcggcggtgctgcgtccgacgcgaccagcgagagcaccagtactgctactgccgaagcatccaacacggccgcttctgatggcaccctcgttctggcagagaccggctttgagggcaagttcagccccttctttgcttcctctgcttccgaccaggatgtcattgacctgacccagctgggcctgctgggcgctgaccgtaagggtgaaatgatcctgaacggcatcgagggtgagacccgcgagtacaacggcaccgactacacctactacggcacctctgactgcgttgtcaccgagaatgacgacggcaccgtcacctatgatatcaagctgcgcgacgacctgaagttctctgacggcgagcctgtcaccatcgacgacgtcatcttctcgatgtatgttttcctcgatcctacgtatgacggctctgtaaccatgtactccacccccattgttggtctggaggagtaccgcaattctatgtccaccctgtccaagctgatcgctgaggccggcgaggacaacaccgactacaccaacttcaccgaagaacagcagaaggctttctgggatgctgtcaatgacggcggcgtgaagtttgcccaggagatcgttgactatatgatggccaacggtgctaccgatgttgcctccgctgctgccggctggggctttgacctgcccgacggcgctgatgcgaaggccttcttcctggctatcggcgagcagtacgactggagcttctccgctatggaggctgagtccgccggttctgccctgtctgagctgatccccgaggatgtctacgcatactccaccaccggtgtcaatgtcggcaatgcagttgccaacgttgccggtatcgtcaagaccggtgattacagcatgacgctgaccaccagcgagctgtccaccaccatgatctaccagctgcagatgcccattgcccccctgcactactacggcgatgagagcctgtacgactacgacaacaactcctttggctttgtcaagggcgatctgagcggcgtccgctccaagaccagcgctcctctgggcgggggtatgttcaccttctccaagtacagcgacggcgttgtctacctggatgccaaccccgactacttcaacggcgcaccgaaggttgcccacgtcaacatgaaggagacccaggaggccgataagatcaccggcgttcaggccggcaccatcgacatctccgatccttcctactctctggaggttgctgaccagatcgccgacatcaacggcgtcgagggtgaggacggccccgtcatcaccacccgtctaaaggattaccgcggctacggctacatcgccctgagcgccaagaacgtcaacgttggcggcgaccctgcctcccaggcctccaaggatctgcgcaaggccatcatgaccgtcatcgccgcttaccgtgatgagggcatcgactcctactacggcgataccgctaccgtcatcaactaccccatgtccaacacttcctgggctgctccctccgtcaccgacgacggctaccagatcgcctactccaccgatgtggacggcaacgagatctacacctccgacatgaagagcgaggacaagtacaccgccgctctgcaggctgccctgggctactttgaggctgccggttacaccgtcgagaacggccagatcacggctgcccccgccggtgccaagatggagtatcaggtcaacatcggtgcttccggcaatggtgaccacccctccttccagaccctgaccaacgctgctgccgccctcaagaccatcggcttcaccctgactgtcaacgatatggccaacgcttctgacctgttcgcttcctatcagtccggcgctgccgagggctgggtcgctgcctggcagtccaccaatgaccccgatatgttccagctgtaccacagccagggcgctaccaactactacgccatcaacgatgccgacctggatgagctgatcatggctgcccgccagactaccgaccaggaggcccgcaaggccatgtacaaagaggctatggagatcatcctggattggggtgtcgagctgcccgtctaccagcgcagcgaggctaccatcttctccaccgagcgtgtcaacatcgacaccatcgcgaaggatcagaccccgtactggacctacaagtctgagctgaacaacctcgagctgaactaagttcagcttaccgttgtgaaagcaggtgaccgcccgccaagggcggttgcttgctgtcaaggcatgggcggaccaatgcccacccgcggggcgtcgaggacgccgccccctacaactgctaatatggtcgtcccactcccacgcagtgtttgcgcgctgcgtgggatggggatgcccacattacggcatttccctgcaaaataaacgcggtctaaccgtgcaaggaaggaacgaaaactcttgcgaaattacatcatcaagcgtatcgcgcagtcggtattgatcctgttctgtgtcatgttcattatctacgcgctgatccgcagcctgcccagctcctttgccgagacgatggcaatgcagctggcccaggcccccggtgccaaaccctatgaggaatggctggcccagctcaatgcggcctacggccttgacctggacattatccccggcttcttcacctggctgagcaaggccgttgtcggcaacttcggcgacagctggaagtggaacgtgcccgccacccagaaattcaccgaggtcatcggcctgtctgtcatcatgggcggcatctcctttgtgctgtccatcgtgatcgccgtgcccctcggcgtgctggctgccaccaagcagtacagccgcacggactacgtcatcacggctgcggcgctggtcggtatttcgctgcccaccttcttctttgctacgctgctcaagctgctgttctcggtcaagctcggctggttcgatctgtacggcctcgtcggccgtgactatgcccagctggatgccatgggccagttccttgacaaggccaaccatctggtgctgcccatcgcaacgctggtcatcgtctccatcggcggctatatgcgctacacccgcacgaatatgctggaagtgctgaacgcggactacatccgcactgcccgcgccaagggcctgtcggagcatacggtcatctacaagcacgccttccgcaacacgctgattccccttgtcaccatcatcggcggcagcctgcccggcctgttcagcggtgcccttatcaccgagacgctgttctccatccccggcatcggctatatttcctaccagtccatggtcgcaggcgacatccccttcacgatgttctacctgtccttcatggcggtgctgacgctggccagcaacctgctgaccgatatcctgtacggcgtggttgacccgcgcgtgcgcatttcttaaagaaaggagactgcacacccatgagcgaaaacacgcagaaccagaacccgaagcaggagcagtactccctgaacgatgaccgccgcgtcaaggttttgtctcccggcgcactggtcgccaagcggttcttccgcaaccgtctggccgtcgtcggtctgtccatcctgattgcaatgttcctgttctccttcgtcggcggccttgtcagcccctacggccaggacgagcagttcttcacctacacccagatgtccaaggagttcgtcggcgtcacccgcaacgacacgatgcgttttgtcgtggccgacggccagaacttcggttccatcgcccagagcaaggccctcgaagccgtgaagaagggcagcaccgagttcaactataaggatactgactacaccgtcgatatccagagcgacgacttctatgtcgtctaccagggcagcgacgtcatgggctatgccagccgcgaccttgtcaacgaggccgacggtgcgccgaagttcagctttgacatcaagctggccgccctgactgccatgacggcaggggagagcgacttcaccgccgacggcgtggactacacgctgaacaaggacggcgagatcgccgccaatggcgagcagctgggttatgtcagccgctttgtcgtctccgccgccgattccagcgtcgtcgttacccgcgatttcaaggatcgcctggaagaggccatcaacgagaacgccgataagttcaactacaccgacgccgaggggaacgaggccgagtacgatatcgtctacgatgcctccaccaaagtttggtccgtcaagcagatgaccgagacttatgtctacgaccgctacgccagccccagcaaggcgcattggctgggcaccgacaccaacggtatggatatgctgacccgcctgatgtacggcggccgcgtctcgctgatcatcggcttcatcgtcgttgtcatcgaggcatccctgggtatcctgatgggcggtatctccggctacttcggcggctgggtcgataacatcattatgcgtgtcgtcgatgttttctactgcatcccttcgatgccggtcatcatcatcatcggcgcggccatggacgccatgcgcgtggattcctggaaacgtatgctgtacctgatgctgattctcggcttcctgggctggccgagcattgcccgccttgtccgcggccagatcctctctctgcgtgagcaggagttcatgatggccaccgaggcctgcggcatcaaggtctggcaccgcattttccgccacctgatccccaatgttatcccgcagctgatcgttacctgcacgatgggcctgggctccaccatcctgaccgaggccaccctgtccttcctgggtctgggcgtcaagtatccgttcgcctcttggggcaacattatcaacgatgtcaacaacgcctacgttatgacgaactacctgttcatctggatccccgccggtatctgcctgctgctgaccgttctgggcttcaactttgtgggtgacggtctgcgcgacgcctttgaccccaagatgaaacgctgatcgaaaggagaaacacacgatggctaagaaacaggaagggtatctttccgctaaagaatcgcggcgtatctccaaggaaaaccgccgcatcaccgaccggtacgaaaagcagcgcaagcgccgcaatgtgccggagagtgagtatgtcaccgaaatgcacgatgcgaagaacgcggtcgagtttgacaacctgcacacctacttcttcaccgacaccggtgttgtcaagagcgtggacggcgtctcgtttgaggtgcccatcggcaagaccgtgggtgttgtcggcgagtccggctgtggcaagtccgtcaccagcctgtccctgatgcagctgctgcagcgcccgcagggccagatcgtcgagggcgctatccgcctgaatctgggcgatggcaaggcctacgatattgccaagacccccaccgaaaagatgcagggtctgcgcggcaactatgtttcgatgatctttcaggagccgatgaccagcctgaatcccgtgttccgcatcggtgcccagattgatgaggtcattgcgctgcatgagggtgagggcaagagcaaggaggacatcaaaaagcgcacgatcgagatgctcgagatggtcggcattgccaacagcgagggtgtctatacgatgttcccgcatgagctgtccggcggtatgcgtcagcgcgtcatgatcgccatggcgctggcctgcaaccccaagatcatcattgcggatgagccgaccacggcgcttgatgtgacgattcaggcccagattctggatctgctgcgcaacctgaaggaccgcatcaactcgtccatcatgctcatcacccatgacctcggcgttattgcggagatggccgactatgttgttgtcatgtacgcaggccgcgtggtggagaagggcaccgtggaggagatcttcaccaaccccagccacccctataccatcggtctgatggcctccaagccggttgtcggcaaaaaggtcgatcgcctctactccatccccggcaaggtgcccaacccggtcaacatgccggactactgctacttcaaggaccgctgcgagctgcagctgccctgctgcgccggcgagtacccctgcgagatcagcctgtccccgacacacaaggtcagctgctatcgctattatgaagaaaacagaaaggcgggtgagtgacgcatggcaaaagaaaagatgctgcccgagaacgattacacccccgtcacctacgaccctcagtatattctgatggtcaatcacctcaagaagtatttccccatcaagggcggcctgctgtcccagaccgtggggcatgtcaaggctgttgacggcgtcacctttaacctgcgccgcggctgcacgatgggtctggtcggcgagtccggctgcggcaagtccacgaccggccgcaccatcctgcgtctgggcggtgaaaagacgggcggacaggtgcttttcaacggcaaggaggtctacgatatgacccccgccgagatgcgcaccctgcgcaccaagatgcagatcatctttcaggatccgttctccagcctgtcgccgcgtctgccggtcggcgagatcatcggcgaggctgtgcgtgagcacaatctcgtcccgaaggcagagttcaacgattatattgatcaggtcatggatgactgcggcctgcagccctaccacaagacccgctacccgcacgagttctccggcggtcagcgccagcgtatctgcatcgcccgtgccctcgccctgaacccggagttcgtggtctgtgacgagccggtctccgcactggatgtttcgattcaggcccagatcatcaacctgctgaaaagcctgcaggagaagcgcaacctgacctacctgttcatctcccatgacctgagcgttgtcgagcacatctccgacacggtcggtgtcatgtacttgggcaatctggtcgagtacggcgaaaccgatgacatctttgcccacccgctgcacccctacaccaaggcgctgttctcggccatccccattccggacccgaccatacgccgcgagcgtattgtgctgcagggctccattccgtccccggccaacccgccgtccggctgcaagttccatacccgctgcccctacgccaccgagcgctgccgcaccgaggcacccaagcagcgtgaggctgagccgggccattatgtggtctgccacctgtacgacaaatgaaaaagcatgaaccctttgaggacgatgggcataccatcgccgatatgagcggcatcggccatgcgccgatgctgcgcccccaccgccgaagggcggcgggccagacgccggagccgtccaatgaccgcccatgggagcaggagacggaatggaccgccaaggaaaagctctgggcggttctgggcgtgctgaaagccaccctgctcatcgccggggtctatctggccgggctgggcgtgctgctggctgcgctctttctgctgtggaaataaacctaaaagtaaaggcatgtacgaccgagaaggttgtacatgccttttgctgcatattgccccttttgaatagctgcaggggccgcagcaaaacaaaaaccgctcaaagccttgcggcttcaagcggtcttggtgcgcctgcaggaactcgaatcctggaccctctgattaaaagtcagatgctctaccaactgagctacaggcacatttattgcgctgtgcgaatcacagctttaatattatagcagtcacgctgcaaattgtcaatatggttggcaaaagattttgccggaatttgctcgtctttgccgcaagccacttgccaaacacgccgcggcgcggtataatacatatttagaaaactataaccgtaaaggggactggaaatatggaaactttgggcagcctgcgccgcaccaactactgcggtgaagtcagccttgcaatggctggtcaggaaatgacggtctgcggctcgatcgcccgtgcccgcgacaagggcggcatcatctttgccgacctgcgcgataccaccggcatcctgcagctggtgttcgatgaggacacgccgaaggaggtctttgccaaggccgagagcctcaagagcgaatatgttgtcatctgccgcggcaagctgcgtgagcgcgccgccaagaccgataagatcgccaccggcgatgtggagctgtatgttgccgatctgcgcatcctgagcgaggcccagaccaccccgtttgagctgcgcgatgagatcaatgtcaatgacgatctgcgcctgcgctaccgctaccttgacctgcgccgtccgtccatgcacgagccgatcgtgctgcgcagcaggatcatgcagatcatccgcaactatttctgcgaaaatcactttaccgagatcgagaccccgaccctcatcaagtccacgccggagggtgcgcgcgactatctggtgcccagccgtgtgcagccgggccacttctatgcactgccccagagcccgcagctgtacaagcagattttgatgctgtccggctttgaccgctatttccagattgcccgctgctaccgcgacgaggacctgcgcgccgaccgccagcccgagtttactcaggtggacgaggagatgagctttgtctccgaggacgatatcatgaccatcaacgagggtctgatcaagcgcctgtggaaggaaatgctcgatgtcgatgtcgagacgcccttctaccgtatgccgtggaacgaggctatgggccgcttcggctccgacaagcccgacacccgcttcgggctggagattcaggatgtgaccgaggtgttcaagggcactgagttcaagcccttcgctgcagtgctggaggccggcggcagcatccgtgctatcaacgccaagggcatggccgacaagctgagccgcaagaacatcgacaagctgggcgaggtcgccaagacctacggcgccaagggtctggcctacagccgcctgaccgcagaaggcacctcctccagctttgaaaagttcctgaccgatgccgagaaggctgccctttatgcagcgctgaacgccgagaccggcgatgtgctgctgatcgtcagcgatgccgactgggtcaaggcctgcactgcgctgggtcaggtccgtctggacattgcccgcaagcacggcctgatcgaccccgacaagttcaacttcctgtgggtggtggacttcccgctgtttgagtacagcgagcaggagggccgctggatggcgatgcaccacccgttcaccctgcccaaggccgaggatctcgacaaggtcgagagcgaccccggcgcctgccacgccgtagcctacgacattgttttgaacggtgtcgagatgggcggcggctcgatgcgtatcaacgaccccgccctgcaggatcgtatgttccgcgctctcggctttaccgaggagaaagcccgcgagagcttcggcttcctgatggatgcctacaagttcggcgcacccccgcacggcggtatggcctacggtctggaccgcatggtcatgctgatgctcaagaaggattccatccgcgatgtgatcgccttcccgaaggtgcagaatgccggtgagccgatgagcggcgcccccgatgtggtggacgcccagcaactgagcgacctgagcattgccctgacgctgaaggactaaggcagaagtaattgcgctgtaggggccggacatgtccggcccgcagcctgcccgcaggattcccttttgcgggtaggtgcagggcgaggcatgcctcgcccctacatggcagcaaaaatatacgcccgaccgtattttgtgcggtcgggcgtttttgtgttatctcaatatttcggcttcggttcctcgccctgctttaccgggtactccgcagcgggcggcggggtctggatgggcttgggtgccttgggggctttcggatggcgcttgcgccagaagcgcagggccgcaaggaccgcgatggcgatcagcaccaccggccacaggtagaccagcgcaatgaccagcccctgcacgaatccaacgaaggcgtcccagccgccgccgaacgcatcggcaatgcgctcggtgaaggtcacgccggtcggggtcagggtgacgacctcctccagatagatgtctacggtcgagtagctgacctgctggtccatgttgtgcagctggcgggtgtagttctccagctcgtactgcacatcggaaagctggctctcgatttccagcagatctgccgttgtctcggcctgatcggccagttcgttcaggcgggtgcgctgggcctccagcgcggtaagccgggcctgtacatcaatgtagctgcttgtgatgttctcggcgttctcgctgacattgcgcacgctgcctgcctcgcctacggcagccagaaacgcgcggtagttgtccaccggcacccgcacggtgtagtcggcgctgcggtcgtgatccttttcggtgccgtaaacgctggcagactccatccatgcatcgttggcctcgaccgcagccatcagggtttcgcgggcagcgtcaaagtcggtggattccatcgacaggctggcgttgtagatgattttctacgcggtctcatcggtggcagcctcggcggcgttggcgggcatcaggctgctgtccgccccgcctgcggcgctgtcgtaaatgccgctttcctgcgcggcagcctcggcggcgtagtaaccgccttcgttgctgctggtgctgccgcagcccgccagcagtgcagcggcggccagcgcagcggtgatacgggtgatgcgctttttcatgtggatgctcctttcctttgtaaaggcttcccccaagggggaagtcactttgtatttcccttttcaccaatataacacggaaaatgcgcgttgtgtgttacaaaccaaatacaaaaaagtgggatgtgccgtaattttggcacatcccacaaatttttggatgattattcggccttctgcccaagctgcttgacatcctcattgtcggcaaaggcaacggcgttgaaaccggcggcctccagcgtgccgaactgcttgcccagctttttggcctgaggcagcacggtcacatcatagtcggcgcgcagctgctctgccttggccagtacggcggcaaagtcggcgtccttgaggtagagcagcgccatcttcggctttgcaccggggatctgatagccctgctccagcagaatgccgcagacgcgctcaaagccgatggagaagcccacggccgggacctgctggccgatgaacttgcccaccatattgtcgtagcggccgccgcctgccacggcaccgctgaactgcgggcaggtgacctcaaacaccatgccggtgtagtagccctgaccgcggacgaggctgggggcgtaggcgatggcgtaacggtcaccggccacgcgctcactggcggccatgacataccgcaggtcggcggtcagtgcctcgtcatcgacacgggcggccacagcgtccagactgaaatcaccggcgcgcaggaaatcgtccagcgcctgcacggccgaggcggcaaagcccttctcggtcagctcggccttgacgccgtcggcgccgatcttgtccatcttgtcaaagctgatgcagaccgagtcaagctggtcggcagcaaagcccatcttctccagcatggcgcgcaggatgcggcggtcattgatgttgatcgtaaagccggtgaagccgatcttcagcagggcgcgggcggtcacatcaatcagttcgacctccgcattgggggaggagtcgcccagaatgtcgatgtcgcactggacgaactcgcgcagacggcccttttgggggcgctcggcacggtagacacggtcggtctggatgaccttgaagggattcggcagctcgttgcggttggccgcataatagcgggaaagcggcagcgtcaggtcgtagcgcaagcccatgtcggacagctgcttttcatcgccgctggccagcgcatgctccagcttgtcgccgcgcttgaggaccttgaagatcagattcaggttgtcgccgccctcgctcttgtcgaggttctccatatcctccagaatgggggtggagatgcgctggaacccggcggcgcggtaggtggccagaatctggccttggatatagtcacgcagtgcctgctcccgcgggagcaggtcgcgcataccttttaaaggctgagttttcatggtggttctccttacactgtataatggcttcccctgagggggaagctgtcaccgagggtgactggtgaggggcaaaccttgccattgcaacccgtaaacgggcaatgatggcaaagccgcccctcatccggcctcgggcggggcctcggccaccttccccctcggggggaaggctctttgcttttatatactttataatgataccttttgcgccgcattttgtcaatccaaaccgggcatactagactgaaaaggggaggggatgcgtgtgccgaaacagaatcgcgggccgtacattcttgctgcgggggcggcggcgcagctgctgaccggcataccggcggcgtggggcgtctttcagcaaccggttatgcaggggtacggcttctcacgcgggcaggccatgctgggctttgcggtgctggtggcggcctacggtgtgggctgtgccgtgggcggccttctgcaggacgcctgcggcccgcgcccggccgggctgtggggcacggtgctgctggcaggcggcttttttgcggctgcgcttgtaccgcctgccaacgcagcgctgtttcttgtcgtctacagcctgcctgcggggctgggcagcgcatttttggccccggcggtgctggcctgcgcccaaaagtggtatcaggacaaaaagggctgggccaccggcgtggcaggggtggcaatggggctgtccggtgcattttttaccctgttcgtcaagggcgtcggcgggcggtggggcatccgcgtctgctttgccgcgctgggggcggtcatgctggttgtctgcggcgcgggtgcgctgattctggaaaacccgcctgcaacggccaaagaaaaaacgcagccggggctggactacaagcagatgctgcgcacaccgcagtataagctctgtgcggcagcggtggcgctgtcggctccggcggtgctgctgttcagcccggaaatattcaagatcgccgccgagcgcggcctgccggagagcgccgcgccctacagcatcgtgctgggctcagctgccagcgcggcggggcggatgctgctgcccgccgtcagcgacaagctgggccgcaagccggtgctgtatgccgtgtatatcggccttgcggcgggcagtgcgtggtttgcctttgcgcaggcgtggtggctgttggcggcctacgctttgctgacctttttctactctggcggcgcggcagtgcagccctcctttaatacagaccttttcgggctggcgcacgcgggtgtcaactacggcttcatcgcgctcggcatgagcggcggcagcatcctgagctatatcggcgcgcaggcgctgccgctggcggcacgccactggctggccggtgcctgtgccgcaggggggctggtttgtgtcagtcttgtaaaacctgtggagaatggttgaaaaaatcgtgggcacggggtaaaataggacagcggctgtaggggcgaacatcgttcgcccgtggccgtgtgcggcaaaggaaaagtgcccgggcggatatggaatccgcccctacggcgtaggggtcggcgtcctcgacgacccgcggaagcttccgccgccgcaaagctcctgcgggcgagcaatgctcgcccctacaaagcatatcatctacgatccgagaggtttcacctatgacccaatcccaacaactgcgcaagctggcagcgcagtcggccacggcgtttctggtggctgcgctctgcgcattcccgctttatatcgacaaattctccaatctcggcgttgtcaagttcaccgccgtctgtaccctgtgctgggcgttcgtcctctggctgggggcgctgcgggcagtcggggcggcgccgcagcccggccgtctgccgtggcggcaggatacagcgctttgggcgctgggggctgtcacggtcagcggcgtggtgtccacggcactgtcgttctcgcctgcggcgtccttctgggggctgggcggctactacggcggctgcatgatggtacttttcacggcggcggggtatctggcggtgcgcgcctttgcaccgcagggccttctgaacggcctgatcttcggcgtcggtgtgaccacggccatcgtcacagtgctgtatgtgctgaacatattcaatatcgatcttatcggtacctatgccgacacggcagtggtggagcgtgcgcagttcttttcgacattggggcagaaaaatttctgctccggctttatggcgtttgcgctgccgctggtattctacgcctttttggtggcgcgcggcgtgcggcacacgatcctgtacggtattccggccttcttcggcggtctggcgctcgcagtggtcgatgccgagggccttgcgctgggcatcggcgcagcggtgctggtgctgctctgccagaggatgttcaccacccgcacgctgcggcggctggcggtcatcggcgggttcttcttcttccacgcggggtggatgcagtacatgcgcacccatgtctacacgcagggcggcaagccaatgctggcggcgctgggccatgtggggcagaccgggtttgtgctctgccttatcctttgggcggcactgcggttcggcttgcgcgggcgggagataccgctgtacaggccggggcgctgcgtggcggcggtagtcgtggtcacggcggcggtgctggttttactggcaaacctctggcccggctttccaagcctcggccggttggacgaggtgctgatcttcaacgacgactggggcacctaccgcggcacggcatggcggatcacggcggcaagctggctggagcagccgctctggcgcaagctgctcggggtcggccccggcatgatgcacacggcggtggcaaactgggccggggcggacatcaccgaccggatgaagaccttttatgctgcgcacaatgagtatctcgagctgctgctgaccaccggtgttgtggggctggcagcgtggctgtggtttgtggcggcgcacctgcgcagggcggcgcagaactggctgcgccccggtgtggccccggtcacgctggcgctcgtcagctatctggcccacgcggccatctcgatccgcgtttcgatgatcttccctgagatcatgctgctgttcgcgcttttgcaggtgttctgcctgccgccggaggaggctgctgcgcaggaaaaaccggcaaggcacgccaaaaagcagaaggctgccgccccggcggagcagcccggactggtgcggcagtggctgccgccgattgcggcgggcattgcaatgatggcggtctgcggcgcagcctcgcgggtgatctttggttttttgttttgagtttagataaggcagagcggaggaaaactttcgctctgtttttttgtgggcggcagcgggcagggggcaaagcccctccggcctcgttacactcggccacctccccactgcgtgaggaggctttctcgcgggcgaagcccgcgcatagaggctcctcgctatgcggggagctggccgagcctgcgaggcctgaggggctttgccgcactgctgcagtgtgcagcgttacccacggcatctgtcacaaaaccatgcccatccgccgcgcggtatgctgcccggctgcagaaaatgccaaaaaacaaaaggttaggaaaaactaacatcttgaaaaacacaattcgaccctttataataaagatagctgtgaaaagcctaacaatatgcaaaggagagaaaattatgatcgaatactccgcacaggtcaacgctatgtgcccgatcacaaaaggacccaagcacggtcccgcgcccatccccgaagagggccagtgggtcaaggcgtataaaattgaggatatcagcggctacacccatggtgtgggctggtgtgctccccagcagggtacctgcaagctgagcctgaacatcaagaacggcatcatcgaggaggccctcgttgagaccatcggctgctccggcatgacccactccgccgctatggctggtgagatcctgcccggcaagaccattctggaggctctgaacaccgacctcgtctgcgatgctatcaatgtcgccatgcgtgagctgttcctgcagatcgtctacggccgcagccagaccgctttctctgagaacggcctgcctgtcggcgctggtctggatgacctgggcaagggcctgcgttccatgaccggtaccattttctccaccaaggccaagggcgtccgttatctggagctgaccgagggctacatcctcaagaccgctctggacaaggacaatcaggtcatcggctatcagttcgtccgtctgggcaagatgatggaggacatccgtcacggcaaggacccgaaggaagcctacgagaagaacatcggcacctacggccgcttctctgccgagcagggcgctgtcaagtacatcgacccgcgtgaagaataagagagggaggaacatagattatggcaacttttgaatcccagaatcgccgtatgcccaagatcgaggcctgcctgaaggccaacggtctcgagagcctcgacgcctgcaacgagatgctgctggccaagggcatcgactgcgataagatcatccgcggcattcagcccatctgcttcgacaacgctgtctgggcatacaccctcggcaccgccatcgccgtcaagcgcggcctgaagagcgctgctgactgcgccgccgccatcggcgagggcctcgaggccttcaccatccccggctctgtcgctgagcagcgcaaggtcggtctgggccacggcaacctcggcgctatgctgctgcatgaggacacccattgcttcgccttcctcgccggccacgagtccttcgccgccgctgagggcgctatcggcattgcccgtaccgccaacaaggtccgcaaggagcccctgcgcgtcatcctgaacggcctcggcaaggacgctgcccagatcatcagccgtatcaacggcttcacctatgtcaagaccgactatgacttcgccaccggcgagctgaaggtcgttgagaccatcccttactccgacggcgagcgcgctgctgtcaagtgctacggcgccaacgacgttctggagggtgtcgccatcatgaaggccgagggtgttgaggtttccatcaccggtaactccaccaaccccacccgcttccagcatctggttgccggcacctacaagaagtgggccatcgagaacggcaagaagtacttctccgtcgcttccggcggcggcacgggccgtaccctgcaccccgacaacgtcgctgcaggccccgcttcctatggtctgaccgactccatgggccgtatgcacggtgatgcccagttcgctggctcctcctccgtcccggctcacgtcgagatgatgggtctgatcggcgccggaaacaacccgatggtcggcatgactgtcgcctgtgctgttgctgcttctcaggctaacgcttgatttgaactgaaccattaggcttttcgccgcccgctccgcaatggagcgggcggtttttgtgtttgaaaggcttcccccttggggggaagctgtcagcggctccgcccgctgactgatgaggggcgacggtccggcagctgcacatgagtgggctgctgccgcagcaccgcccctttagggcaccatcccccgcaggggaagccttttttgcgcttttctcttgctttacgccgccctatgtcatataataaagtcgagtatatgtaaatttttacttgggagaaatcaccaatgcccaaaattgacatcgacaactacatagagcagagcggtatgcgcaaggcgcgcttcggcgggtatgagccggacgatgtccgtcaggcaatgcgggagctttgtgccgagtatgagcagcaccttgcagcgacggccgccgagctgcgcaccgtccggcaggagaatgacgccctgcgccgtcatgcccagacccttgtgatgcagaaccagaacctttcggcccaaaatgcaacgctggccgggcaggtggacaagctgcagagctaccgcaccaatctggaaacgcagtattccaccgcgaaggagcgcaaccactcgctgacgaaccagctggatgtgctgcgcctgaaaaacagcgaccttgtgcgggaaaacaaggagctgaccgagcagtgtgaggaggcaaactctgcgctgcgggtcaaaggccgcgcccatgatcaggcccgccagcaggtcattgcggaccgcgataaggtcattgccgaggccgagggcgatgccgcgcgcatccgccagcaggcccgggacgatgccgacaagatcctcaaggatacgaacctaaaggccgaggccatcgaccagctggcgcgcgagcaggccattgcgcaggcgcgcaagatggtccaatccgccaccgatgaaacacgggagatccagaacgcccaccggctgcggctgcaggacctcaagagccgcatcaccgagatggaaaagacccgcggcgagatgatggactaccttgcaaaaatgatcgaggaactgcaaaaaacgcaggactacgccagccagagtgcgccgctcgtcccccatacggaggatctggccgaggctgatgccgagccgaagctcgatctgtcggccaacaaggtcgatgcggcagcctcggcgctgcgcggcagcgagccggagccgcagcccgcgcccgcagacccggatacgaaccgtgtggtggcccccggctttgacgatgccgagccgaggacgaacaccatcatcacgccgtcaccggattattttgataccgaccccaaggaacagcccggcgacccgcatgaggaggtcgagatccccggtgcgatcttctcctacccgatcctgcgccagcagggggaaccgattctggacgaggaaaccccgccccagccggtgccccacaagccggtaatgcccagctttacactggcggatgaggaggaaccggatgacgcgctgcccgcgcccgctgcggcaccgggcaagccgcagtccaagcgccgccgcaaggctgtgatggccctgcgcgcgctgaacagaaagatcggtgtataagaccttgccgcacgattcccgctggggctgcggcggggccgcaagaggagcaggaggcaaccatgagaccgcataagctcggcatctgcgcagcgctggcactgatgctggcattgctctgcgcattcggcgcggcggcggacaccaccgttggcatgaccggtgccgggactttccggatggagcaggcctatgtcaatgtgccggagctggatgtctatttctatgcgctggacggggacggcaacccctattcctcgatcaaggtgcaggcggccggccctgaactgacactgggggaccgcaggctggaggtgcgctctgtcgcagtggccagcgacccgatctgctatatccttgcgctggacaacagcgccgacctgcccgctgcggacttttacacgatgctgggcggcgtgcgcaagctggtaaacgcaatggacgcggacgaccagcttatgctctacacaacggccggtacggccgagtgtgtgctgcccgcaacctccgacaaagcgctgatgtacaaggcgctgggtgccgtgcagcaggccgagggccgtatggatgccgcccagctggtgtcggcggtctacaccgacatacaaagtgattttcaggcgctggccccgcgcaaggctgcgatgatcgtgaccgatgccgggcaggtgctgacgaatatggcgctggtcggcacgctggccagcgatttcggggatcagatcggcatggccgcctatatctatttaatgaccgaaaagccccagctttttgagacgctgcagcaggcgtccggcggcaggctgattctctgtgaggcggccgggctgggggatgagctgaaggcaaagcatgcctattttgccacggcgcttgagatacgcaccgaggtacctgaaagcctgtacggcgagcggctggagacgctgacgctcgccatgccgcagctgggcagcgctatccgcagcgcccagacagtctacatgggccacaagctggctaagcctcaggtcaccggggtggaaacgctgcgccgcgaccagctgcgactgaccttcaaccagccgatcaacgagaatgccgacaagacccagctgtatgagatacgctccaaggatatatggaactggcgtgtcggcgtccactcggtcaaaatcggggaggacggccgcacggcggtgctgcagatcgacccgctgtacaagggcgaatataccgttgcgctgaaccgggtatccagccggatgagcgccgccaatgtcagcagcagccgcaatacaaccgccttccgggtggtcgtctggccgcgggacagggagttctattttgcgcggttccgggtgccgctcgtgctcggcgcgctgctgctgctgacgctctgcggcagctggtgggcggtgcgccgccgcgaccgtgctgccgagcaggaggcggaggctgagcatctgctggccggggccggggcgccggacgccctgccgcgccgctgggtcacgctgttctggagccagcgctcctccattgccgagagccgctgggccggcatggtcgagagcagcctcatcatcggcagcgatgccgcccaatgcgatttttgtctgccggaccgcaagctttgcccgcagcactgcgccctctcggtgcagggagattcgctgctggtgcagcccctgacggatcgtgccagagtctatgtcaacggtgagcgcatagacggcgagcatcggctgcagaataacgatacgctgcgcatcggaaagacgacgctgcggctggttttgtaggggcggatgccgagcatcgccccccctgcaatcttccgtgcagccgcgcaccgccccaaaggagttatatagtatgaagctatccaaatgtgcaaacggccacttttatgacagcgacaaataccctgagtgcccctactgcaacacggatctgctgaaggatcacgccatcgtccatgagggcgaggccgagccgccgactgccgctgcgcaggcggccgccccggcggggccggtgacaggctggcttgtggtgctggacgggcccgcacggggccgcgacctgcgccttggcgttggccgcagctttctcgggctggatgacgccggaacgccaatcaccctgagcgccgatgcccccctgagtgcccggcaggccgtagtcgtctacgatgccgagaaaaacagctttgtgctgctgcccggctcctcgcaggagctgtgctacctcggggaggaggctgtccttgcgccctgcccgctgaccggcggcgaaacgctccgcctcggcggtgcagcgcttacctttgtgccgctctgcggcggcgcattccactggtaagggggcgcgccatgacaagtgagatcgtcattttgatcaccgaactgcgcaacaagcagcgcattacgctgcctgccggtgcctatcggttcggccgcagtgcgcagtgtgagtatgtgctgcgccgcaacagtgtcggcgaccaccagtttaccgtctcctatgaaaaggatggctgggtcgtgacggacggcgccagtgactaccgcacatggtacaacaaccgctatcttgagccgggggagaccagtgtgctgcaggcgggggatgtcatcgggctgaacaccgatggcaactccgacacgcaggagatcaccttccgcgtggaggagatcaccaatgtgcagggtgacggcgcggccccaataaaagaacagaccaccgaggccgtcctgcgcgaggtggatatacgccgcaaaaaacgggtgctgatcggccgcggggatgactgcgacatcaagctggtcagcgaccgcgtctcccgccatcactgcgaggtcttgtacaaggacggccactatgagctgcacgacctcggctccaccaacggcacctatctggatggggtgcgggtcagccgtgccgtgctgcgcaatggggcggtcatcaatgtgcctgcgcaggtttttgcctttacgggcgggatgctgcactaccacgcccaccagagcggcatcagtatccagcttgtaaatgtgtacaaaacggtaaaaaatgccaataccggcaagccgctcaacattgtggacggcacaagctttcaggtcgagccgaacagctttgtggtgctggtcggtggctccggcaccggcaagtcgagccttttgacctgcatcaccggcacggccccctgcacggcgggcagcgtccggtttgacgggctggacacaggctccaaccgcaacgcctttgaggcggcgctgggctatgtgccgcagaaggacatcatgcacgacagcctgaccgtggagcaaagcctgacctacacggccaagctgcgcatcgcccacgatgctacccgggccgagatcgccgccgccgtggcccacgccatcgaggcggtggacctgcagggacgggaaaaaacctacatatccaagctgtccggcgggcagaagaagcgcgtttccattgcgatggagctgctggccaacccgcggctgctgattctggacgagccgacaagcggactttcccccgatttggaccgcagtatgatggagctttgccgccgcctgagccaccagaactgcacggtgctgatggtcacccacaacatgtccaacatcaacctctgcgataagatagcctttctgggcgtgggcggcgtgctgtgctactacggcgcgcccgagcagctgaacgattactttgatgtggagatgaccagcgatatttttgaaaagctgcgggatgccgagcaggtcgagctttaccgcagaaaatactttacgacccccgagtttaaccgcctgctggcggcctgcccggaggcggcgcaggaggcggacaagcgatgcagccagtaaaaatcttgaaattcctgcgccagcttggcgtgctggtgcagcgcaacctgcagctgatctggaacgacaagctgctgcttgccagtctggcgctgcaatcgccgtttatggtgctggtcatcaagctgacagccgaccccaactgctttacctccaaccttgtcaacatcggcagccgcacggcgctttttattctggcggcgatggcaacctttatgggcacgctcaactcctaccgcgagatctgtaaggagcgcgagatcatcctgcgcgaggcctcggtcggggtcagcctgccggcggtcgtgctgagcaaggcagtggtcctttttctgattgagatcctgcagtcggtcattctggcgatgggctttgtggccatcgtccatgtgccgcagaaccatctgctgctggagaccgacatcgagatcttcgtcacgctgctgctgacgatgttctcctcaagctgcgtgggactgctgatctcggcgcttttcagcaatggcgaaagcgcgattctggcggtgctggtgctgatgatcggtcaggttgtattcagcaatgtcatgttcaccgtgaccggcgcagcggcaacgatctccaccgtcattgtctgccgttggggtatgggcgcactgggtgcctccaccgatctgaacagccgcatggcatggctgcaggccgggctggacggccccatgtatgacgccacggtcgagaatctgacccactcctggcagatgctggggttgatttcactggtcagccttgtggcggcgtggctggtgctgcaaatcgcgtttgataagaagaaggtgtgaggggcagagggtaggggccgcacatgtgcggcccgcggccttcctgcaagcgcccgttagccttacacggcagggccgggcatgcccggcccctacatacatacaaaacagccgcccgggttttccacaaacccgggcggctttgttgataaaatattacgcctttttgattttttccttggcattggcggcagcggtggcggcggtttccttggcattggcagccagctcgcgcaggcgcaccatggcggcgcgggtcgcggttagcgcctcggcgtagttcaggctcttcatgccggggaaggcgcgcagcaggcggcgcgcaccgatgtggtcatgctcggcagcggtcagcttgtcgcgcaggtcgctgacacgggccgtgacctcggcgcgcagctcggcggcgttctcgcggccctccagctttgccagcgccagctgcagcttttgctcatccagcacggcatcggcggtcatggcaccggtgcccagcacagtggtcagcttgtcgctggtcacgcgcaggcgggcgcgcagctcgtcaatctcccgcaggtacttgttcaggccgatggcggcggcggtcgagaccccgacatccaccgcaaagataagaaacagcacaaggtcgaggatcagcatgaccttaaacggcatcggattggagccgcgggccagcaggggatgaaagaccttgatcatcagtacactgcccagcccccacagcagagagaactgcgggcagatatagccgcccagattgaatttcatgttggagtaatcccaccagcggatgtggtagatcttgaacagcgcccatccgccgaccagctcgatggcggtggtcagcgccatgccgatgaaaaagacggccacggcgctcaggctgccgctgtccggcagcggtatcaggttgacgctgtagaccagccccaccatgccgaagccgtagatcgggcagatcggcccgcagagaaagccgcggttgacgagcgcatgggttttgacggcagcgtagacgacctcaacgccccagccgaggaacccgtacaggaagaaccagtacactgtcttgacggcgagctcagtcagattcatcttccgcctcctgctgtctggccagcgcctttggctcgacccaggtcacgctgctgtcggggcccttgcgggcaatcagcgccttgatggggatgccctgctcgctgaacatgccctcatgctcggtgcgcaggttccagtccggctcatccttgtgcagatcaaaggtctgccatgtgatctcaaacccggcggcggggaagtaggccagactgtcccggaacaggtcgtcgtcatcggtcttgaaccagatctcggcaccctcgtccatcaggcggcgatactgcaaaagctggcgcgggtgggtcaggcggtgcttgttgctgccggcgttcttgctccacggattgcagaaattgatgtagatgcgcgaaacgcgatcctccggcgtgaaggcgttgcccagccgctcaatgtccagactggcaatctttacattgtcggcaggcaggccgcgctcagcgtaggcggcctcgaccttgcgcttggcgaggatcagcaccttgtcggtgatgtcgatgcccagatagttgatgtcggggtgggccggtgcgatctgggcgagaaagccgcccttgccgcagcccagctcaaggtgccacggctggtcgggccgggcgtacagctcatgccagtggccgccgttggccagaggctcgtgaacatggaaatcgcaggccagcagctccggccgggcatagggtttgaaacgcatgcgcatggtaggtgtctccttatatggtagtagagtaagggcttccccctccgggggaagctgtcaccgaaggtgactgatgaggggagagtccgccgtattgtccgccgccgggcagtctcggaagctctgccctcatccggcctcggtcggggcctcggccaccttcagtctccgcgccaagagccgccttcggcggttgtgctccgacacgcgcctgcgggcgcagcccctccggggaaggcttttaacaaaaacgcttttacctgttcaaagctgccgtctgccagactgccctgacagaaggcgggcttgccgccgccgcggccttgaaatgccgtgttcagcgccttgcaggtctcgcgcagatcaccgcccggggcggcagccaaagcgtaggcaaggccctgcccgccgggggccagtgtgcagcagggggcgccggttttggcggtaatgctcatcgccacgcggcgcagcccgtcaccgtctgcgccgtccacccacagcaccgccggtgcgccgggtacggctgcggcggcgtaggcatcggccaaggtgttctgcagggcggccagccgggccttgagcgcggcctcacctgcctgtaggcgcgcaagcgccggggtcagtgtgccgaccggggcggagagcagccggccggcagcctcggcatccgcccagcaggctgccgcagcgtcataggcgcgctgcccgaaggccacagccagccgcataccagtcttgtagtgggcgtaagagatgatcttgatcagcccgacctcgccggtgcgggcaaggtgggtgccgcagcaggcgcagcggtcgccgccggcctcaaccagccgcacagggccctccagcgcctttttgctgcggtactcggtgcaggccagcgcctcggggtcgggcacccagcagcgcaccggcgtgtcggcccgcacggcggcgttggcctcggcctccgcctcggccagctgcgcagcggtcagcgggatgctggtgtccatccgcacataggggctgccgatgtggaagccgacattctccgccccaaaaagccggtgcagcgtgccgctcaggatatgctcgccggtgtgctgctgcatcgcatccagccgggccgcccagttcaggcagccggttacctcggtgccctcgggcagcggggcatcggtcgtgtgggtcacggtctcgccgtctgtggataccgccagtacccgggcaccgcccagcgtgccggtgtcgcagggctggccgcctccttcagggaaaaaggccgtgcggtccagcacaacggcaaagccgcccggggcggggctgcattgcagcacccgggcggtaaagctttggacataagaatctgtttcgtatattttttgtgtcacgaaccggagttcctttcaaatttttgggatttttcttattataacataaaacaggtgtagaaaaaaactgccttatcctatataataaaggatagactgaatttttacaaccacttatgaggaaaaccattcaatgcatattatgaaatctgcggcgctggtgcttccggcgctgctgctggcgggctgctcgctggctgatgtaaaaacggcagtgatgtctgttgaaaataccgctacgatcgagacggcacccaccgccgccccccagacgctgacggtgtatgcctcggacgcactggccccggcggcccgtgcctatgccgaggcgcagggcgtgacgctgacgatgactgcggatgccgccgcagcagatctgctgctgaccgaccatgcccccggcggtagcttgctggatgtcacaagtgacacgctgctggcggcggctgccgcccgggcggacattaccgagaacgccagcaccctgccgcttgggcgcagcctgtacggctactgggccaacggcgcggtgctgaacgcgctgctgggggacggtgctctcacagcgctgcagggcgcagactgggaggaatggagcgactttgtggagacgctctccgcatggctggacgagccgaaggccgcaaccgtcacgctgagcggcagcgactacaccctgcccgaggcacgccccgacggcgtgacggctaccggcgtctttgcagccccggcggaccgggcgtccggctacacggccgcgctgctggctgccgatggcagctgcacggcagacgcgctgacaggcccgctcaacggcgtctacagcgccgtcacgctggagtgggaccacatggccgacagcgctgacaatgcggtgttccgccgcgccaagctgaccgacctgctggcggactgcggcggcgaggcctgcagcgggctggtgctgatacccttcaaatgcaaccttgaggacagcgacctgacgaccgaggagtataatctggatggactgctggattacccggtgctggccgatgtgggctgccttgccctgaacgccgacaccgatgcagccgggctgaaggcggccaagagcgctgcgctgtggctctactccaacggtgcgggcgaggatgccctgaccgagacgcttggcgttgtcacaccgtggaacacggcggctgattcgaccgcagtgctggctatgcagatcgagcaggtaggtaccggcatcctgcccggcgccgtgcttgacgcggccaccgccgaggccctgaccgccaacgagctgagcctgcagggcagcgaaaagcacaccaaggccgagcgcaccgcgtttgtggagggtgcgctggctgcgttgggggcggagtgatcccaagccttcccccgagggacagactcccccggtacgggggaggtggcgcgtagcgccagaaggggagcaggtggccccgcagggccggatgaggggcaactttcccacaacatcccgcttacgggcggccatggtaactcgcccctcatcagtccgcgggcggggccgcggacagcttcccccccgagggggaagccatcgcaacgcaaaccgcacacaacgccgaaaggcgatacatacagagaagaggaaaaacactatggaattcaaacgctgcagtggtattctgatgccgatctccagcctgcccggcgggtacggcatcggcagtctgggtaagcctgcccgcgattttgtggattttctggccggggcctgccagacgatctggcagattttgcccgtaggacccaccggctttgcggatagcccctaccagagctgctccgcctttgcgggcaacccctatttcattgatctggacctgctggccgccgatggtctgctgaccccaaaagactacgcgaacatcaactggggcagcgatgccgccaaggtcgattacggtactctttacgaaaaacggttcgccgtgctgcgcaaggcatacaggcgctttctggccaaccgccctgtgcccggctttgagacaccgtaccccgatgactggtaccgcttccagttcctgagcagcgattggctgcccgactactgcctctacatggccatcaaggaggccaacggcatggtggactggcagcagtggccccgcgccctgcgcgtccgcgaggcggaggcactggccgccttccgcgccgagcacgccgaggagcttgaattctgggcgtttgttcagtatgaatttgaccgccagtggcgcgccctgcacgcctatgccaaggagaagggcatcgccatcatgggtgatatccctatctatgtttcggctgactccgccgatgcgtgggcgggccgcgaattgtttgagactgatgccgagggccgcccccgccgcgtagcaggctgcccgccggactattttgccgaggacggccagctgtggggcaacccgctctacgactgggagtatcaccgcaggaccggctatgcgtggtggatcagccgcgtgcgccatgcactgtccatctatgacatcctgcgcattgaccacttccgcggctttgacacctactgggcgatcccggcaggggagaccacggcccgcaacggccgctgggagcagggcccccgcatggagctgttccgcgcgctgcacaacgctctgggcagcctgcccatcgtggccgaggatctgggcgagatgtttgactcggtccgtgagctgcttgcggagagcggcttccccggcatgaaggtgctgcagttcgcctttaccggcgaggacagcgtggacctgccccacaactacccgcgcaactgtgtggcttaccccggcacccatgacaacaacacgctggccggctggtttggcggggagctgaccgccgcccagcgcaagcaggcaaccgattactttgccctgaccgggcgggagggcaccgtgcgcggcctgctgcgcggtgtgctggccagcgcggcggcgctcgccatcattccgctggcggactggctggaggagcctgccgccagccggatgaacacacccggcaaggcccgtgacaactggcagtggcgcgccaacgcaaagaagctgacccccgcgctggccggtgagatccgcgagctgtcggagagatatttccgaacagcccgataatttgttgacttcgtaggatatttttccgttttggtttgcaatctttgtgcaacgcaagccttggaaaaagggccgcagtgtggtaaaattgtctatgtattatcaaaggctaagatgcactgtgccggcaaccggcagaaggaaacgatatgaaacaggactacaccattgccgagctgcaggcggagatcgccgcgctgcagcagctatttgactgtgttacactggcagacccctgcagagggctgctggacccggcaaccctgcagccgctgggcaaggtggcggcggtgcctgcactggacaccaacggccgcggtatgcggatcatcaaggcggcgtccgggcttgaaaccttgctggctcagggcatccgcgtggagggcacgccctgcgtgctgatgatgcagatgccgctgccccgcggcctcaatacggacggtgacgaggacgcctttacccgcgccctgagccagatgcaggaggacctgcgccgcgaccatgtgaccggtgtctacaacgcggtctacctgaatgaggagttccgcccccgcgccgagcgcgccgccatggacggccagcctgtgggcgttgtgatgctccgcgtcaatgaatattggcagctgcgtgagcatgagagcagcacggccgccgattgctgcctgaatctggccgctggcatcctgcagctggctgtgggccccgaccatgaaaaggccgcgctggcccgcctgaacgatggtttctttgccgtggttacgctgggtacgcccgccgccaaaatggcaaaggtcgtgcgcgaggcgatgaacgactcccgccgggagttcaacatctcgctctcccgccgcggcagcttcaccgtggcgatcgcctcggccgagtggggcgagaccgcctcttgggatatgatgctctccctcgcacagcagcgcctgtgaccgaataaaacaacccccttgtgtacatactggcattgaccgctaaatgtacacaagggggattttgttatgcagagcgataatgaaaagatgctgcaggaaatcgtgcagaacaccgagatgggcaaaaacacactggatgagctgatgggcctgacccatgaccagaagctgaaggacgagatgctgcgccagaagcgggagtaccgccgcctcaatcaggctgcccacacagcgctggacgccattggtgccgaggcgcacggccagagcgccgccgcaaggatgagcgtcagcatgggaatccgcacccggacgatgctggacaaatccacccgcaatctggctacaatgctggccgagggcagcgggcagggcgtgctggactgcaagcgcgccgagaaggactaccccaccgccagccccggggccatgcagctctgccatgagctgggccgcttccaaagcgaggccgagcagacctggcgcggcttcgtgtgaaaaagccttccccctgggggctgcgcccgcaggcgcgtgtcggagcgcaaccgccgaaggcggctcttggcgcggagactgaaggtggccgtaggccggatgaggggcgggcctgccgttacaacccgtttatgggcaataatggcaaacccgcccctcatcagtctgcttcgcagacagcttccccctcggggggaagcctttttgtacttacagcttcaaatccccttccttgatccagccctttttgcgcaggagctcgcagaaaaggacgctcaggacggcgggcaggataaagcagacgagcgccagcccggcccagtcaaaggccgtgatgacccggccgctctcgacccagccggtatagacgccgatctggccgaccagaccgcaggtgcccatgccgcttgacacggcggggccgttcatctcaagatggaacaggcaggtggcgacaggcccggtgatggcggctgccagcgtcggcggaatccatgtgcggggattgcgcaggatgttgggcatctgcagcatgctggtgccaagcccctgactgaccagcccgccgatgccgttctccctgtagctcataacggcaaagccgaccatctgggcgcagcagcccgccacggcggcgccgccggccagcccggtcagccccagcgctgcgcagatggccgcgctcgagatgggcagcgtcagtgccatgccgacgaggacagaaacgagaatgcccatcagcaggggctgcagctcggtggcccacatgatcaggctgcccacggcggacgccgctgcgccgatggccggggcgcacagcgcactgagccctacgccaaccagaatcgtgaccgccggggtgaccagaatatcgaccttggtctccttgcttaccagcttgccgacctcagccgcaacgattgcgataaggtaaacggccagcgggccgcctgcaccgcccagctcattggcggcaccgcccacggcaatcaggctgaacagcacgagctgcggtgcatggagcgcatagccgatggaggcagccatggccgggcctgccacggcagcggcatacccgcccgctgtgacaagaaaagcaagcccggtctgctggcccaaggtcttgatgatcgtgccgataagcaggctggcaaacaggccctgtgccatggcgcccatcgcgtcaatgccgtagcgatgcgccgagatgatgacatccttgcgcttgaaaaaagaacgaagctcttccatttgtactctcctctttccgataataatgaaattttagcattttgcgttggggaatacaaccgctttccctaaaatgcgccgaattgcacagatttattgaaaaagcaagccgaatgcggtacaattaaataaaatatggcaggggagtccggcggcccgctgccttacatactgccgggacggaggttcattgtggccaacaagaaaaagaaaaaacaccccgcacccgctgcgcagcccgcagaaaagcgtgccccggcggattgccccgtacagccgccccgcaccgcgaagctgatgggagcgctctgctacctgaatgtgctgatcctgattcccgcctgcagcaaatggcggcacgatgatttcgtaaaatttcatctgaatcagggccttgtgctgctggcactggcaacggtctgcgcctgtgttgggtttctgccgcacggcagcgagatgggcctgactctgacgctgctggtggacgccctctctctggtagggctggtgcagaccctgcgcggcctgaaaagcccgctgccgggtgtgcgcaatattacgaaaggattccatccgtttgactgaataaggagatgtttgctatgtctaaagctgttatcttttttgcccccggcttggaggagtgcgagggcctgctctgcgtggatattctgcgccgcgccggtgtggaggtgacgattgccgctgtcggcggggagaaaattgtcaagagcgcccgtcaggtcaacattgtggcggatgcgctggcggaggagctggactatacggcgtttgacgcctgcatcctgcccggcggtatccccggtgtgccgaacctcaaggccgatgccacggtcaaaaaggtctgtcaggactttgctgcgggcggcaagctggtggcggctatctgcgcagcgcctacggcactggcggccttcggcgtgctgaacggcaaaaaggcaacggtctaccccggcatggacgctgacctgaccgccgccggggccagctacacgggcctgcccatcacgattgacgagaatattgtcaccggagaggcgctgggggcagccatcccctttgcgctggcgctggcccgtatgctggccggtgcagacgccgccaacaaggtcaagagcgccatcgtataccagtaagacggacaataaaaacagccccggccggcaggtcggggctgttggttttgttatgggtcacttccgtccgcgctgcagctcgatccatgcaaggtcaccgcgctcaaggccgtggatcagcacctcggctgtggcaatgttggtggcaacggggatcgtgtgcatgtcacacaggcgcagcagcatcacatcattcggctcgccgggcttggcgctgaccggatcgcggaaaaagagcagcatgtcgatctcaccgcagccgatcattgcagcaatctgctcggaaccgccgcgcctgcccggatacaggcagcacaccggcagcccggtggcatcgtggacgatcttgccggtcacaccggtggcaaccagttcgttctccgacaaaatgcgcagataggctgtgcagaactgcgccatcaactccttgcgggaatcgtgggcaattattgcgattctcatagctgaactctccctccgtacagccggactgcgactgtacacaaacgtatactatataataatatatatgtacaaaaaatgcaagtgccggacggacaaaaagacccataaaagcggcgctatgccgaaaaccttggcagaatggccaaacgcggctgtgaaattttggtgaaacagcgcgcggtagttgtgctataatggaaaaaacggacagacactgtatgtgattctgtctaaaaggaggatctaccatgaggaaatctgcccaaaccgtcatccgcccggatgcctactatacgattgcagcagccaacggccgcgtgctggaagtggccgatttcaacaccgagaacggtgcctcggtccgtctgtggagctatgagggccagccttggcagcagtggagctttgaggaatcggccgagggtgagtaccgcatcaaaaaccgctttaccggcaaagtcatggatctggctatgtccggcgtcagcaacggcacttgggtacaccagtggagccgcacggctggtgctggtcagcgctggcagatcgttgacgcgggcggcggcagggtcaagctgcgcaatgtgctcgcggataaggtcatcgaccttgtaggtatgcgcgttgacaacggcacgcaggcccagatctggcaggatgtattcggtgagaaccagctttggaggctcgatcctgtgcccgagcggctgctgaataaggaaacgcctgcccccaagcccaaggaggaaccgcggcgcacgacccgcacccagactgagaagaaaacctccggcaaggcggcccggcggacgagtaagaacaagtaagaaaagccttcccctgcgggggaagctttttttgtgggttgcaggcaacgcaaaatgttgttataatagtaaaaaaccgaaaggcagtatgactatgcagtttaccgagcttaccaatgtttcgcccgagatcatccgtgctacgcaggcgatgggctttaccgatatgaccgaaattcaggagaaggccatcccgctgatgctgggcgggcatgatatgatcgccaaggcgcccacaggcaccggcaaaacggtggcgttcggtatccccatcctgtccaaggtggattccgccagcctcaagccgcaggcagttgtgctcagccccacgcgcgagctggcccagcagattgcgcaggatctgcaaaatctggcgcagttcctgccggaaatcaagatcgtctgcgtctacggcggcgcaggcatggataagcagcagcgccagcttaaacagggctgccagatcgttgtggccacaccgggccgcctgatggaccattaccgccaccacgccattgatgtgtcacaggtcaggaccgtggtgttggacgaggctgatgagatgctgaacatgggcttctacaaggatgtgaagtacatcatcgacctgatgaagcaccgcgagagcctgtcgatgttctcggccacgatcagccgcgaggtgctggacatcggctggctgtaccagcacaatgccgccgaggtcagtgtccgccccgttgaggattccagcccgaagatcgcccagtataagctgctgaccaccggccgcgacaagctggcggatgccgcgcagatcatcatctccgagggctacaagcgggtcatgatcttctgcaacaccaagtataacaccggtatgctggccaaccagctggcgcgcctgaactttaatgtggactgcctgcacggcgacctgtcgcaggcggagcgcaaccggatcatgactcggttcaaggccggcgagattgatgtgctggtggccaccgatgtcgcagcccgcggcattgatgtctccgatgtggacgcggtcatcaactacgatgtgcctgaggaaaacgagcattacacccaccgcatcggccgcaccggccgtgcccgcaagcagggcgcaagctaccttttttacacgaaggaggagcagaagcgagtcgagcagctgctgcgcctgacccgcaacaccgatgactgcaagagcgtaaagtttgacttcaaccacgagcatctgaaggtggaggaaaaagcagcggaggataagttccagatcaaggcgtatttttgagaaaggtttccccccttgggggaagctgtccgcggagcggactgatgaggggcaagcttgcccttattgtccgcaaatggattgccatggcggacgcgcaccgacatgcgcccgcggggcgttgaggtctccgcgcctgaaacaaaaagcacctgcctgatttctacacaggcaggtgctttttattagaatttacaggctctcgatcatccgtgcgacgatttccgtcgcggttttgatgtactccgcaatgctgaactgcttgacgaccagaacctcatagccgctctcgtccgcgttgtcgctcatggcgcgcaggatgacgcaggggacattgttgcgcccggcgatctggctgaccgcagcgccctccatctcgacacagtcgggatggcacttttcctcgatggcttttttcgtctcggcatcgcccacaaaggtgtcgccggtggcgatcttgcccgcaatggccttcacgccgcaggccgcgcaggcgtccagcgcggtctgtacaagagcggggtccccgtggtattcggtctggaacggtgcgctttgggcgatcatgctcagctctgcatcatggtaaacgaccgtctcgccgatgcagacatcgccgatgccgatcttgctggtcatgttgccggcaatgccgctgaaaatcagcctgtcaatgcagtattttgtgcaaagcacctgcacggtggaggcggcgttggccttgcccatgcccgcacagcagacaacgacctgcttgccgtgcagggtgccgcggtggtattccaccccggcgtactgctccttggttacatttcccagcctggcacacagctggtccacttcatcgggcatagcgcccataatgccaataatcatcttgcattctcctaaaaaaggcgttatacgggcaattatacattgaagaggaactcgatgacatcgccgtcattcacaacatattccttgccttcggtgcgctgcaggcccttggacttgacggcggcatagttgaaatcggcgtcctcaagatccttgtaggcaatgacctgtgcgcggatgaagccgcgctcaaaatcgctgtgaatcttgccggcggcctgcggggccttggtgccgcgcttgatggtccaagcacggcactcctttttgccgtcagtcaaaaagctgataagacccagcagctcatagctggccttgatgagcttgtccagaccggtggattcaatgcccatttcctgcaggaatgcgattttttcctcctgcgtggagccggcaatgtcctcctcagtcttggcgcagatggggatggcctgcgcattttcctccttggcgcgggcggccaccagcgggaagtagggattctcgtccagcccgccgagcagatcgtcctcgcctacattgcaggcgtagatcacaggcttggcggagagcaggcccagctccttgcggacggccttctgtgcatcgtcaccctcgtcaaagtcgaaggagcgcgccggcttgccgccctcaagccaagaggccagctccgccagccagccggcctccgccgcggcagccttgttgccggttttggcggccttctgctggcggccaaggcggttgctgacgacctccaaatcggccagaatcagctccagatcaatggcgtcaatgtcgcggatggggtcaacgctctcgggcttgttgacatcctccacaacatggatgatgttgtcatcatcaaagcagcgcaccacatggacgatggcatcgcactcgcggatatgccccagaaacttgttgccgaggcccgcgccctgactggcacccttgacaaggccggcaatatcgacaaattcaacaatggcaggggttttcttgtcggtctgccaaatctcagccagcttgtccagccgtgcatcaggcaccggcacaatgccggagttcggctcaatggtgcagaaggggtagttggctgcctgcgcattctgtgtgctggtcagcgcattgaacaaagtcgatttgcccacattgggcagacccacgatacctaatttcatagcgttttgtatctcccgtcattggattttgacatataaacaaagtatatcacacatcgtgcatcttttcaaggctgccgatggctggtgggcctatattcggtgcaagcattagcgagtaacagtaaaaagcccccttcaactgccatacagcagccaaagggggcttgaatcgtactatacgctaaatttacatcaggagcaaagccaaaaggcgcttaccgcgaatagtagcagtaagcgccttcttgcatttattatctataaagcggatttatatcgcttattggtattgccgttcccttttctttgatattgtttctattgtcattgaagtattctgttttcttttcttctacggttggataattatatctggtgagaacctgtacaccaccagtggtcaacatattacagatgtacttgctcccatctttcaaatctaccgatacagctttttcataaacatatacttcgtctatattcgaccattcaccctcctcttcacgcagggccttcgctgctctattggcatagtttttcttttgttgactttcaaaaagtaacccgccaacacatacaagtataagagccaatacagcaagacttgcaattaaaagcttcttgctatttgccgtcaattttggcgttgacttcggcggttctttttgcccaaactctgccataggagcgccacacttatcgcagaaagttgccgcatcgttcactcggcaaccgcattttttacaaatcatagtatcgcctcgcttttaccatggacgggaagctacgatttcaagaatatctgtatcctgccaagaaatcgttccttcttctgaaacaagtacattccagtttcctacttctttttggtacaatatagaatcgttcgttactgtatcacttttaccatatgttttttctgcatactgtttcaattccttaccgctcgcgttgtcggctctccacagcaaatatccgagttgaaaatcatcatcgaaatttgcttgcagtgttccgccgtattttcctaacggaatatcataccagcaataaagatactgtacgccccactttactgtgtcaaatttgtcataatcatctttcggtcctaatatttctacggtttcctcacgcgtcatacctgattccagaccaaatggttttgccgctttggtcttatttgtaaacataattgcacacagtattacaatgattgctacagctatcaataaaattatttttacctgtttgttatcttttgcattgccaaataccgtagaaatcttttcatcggtcgttggtttcggcggttccgcttgtccaaactcggccataggcgcgccgcacttatcgcagaaagctgccgtatcactcacgcggcaaccgcattttttacaaatcataacatcttcctcatttagcagttagtaaatagaatacagtgcggcggcgccacacgctgaaagcaacacataacaaattaccgtaaatcccaagccatacagagcccactttccaatcgcggcagcctttttaggctctttctcatgatagataaaatacatgattgcacctacaatggggagcaagaaagaaatgatgttcaaccctttgtttggtttatcatttactgccgggttggattcaaccgcacaaccgcagtgcggacacatcaccgcttcgtccatgatttctttaccgcaatgtgagcaatacttcatttgtaagcactcctttattttatgtacagaatctatacagccatctcctataatgcactgattactttgtcaaatccgtcacgctcaatctttacccaatttgtaagttggtcaagtgcattgttgatatgtttcaattcttcacttgtgtatgtgtaattatctccatacagaacttcgacgaatgtccagccaaatgtgtctggagcatcatcaaaaatgtagccaatgggaattgttgtgttttttttcaatgttcctactttttccagaagtattagagcgttgctgttttcggaatccaaactgttattcgtatcaaaattgtatgttgcagttttgtaatcaatcgctgccattccttttgtatcgtcacgaactgcttcattaaagtagaaatcacttactataatatcaattccgctttttatgcttgtgagtcgctgaaacactatccaagacactgcgccatcgtaaagtttcttttcctgcacagttaatccatttgccaaatccggcattacaaggtctgcttcattatatatgtaatttccgctttcatctgcaacaaccaagcccccttttacattgcgcatattctttcctaatactttttgcacattttctggctgtgtttccaccagtgggacaagaacttctaccttataacttccaaaggggagcgccacaccgttatttgaaaacggccccgccacggcttttccaccaacaatctgtagcgaagcgtcagccttgtagttcgtgttatagcctgtttcattggactcgccaacaccaaccaaacttacaacaatgttggtatcatcaggcaaattggtttcaactgccgcatagacaaggttgttatctgcaatctgtgtttcaattttgatttcagcgtcaatcttttcttctaacacgccactgctaaccactgcatagactgcaaccacagcaacaactaatagcccaagtagtaaggcaagcaccttttttcgactaacacgcgagggggaatccatgttcaacacttcactttcttttagacttagaacttataagttctaatatttacatattatcactccggtgtggtattgtcaatagtactaaacaatactaaggacaggggagggattttgtttgtatttgcggcggctgcgtgatttgcgtgaggacagcgacctttcccagacaaccgtcgccaatctcctccatattcaacaaaccgtgtattcccgctatgagcgcggttttcagacaatccccttggaacatctgctgacactggcagactattacaaagtttcggttgactatattctggaaagaactaacaaccccgcagtcaattcataaagccgcctgaacaaacaaaaaacagcccccgccggatttaaacccggcgggggctgttcagttattcagctattcgcagtcaagctactcgcagattacagctcagcgaagtacttaatggtgcggaccatctgagaggtgtaggagttctcgttgtcgtaccaagaaacgacctgaacctgataggtgtcgtcgtcgatcttggcaaccatggtctgggtggcatcgaacagagagccgtagcgcatgccgatgacatcggaggaaacgatctgatcctcgttgtagccgaagctctcagaggcagcagccttcatggcggcgttgatggcttccttggtgacatccttgcccttgacaacggcaaccagaatggtggtggagccggtggggacgggaacgcgctgagcagagccgatcagcttgccgttcagttcggggatgaccagaccgatggccttggcagcaccggtggagttggggacgatgttctgggcaccggcacgggcacggcgcaggtcgcccttacgctgcgggccgtccaggatcatctggtcgccggtgtaggcatgaacggtggtcatgatgccggagacgatggggaaagccttgttcagggtgtcggccatgggggccaggcagttggtggtgcaggaagcagcagagatgacctgatcctcagcggtcagggtcttctcgttgacggagtagacgatggtcttcaggtcgttgccggcgggagcagagatgacgaccttgcgggcgccagcctgaatgtgagcctcagccttagccttgctggtgtagaagccggtgcactccagaacgacatcaatgcccagctcgccccacgggcaatccttggcatccttaatggcatagatggtgatcttcttgccgtcgacgacgatgtaatcctcgccagcctcaacggtgtgcttgttctcgccgatcttgcccaggaaagagccctgagcggtgtcgtacttcagcaggtgagccagcatagcggggctggtcagatcgttgatggcgacaacttcgtagccgtcagcctcaaacatctgacggaaagccagacggccgatacggccaaaaccattgatagcaactttaacagccatagtgaaatcctcccaagatttgtctttttcaccttatgagcggtagcccgctcgtcggtatggtactattgtaccccatttgcagcgtttctgcaagaggggtgttattcttttaacacgattttttcaaaaaatctgtacattttttgaaattccagctattaccactgcgccgggcgtaaacacggggcagactaagggcagactttgcagagaaagtgggggagtgccatgccggtttttgggcagacacgcgcagcactggcggcggctgcggcgcgcggggcagacatagtatcctcgctgcggctggttatgacggccgaggcgctgacggccccggttccggggctggcgctggagctgaacaccgaattggaggtgctgtgcgatgcctgccgggagctggcagcctgccgcagcggctggctgtacctctgcccagcaggggatgtgcagcccgccgcactgccgcgcgggctgctgcacggcgttgtgctgagctttctgcgcggggtgctgcgcagcggcggccgggcggtgatccgtgtgctgccgcacggcgaggccgcagtgctgaccctgcagggcggcaggccggacaggatgcccggggatctgcccgcgctgctgcaccgctgcggtgcttatgtcacgaccggggacggcgggcggtacgcagcggcggtgcgtctggccccggcacagggtctgccgctgcgggaggcccccgcactggcagagctgctgctggaccgctacagcgcgccaagggtctacctgcaggggttctgcgtggaggaggaatgaccggcacaaaaaatgcaggggcgagtctgattcgcccttgcagtgttattcggtttcctccccgcaggcctgccacgcgcagaccagcccgcacagcccgaacaggccgatgccgatgccggtcagcaggtccggcagcaccagcatgccgtgcactgcctcaaacaaggtctggggcagctccagcccggtgcagagcaggaatgccccggtgcccgccgcaaacagcgtgtggccgcagggcagtcccggcacaaggaataccttcagtagcacgaccgccagcagcagggcggctgcggcgctgagaatccgcagggagcaaggcagccgatggagcgaggcgggggtgaactgaaagcgccagagcagtttccagaggaagaacagcggcacgaccccggccaacagcgggcggcccagccgctggcgctgcatgccgaagccgctgaacgcccgcacggcgtaatacagcagccagccgccgcagaaaaccggcaacagaaaatccgcccaagccgcccacaccgggtaaccggcggagaagaacgcggggaactgcacggcgtagagaacgacactgacggcggaaaaaccggcggcaaccagcacggcgccggtcagcgccatgcagatgccgagcggccggcaggtatcctgcagacccgcaggctgggctgccgcgcggcgggcgggcaggtagggcagtgccagcgccgccagccacgggatgtaccgcagccaaacggaacccgccgtggcaaagccggtttcagcatcggaccagagcagcaggtcggccagatgcagaccggccatagccagccctaaggccagcactgcaatggcgttgggatgtttatttttcatggaagtgcctcgtttcatacagggcgcggccgccgcatatacatgggacaagccgcgcggggatacccctattgtaccgcctcgcgccgcaaattgcaaggagggcacgccccttgaaaaaaacattccgccgtgcggcggtgctgaccctgctggcccttgccgcgccctttgcggcgctgccgctggcaaggcccgcggctgccggcagtgagccgccgcccgccgccgcgcagcaagccgccacgccgcagccgcagcccaccgccatgccggcagagcgcagctttgatgcggctgcaccgatacttattgaggatgacggcgagacgcgcaccgtcagcgtgcaggcgtttctcatcggcacggccgccagtgagatgccgcccgactggcccgaggatgcaattctggcccagatggtggccgcccacagctatgccctgagcctgaacggcgcagcattcagctgcagcagcgcccgctgtgcaggctggaccgatgctgaggtgctgaaggcgcgctggggcgatgcgttcgacagcagctatggcagacttgccgcactggcacagactgcagcgggggcggtgctgtgctgggacggtgcgcccgctgcggcctgctaccacagcatcagcacaggaaggaccgaggcaagccaaaatgtctggacgcaggcggtgccgtacttacagggggtcgactcaccgtgggacgccgacgcgccggggtatgaaatgaccgtcacctacagcgccgagcaggtctataccgccctgcttggccttggccttgcggcggaggagatacaaaacacccccgccgactggttcggtgagggtgtgcaggacgaagcggggtatctggcgcagatgccggtctgcgggcaggtgtttgccgggacaaggctgcgcagtgcgctcagtctgcggtctgcagcgttcaccgtggcctatgacgcgggggagaacgcatttgcctttacgacccgcggctacggccacggcgtgggcctgagccagtacggcgcgaaagccatggccgagcagggcaagagctggcgggaaattttgaaatggtacttcccggggtgtgaggtggtggagtaaactcctgccttcccctgtgggggaaggtggccccgcagggccggatgagggggaggtgtttcactgccgtccgctcacgggtaatgctggcgtgctctgacctcatcagtcagcgggcggggccgctgacagcttcccctgtggggcaagcctttacggcagttccacggtaaaggtcgtcagctctgcatcggtgtcaaaatcgtagacctttaccgtcaggctgtggcagttttcgggcacggcagcaaagtagtcatagctggccttggtgcattgttccgggtggtcaaagtccgccgggtcggccgtccatgcgccgtccgtccaccagccgccttcgccgcgctcgtggcccagctctgtgccgtctgccgtgtagagctttacgctgacccaatgctgttcaggcgggaaggacagcagcactttggtcgcggcgggcgtggccgtgacgctttgcagggtgatgccgttttgttccatgggtgtatccatcgtgcgtacgcccgcatcgctgacctcgggaatggtaaaggccagcgtgtaactgccgggcagcggggtctggtctgcgtagtcatagtgccaatagctccggccatcggtttcgagaatactcttgttgcaggccaccagatcggacagcgtcagcgttgccgtgtgcccggccaaatcatcgtgtgtcaggaacagctcataattgatgcccgtcgcaaaggtgcggtcatcgcgtttttcaaaggtaacagcgccgttcaattccgtgccgttgtccagcaccagcgtgccgtactgcccgccgccgttctgcagcgccttttctacggcgtcctcgctggggccgatggcgttgaacccggccagactatcgtcctcggcggtcagcatcaggctgatgcgcagccaatcgccatcgttaaacacctgccccagcgtcagggtgtagggcgtgtcggcgctttctgcggtagcttccaccgtctcggcgtatttgttcagctgctcactttgcagcgaaacatagtcgtcctgcccgccgcggttcagccagctgaagaggctgcccaccacgggcagctgctcggccacggcgggggcggcaaagttgacactgcccagccccacggccacgcaggctgcggctgctgcggccacccgcccccacggaaaacggcgcttgacagtcttttttgcctgcggcagcttggcgcaggccgcgtccagcacgcgggcaaattcatcatcggtcagcggggcggcgggcatcggctgctcattcagcgtatgcaacaaatcggcatcaaaatttttgttacgcatgggtgtacactcccttctcggtcagttggcggcgcagacggtcacgcccgcggctcaggcgggtgttgacgctctcaacactcatgttcagcgcggcggcgatctccttgccggattgcagcagataatacttgcgcagaaagatgtcccggtcaggcggggccatggcggctaccagcgccccgacaaggtcggcggcatcggcggtggcgcggtcaaactcggccaactcaccgagcgtttcggccaggccgtcatccagcgagagtgcctcgcggcggcgcagggcgttgtagcggtcgatgcccttgttgcgcgccgtgacaaggagccacggccgcagcggtgttgcggtgcgctccagcttggccgcattgcgccagagcgagacaaaaacatcggccatgcattcctcccggtcgcagggattctgcggcaggatgcggttcagcactgcctttaccagcggcgcgtaggcaagcatggctgcctccagaccctcctccgggtgcgtctgcagcaatcgggtcaattcccggtccttcatgttggtacctcctgtttgtaggttctgactatatagaccggtgcgggaggggaaatcttacagattcactaaaaatgccttcccctgagggggaaggtggcgcgaagcgccggatgaggggcggaggtttctctattgcccggtagcgggtcgctacaataactttacccctcatcagtccgctgcgcggacagcttccccctagggggaagccttttctctacacaaaaaagcgggcgcgatctcgcgtccgcttcctaattataaccttattgcccggccggcagggtaaacacaaaccggcaccatttgccctcctcgctctcggcgtggatctgcccgcccgaaaggttgatgaggatcttgcagatatgcagccccagaccgctgccgcgcgtgttcatgccgcgggagcggtcctccttatagaaacgctcaaacacaaagggcagggcctccggcgcaatgcccgcgccggtattctcaatgcgcacctccaccatgttgccgtggcgctcggcggcaaagctgatggcaccgcccgccggggtgaatttgatggcattgtctacgatgttatacacgacctgatgcacaaaatccgggtcagcatagatcggcagcgggtcgccgcccagcccctggatgtcgattttgccgtcctcgatgcgctgctcatcgctgagtacgacatcggtgacagttttccacagatcgtaggtctgggcgtggataggcacctcgcccgcctccagcttggtgatgtccagcatgttctggaccagccgtgccagacgccctgtctcctgtgagacgatgccgaggtagtgctttgtctcctcgggcgggatggtgccgtccagcataccgtcgatgaagcccttgatcgtcgtcattggggtgcgcagctcatgcgcgatgttgcccatgaactgcccgcgggaattgtctatagtctgcagccgggacgccatattgttaaaggtggtcgcaaagtcggccagctccacgcagccgtccaccggggcgcgggcggtgaaatcaccgctgcccagccgccgcgcggcctcactgatgtcctcaatcgggccggtgatgcggcgggccaatacccagcacagcacgctgcacagcagcaggatggcagcggccgaaatgccgaacatggccagcatgtcggtcatgtagctgcctaaggcgttcatggggctggcggcaaacaggtagccgtcctgcccgccgacggtaatgcgccgcccggcagtgtagtattttgcgttgtacacgccgtccagcgtgccggtctcaaaaatatcgctgccttcatcaagctgtgcaatgtaagcaggcggcacattcgcgccggtgaacgcctcgtccccggtgtgcagcaggatgctgccgcttttgtccgcgataaagaccagcgcgccggaggtggtgttgaacagctcaaacccgctgtgggcgcgctcgacaagatcctcgccctgcaggggacgggtcacgatcgacccctcatcggcaaaacgctcgctcagcgcggttgcgccgttcagcacatcggtcagcgagtttttgcgctcgctgataaaataggccgccgacagcgcggtctggatggcgcacataacgctcaggcccagcaccagcacggcggcgatggtcgcaaaaaactcgcggctgatcgtgttgcggcggctcattccctgacctcgaacttatagccgacaccccagacggtcttgaggctccactgctcggaggcaccctccagcttttcacgcaggcgcttgacatggacatcaatcgtgcgggaatcgccgtagtactcaaagccccacacctcgtccagcagctggtcgcgggtgtagacacggttggggtggcccgccagacaggccagcagttccagctccttgggcggggcctcgacgaccttgcccttgaccttcagctcatagcggttcatgtcgaggtgcaggttgtcaaaatcgtagacgcccttgttttcctcctccttggcggaggaacggcgcagcacggccttgatgcgggccgtgacctccttggcgtcaaacggcttgacaatgtagtcgtcggcacccagctcaaggcccagcaccttgtcataggtctcgcccttggcggtcagcatgatgatgggggtgttgtccttggcgcggatcttgcggcagacctcccagccgtccatgaccggcatcatgacatcgagcagcaccagatcggggtgcagcttgtcaaactcggtcagcgcggccgagccgtcatggaccatcgtcacattgtagccctccttgacaaggtagaggcggagcagctcgcagatatttttatcgtcatcgacgaccagaattttttcatttgccatcttggtttcctcctacagccgtacagagcggttaatattcttattataccgcataattgtggataaaaaaagaacagaaacggtggattgtgaaaaaatgttgcgttcggcatacggcacccccggataagcaaaaaaagcacaggcggcagcggcgcggcggcgcacactgccctctgtgcttcaggcatcggggtcacttgttttgcgtagatttctcggcaaagtcgatcatcttgcggtaggtttcctcgctcaggtcatgctccaccttgcaggcgtcccgggcagcgatgtctgggtcaacacccagcgccacaaagaacgccgtaagcgcgcggtggcggccgtagatgcgctgcgcgatctccatgccgggggcctccagcttgataaagccatccgggtccatcgaaatataaccgttctcgcgcaggtttttcatcgccacgctgacgctgggcttggaaaaccccatggccaccgcaatatcgatcgagcggacggagcccttcttctcctgcagcatcaggatcttttcgagataatcctctgcggattcgtgaatattcatggccacagcctccttccagacagaatagtgttatccttatcataccacacccggcggcgctttgcaaggctcaagccgcaccgttccgcagaacaccgtgacggcatcgccggtcagcagcacagtgtcgtcacggcacacctgcacctccagtgtgccgcccggcatctgcaccagaatgggcgcaccgcgcggacagcggccggtcagcacggcggcggccgctgcggcgcaggccccggtgccgcaggccagcgtgcccccgctgccgcgctcccacacggaagcggtcaaagccagcgggctgagctgctgcacaaactcaacattgatgccgccgggaaaggccgggtgatgctccagcgcgcggccgtaccgggccagcgcctccccggcaggcgggctctcccgggtaaagatgacacagtggggattgcccacagccacgcagctgacccgccagctgcgcccgcccgcacagaggggctgctccagcagcggcccgcggccgagcgtttgcgcgcccacggcatccccggcagcggtaaagcggcccatctcggcctgccacagccctgcgcccacacggcgcaggatgcgccgcccggcgcgcggcgtgtcgatgcgcaggcagtcccgccgcacaccgtgggtgtataaaaattccgccgcacagcgcacgccgttgccgcacatcgcaccctcgctgccatcggcgttgaacatccgcattgtggcgtcaccgtccgcaagcagcggcgggcagaggtagatcaccccatccgcccccacggaataatgccgccgcgaaagctgcaccgccagagcggcggcatcgggcggcagccccgttctgcggcagtccagatacaggtaatcgttgcccgcgccctgcatttttgtgaaattcagctccataggcccacctccccgcaaatcctatgcgtgcgggggaaaaattaccacttacccccttgacattcgcaggaagatacgatatatattaaatgtatatctgtgtataaaaaggagttaaagtatggattccgaagttttcagccgcatccgtgattatttggcagagcagctcgaggtcgagcctgaaaaaatcaccgccgacagcgatatcgtcaacgatttcggcgctgacagtctggatgttattgatatgatcaccaccctgtccgatgagttcggcgttgagatccccgacgaggacatcgagaatttccacaccgtcggcgatgtggtcaactatctggaagaaagaatctgaacaacagccccgcttttgttcaagagagtgtgaggataagaaaaatggcgaacgataagaaaaagatggttgaggcgatcaccgcacaggaggtcgactttgcccagtggtataccgacatctgcaccaaggctgagctggtagagtattccagcgtcaagggctttgtggtgctgcgcccctatggctacgccatctgggagaatatccagaaggatctggacgcccgcttcaaggcgaccggccatgagaatgtggccatgcccgtgctgatccccgagagcctgctcaagaaggagggcgagctggtcaacggctttgcccccgaggttgcctgggtcacggccggcggcagcgacccgctggaggagcgccttgcggtgcgccccaccagcgagacgatgttctgcgaccatttcagccatgtgctgcactcctaccgcgacctgccgatgctgtacaaccagtggtgcagcgttgtccgctgggagaaatccacccgcccgttcctgcgcacccgtgagttctggtggcaggagggccataccatccatgagaccgccgaggaggccaaggccgagaccgagcagcagctgaactgctacgctgactttgccgagcatgacctgtgcatccccgtgctgaagggccgcaagaccgacaaggaaaagtttgccggtgcggaggcaacctacaccatcgaggccatgatgaaggacggcaaggccctgcagagcggcacgagccactacttcggcgacaagttcagccgcgcctatgatgtgacctttaccggccgcgacaacacgctgcagtatccgttccagacctcttggggcgcctccacccgcctgatcggcgccatcatcatgacccacggcgatgatgacggcctgatcctgcccccggccatcgcgcccattcaggtcgtgatcgtgccggtggccgcccacaagcccggcgtgctggacaagtgccgcgagctggctgccgagatcggccggtatgcccgcgtcaagctggatgacagcgataagcagcccggctggaagtttgcccagtgggagatgaagggcgtgcccgtccgccttgagatcggcccccgcgacatcgagaacggccagtgcgtgctggttcgccgcgacacccgcgagaagcagtttgtcaagtttgaggatctggccacggccatccccgccgccatggaggctctggcaaaggacctgtatgagcgcgcactgcagaaccgcgagcgccgcacctacagcgccaccacgatggatgaggtcaagcagatcgccaaggagcacactggctttatcaagacgatgtggtgcggtgatctggcctgtgaggaggccatgaagagcgaggccggtctgtccagccgctgcatgccctttgcacaggagcagctgagcgatgtctgcccggtctgcggcaagcccgcccagaagatggtcgtctggggcgtagcgtactaagaaaaaggggatgctgcaaggcatcccttttcttgtatagcctgtaggggcggatttcatatccgcccgaaccgtgcagccacctgacgggcggatatggaatccgcccctacgatatgatgatgaaaatcttacttgcaacacttctgatttacgccctcagtctggttctcacggcggtgggcagccggttggcggggcgctgcaccacatggtgctgcgcgctgcttggtctgcctatgtgggtcgtggggggcacgattgcgcccttttgtctggcgctgccgcaactgatgctggcgttccttgccgcaggcatgtcggtcacggcgttggcggtcggcacggcgctggccggtgccgttaccaatctggggctggcgctggcagtctgcctgctgagccgccgccggtgtgccgtggctgaccgtgatgagctttgccgcaaggccgtgcttctgttggccgcctgcggtgtgctggcggtctttgtgcgggacggtgagctgagctacaccggcaccggcctgctgatggggctgtttgtgctgttcgtgctgacaagcattgtctttcagcacaggtttacctatggcgagacgatcgaggcgctctccacctcggaggaaacgccccgccggcagctggatgcgcagaagtatggctataccgcctatacgatggccttcccgatcatgagcgtctggaacgcgctgaaaaatctggccggtgtgctgggcgggctggcgctgctcttttccggggcacgggcgctggtctacagcgccacaacgctggccaacctgaccggcacgattcaggccctctgggcggcaacgctcatcagtctggggttctgcatcccgctgctggtcgaggcgcttgaccacccgctcggctcggtctggaagcggttttcgatccgctgccggtactacccgccggattcactgccgattcagcttctgaacagcgcaattttgaacctgacgctggcgctgccgctttccagcctgatgtaccgccacagactgccgatgggcgcccagttccgcagctatgaggtcccggtctgcgcggccatggcgctggtgctgctgctgccgccgctctgcaagcacaagctcaagcgctggcagggcggcgcatgtctgacgctgtatattctctatctggccgccgtgctgctgctgccgctggcgggcgcgtaattgaaaaattgcacgattgcattttcgtagagttgtaggggccgcacatgtgcggcccgcaactgtcccattattgctcgtctgccgtatacatgcgggccgggcatgcccggcccctacaaagcaacagcggtccacgcttcgtatcccgaagtgtgggccgctgttgctttgtaggcttactttttcaactctgcgcaggcttcttggatgatctcccgctccacaaaatgctcttttttgccgtggatgatctggtaattctcatggcccttgcccgcaaacagaacgatgtcgccgggctgtgccatctttacggccgcatagatcgcctcgcggcggtcggtgatgcaggtgtagggggcatccgggggcatatagctggcaatgtcgcggatgacatcctccggcggctcgttgtccggattgtcgctcgtgataacggtgtagtcggcatatctgccggaggcctcggccagctcgcggcggcgaacctgcgtgcggccgccgaccgagccgaatacgcagatcaggcggtgcggattgtaggcgcgcagcgtctgcagggcgctggtcagtgaaagaccgttgtggctgtagtctacgataaaggtgcggccgggcagaccctccacgacctcaaaccggccctgcacaggggtgtgggccagtgtggcggcagcctgcgcgggcgttacgccgaatgccccgcacagtgcgatggcgcacagcgcatcggatgcgctgaacgcgccgggggacatgacctcaacatgggtgctctgcccggcatggcggcatacaaaatcaatgcccagcgcggtactgctgcgatactgtgccagcatcacgccgcggtagtcggcctcggccttaatgccaaagctgacctgctcaccacgaaagccatcgcgcatgaaatcgctgtaagggtcatctgcattgtaaaccatcgtgcgggcgttgtactcggcaaacaggcggtgttttgcgcatttgtagtcctcaaaatccgggtgctcgccggggccgatgtgatcctccgacaggttcgtaaaggccacgacctcaaacggaacgccgtccacacggtggtggcgcagggcctgactgctgacctccaatacacagtgatgcacaccggcgtccagcattttgcggaacaggcggtgcagctcaaggctttcaggggtggtgttggcggtggcctcgtggcagcctgcaatatccacaccgtttgagccaatgtaggcgcagggcaggccggcctcggtcatgatcgcggcggtcagcagcgcggtcgtggtcttgccctttgtgccggtaatgccgatcaggtgcagctcgtcggcagggttgccgtagaaatctgccccgatgacggccagcgctgcgcgggtgtcctcagtcacgatctgggccgcatcggcgggtaaatccagcgtatgttcgacaagaaacgcgcggcagccgtttgcataggcgctctcggcgtaggtgtggccgtccagccacgcacccaccagacagacgaacagcgaaccggcacaggccttgcgggaatcgtaggtgatcgcggtgatgtcggtgtccgatgcaccggtgtggggaatgtggttgacaaggtcgtttaacttcatacaaaaacttcctttttattaaaaagccttcccccgagggggaaggtggccgagcctgcgaggccggatgaggggcggggtatcgtggccgcccgcttacggggtgcatcggcagacatgcccctcatcagtccgcttcgcggacagcttctccctaaagggagaagccttttcccttacttctgtaccgggtaatatttcttaaacttcttgaactggcggcgcagctgctccagcacgcaagcgtagcgcaccgggttccacataaggtccggcttgtagagcagcgagcaggcctcccggccctgtgccttcagcgccttggcgcgggcgacgaggtccttatcctcggtgtaggtgaaggccacctgcgccggcacatgatgccagaacacctcgttcttgttcagcacacagtctgtgccgccgtcattccacttttctacgaccagccgggcaatattcatgccggtggccgtgacatagtagttgctgcggccctgacgcaggttgatctcaaacacgcggtagtcaccgggggtgccgctgtacttgatgtcaaagttggagaaaccggtgtagtggcaggcctccagcattttgcggatattctcgaccagcggcagggaggtcgtatcctcgctgatgatggcggcgtggttgccaaggccatggggggtgtgctcctcgaccatcgtgtgccctaagcacatcgcgcggaccttgccgttctcgtccgagaaggcggtcaacacccgcatatgatcgtcaccgcctgggaccagcttctgcagcagcatccggtcggggtagccgcttgcgtagacggtgcgcacgatctcggcggcctcggcaggggtggcggcggtgtagaccttcttcatcgtgtcaaaggggtgcttccagtagtcaacgctggaggatggctttacgatgatggggtaggcaaagccaagcttttcctcggtcagctcggcggcgtccaccggggcagtcaggatcttggtgtccgggtaggggatgccgaacttatcgcagacctcgtagaactcggcctttttctggatcgagccgtacaggtcggcagcggggccgggggcaatatactcgttcagctcggccttgcggcggataatcatggcggcgtagtcatcggtgcagccaaacaggtaaaggcgcttacccttatgctgtgcggcaaagtcatgcagaatacgcagcatggtatcctcgttgtccatatcgggcacggtggtaaagtgtacaagcttggaatactttgtcggcgccatcgggtagcggccgtaggcgtagctctccacgccgtaagcctcatggaaggcccgggcaaagttgtagcagttcaggtctgcaccaaggaatacagggataatgtcggacatgggaaagtacatctccaattttctaaaataggcttccccctcgggggaagctgtccgcgaagcggactgatgaggggcggccttgcggtggcaatccgtttgcgggcaattagcgcaaactcgcccctcatccgacctcgggcgggggcctcggccaccttcagtctacgcgccaagagccgcctacggcggttgcgctccgacacgcgcctgcgggcgcagccccacaggggaaggctttactgctcacgcatcaaacttctcaaagaactgctcatgccaggtcaggaaggtataggcagtccagattttgcggcgctcgtgcttggggtcgttcagcatggcgaccagcttgtcctgatcgaaatactcggcggccacatcgctggtaaagcttttgcgcaccttggcggaaaattccgggtcctcgagccacttggcaatcggcaccgggaagcccttcttcgtgcggttggcccaggcatcgggcagggtcttgttggcggcggtgcgcagcacggccttggtatcgccgcgcagcttgtagctgtcggggtagcactcggcctcgcgcaggacctcgcggtccagatagggcacgcgcagctccagactgtgggccatgctcatcttgtcggccttcaaaagaatatcgccgggcagccagaggttcagatcgaggtactgctttttctccagctcgctcagatccttcacgcggtcatagatcggcgctgcgacctcgcgggcggtggggccgacacggtacttcggcttcaggatatcgtaggcgtccttctcctcaaagacatgggcctgcccgatgaaccagtcctcggggcggccgctgcccttgatgataaagtcgtgccccttgaagtagggcagctgctggctcacatcgctggccagatggcgcagcggtgcgggcaggcgcttgtaccgctgcatcagcggggtgtcggcgtaccactcatagccggcgtagatctcatcggcaccctcgccggagagaacgaccgtgacatgctggcgggccaactggcacaggaagtagagcggcacgctggacgggttggactgtggctcgtccatgtgatactgaatatccgcaaaggcgtcaaggcactgctccttggtcagcatctcgcggtagttcttgatgccgagcttgtcggaaagctccccggcctcggtcgtttcgtcaaatttgtgggtgccgtccgggctggcaaagccgaccgagaaggtctcatcgggcatcaggcaggccgtgatatagctggaatccacgccgccggacaggaaggagccgaccttgacatcgctgatgcggtgggcggccacgctctcccgcacgcgggcgtcgatctgatcggcgcactgctcataagatagggtcgtggggtggcggaaatcggcgtcccagtaccgctcaatctgcattttgccgtccttgtaggtgaaccagtgggcggggggcagcttgtaggtgcccttgaagaacgtctcgttcatggcgctgtactggaaggtcaggtaggggcgcagcgcctcggcgttgacctcccggcggaagccgggatgctcgagcaggctcttgatttcgctgccgaacagcagctcgcccgcctccgtctgggtgtagtagaacggcttgatgccgaaaatgtcacgcgcgccgtacatctcgttcgtcttggtatcccacacgacaaaggcgaacatgccgcgcagcataccggccagctttgtgccgtactcctcatagccgtgcaggatgacctcagtgtcgcagtgggtctggaagatgtggcccttggcctgcagttcggtgcgcagctccataaaattgtagatctcgccgttgaacacgcagacaacggtgccgtcctcattgtacatgggctgtttgcctgcggccagatcgatgatgctcaggcggcggaagcccagcgcgatggcgctgcgggggtcattgccgctgatatggtagccctccatatcggggccgcggtggatgatgcggtctgccattctgtgcaggatggcctcgcgctgttcacgcaggccggtaaagccaacaaaaccacacatggtaatttccctttcgttttatctatagaacaattagacagaattttacttatacatttgtatattgtaccacagatacagggaaaagaaaagtatgcccgtaaaatattcagcaaaatgtaggggcggggctctgctccgcccggtaagctgccgcagccactatgtttgcgggtcattggggacgccgacccctacaaccgtaggggcgcattccatatgcgcccgaaaagttcaccctgccgcaagcgggcacgggcggagcagagccccgcccctacagatatacaagaaaaccccgcagcaaagcacaagtggcttgctgcggggttatcatgaaattttactctttatcctcggtcgttaccttgtcggttttgccttcgccgtccagtgcttcctccagcgtatgccaggcaagcaccgcgcacttgacgcgggcggggacatgggcgatgccctgcagggcggccacatcttccagatcgtccagctcctcgggggtgatcttgcccttgatcatctggaaatacaggctgattaagcggtgcgcatcctccacggtgcggtccttcacaaggtcgatcatcagcgaggcggaggcctgcgagatcgcacagccgctgccgataaagccggcatcctcgatcttgccgtccttcacgcgcagctgcagcgtgatgtcatcaccgcagctggggttgacaccctccagactgtgggtcgccccctcgacagggtggcggttctccttgctgcggctgttttcggtaatgatctgggtatacagttcgttcaggttcacaggcccatcacctttctgacattttcaagattttccagcagggcatctacatcctcggcggtgttgtagatggctacgctggcgcggcagcagctgccgatgcccaaaaactccatcaggggctgggcgcagtgatgcccggcgcggacagccacgccgcccgcatcaaggatggtggccacatcgtggggatggacctcgttgacattgaagctgacaacgccgtagcggccgtctgccacaggctcgccatagacggtcagccacggcatagcgcgcataccggccagcatacggtccagcagcgcatgttcgtgtgcttccattgcctgccagccgataccgttcatgtagtcgatggcggcggcaaagccgacctcaccgccgacattgcgggtgccggcttcaaacttgcggggaccgtctgcccaggtggcaccgctctcatgcacagccgcgatcatatcgccgccgctcaggaaggggggcatcttttccagcagctccgcacgggcgtacagggcgcccacgcccatgggggcgtacagcttgtgggcggagcaggcggcaaaatccacatccagcattttgacatccacgggggtgtggggggcgctctgtgcgcagtccagcaccaccacagcacccacggcgtgggcgcgcttgacgatctcttccacgggggcacgaaggcccagcacattggagaccatcgccacggcaacgaccttggttttgggggtgatctttctgtccagttcctcggtcgtcaggcggccgttctcaccgggatacatatagacgagctttgcgccggtagccttggccacgcgctgccacggcaccatgttggagtgatgctccgccacagagacaacgatctcatcgccctcatgcaaaaaattcatgccgtagctgtaggcgatcaggttcaggctctcggtcgtgttctgggtaaagacgatctcatcgtcctcggcgttgaagaactgcgccacggtatggcgggcaccctcgtgggcatcggtggcacgcatcgccagctcgtaaacgccgcggtgggggtttgcgttttctttagtatagtagttgaccaccgcattcagaacctgcgtggggtgctgggtggtggcggcgctgtccagatagacaaggcgcttgccgttttcatcggcagccagaatgggaaaatcagccgtccagttcatcgttgagcctccctgcaacattttcacgcacctcgtcctgcaggctctccagcgggatcttgtcaatggcgggggcaaagcgggcgtccaccatcaggcggcgggcctgtgcctcgctcaacccgcgggaacgcagataatacagcttgctttcgtcaaggcggcccacgctggcagcgtgctggccctcgacttcctcctcaccgcagaggatgaggggggcggtacggttgcgggcgttggggctgaacagcagcacatcctcgctctcatggccgacaccgcgcttggcaccgcgctgaaaatccaccgtgccgcgcaggatcttgtcagcgtggccggtcagcacaccggcggtgtgcatctcgcacagcgtatctttgcccgtgtggacagagacatcattgaagtccagcacatcgctgccatggccgaaatacacggcgtcaaggtcatactcgcacttgttgtggttcagcagggtgcgggtgccgcaggcaacgactgcgccgcccagctcaatgcggacctgctcgacgcgggcggatttgccctgttcaatggcaacggcgttccagcggcgggcatggctgcccagcagctggacctgcaccagaacgacatgcgcaccctcagcggcgcggatgcgggtcaggttggcggaaacgccgtcctcggcatcgccgcgcacgacctgcacaacggtcaggctgctgccctcggcagcatcaatggtcaggcaggtcagcgcgtgggggtggtcagcgtccagagcggtttcaaacacaatgggcgcatcggcggtgccggaaacggccagatggttcacaaggttggcgttctccagcagccaggcatcggtcccggcacccatgccgctggcggcaaaattcgtaaagtcagcctcggcaggggcagtcacaccggcaggcagggcagggcagagggactccgccttggcccagccgtcagcgggcacagtgggcagtgccgccgatgccggcgcataattcacgcccagcgggttccaagtggaaaccggcaggcggttcatggttgtagtcatatatatcaccttaaactcaatgctaaggcttccccctcgggggaagctgtccgcgaagcggactgatgaggggcagacttaccgcagcagcccgttaccgggttgcacggggaacgcgcccctcatccggcctcggtcggagcctcggccaccttcccccgttaggggaaggctccacaatcagccaatgcttcccttcatctccagatgaatcaggttattcatctccaccgcgtattccagcggcagctccttggcgatgggctcggcaaagccgccgacgatcagggcgcgggcgtcctcctcggtcatgccgcggctcatcaggtagaagatggcctcctcgctgatgcggccgatcttggcctcgtggccgacatccacggcgtcgcagcggatatccatggccgggatcgtgtcggaacggctgcggtcgtccagcatcagggattcacagctcacgctggacttgctccccgcggcattgggcagaacgaccacggaagaacggaagtttgacacgccgccgtcgcgggcgatactcttagtggagatatggctcgtggtgtggggcgcggcgtgtacgaccttggcaccggtgtccaggtcctgcccggcacccgcaaaggtgatgccggtgaattccatgcgggcaccctcgccctgcagcacgctcatcgggtacaggcagcccgtgtgggagccgaaggaaccagacacccactcaatcgtgccgcccttttccacgcgggcgcgtttggtgttcaggttgtacatgtttttggaccagttttcaatcgtggagtagcgcacgcgcgccccctcgccgacgaaaatctcaacacagcccgcatgcaggttggccacattgtacttcggggcggagcagccctcgataaagtgcagataggcacccttgtctacaatgataagggtgtgctcaaactggccggcacccggggcgttcagccggaaataggactgcagcggaatatccacatgcacgcctgcgggaacatagacaaaggaaccgccgctccacacggcaccatgcagcgccgcaaacttgtggtcggtagggggcacacacttcatgaaatgctccttgaccatatcggcgtaggggccggtcagtgcgctctccatatcggtgtagataacaccttgcgcggcaacttcctcttttacattgtggtaaacgacctcagagtcgtactgcgcacccacgccggccagacttgaacgctccgcctgcgggatgcccagacgctcaaaggtgttcttgatgtcgtcaggcacctcgctccacttgccgcgcatctcggtgttggggcgtacataggtgacgatgttgctcatgtccagcccggtcagggacggaccccagttgggaatggacattttattataggtttccagcgccttcaggcggaattcacgcatccactcgggatcgtgcttttcctccgagatcttttccacgatctctgccgtcaggccggagttgacctcgaacgctgcgttgaccttgtccttgatgtcgtagacactgcggtcaacctcggcaatctcggtcttttcagtctcgaaggctctcatttggcttcgtcctccttcagggcggtgaagccttcctcaatgatctcattgacaaggctgccgtcaccggtgcgcacgatgcgggcatcgtccagcacatggacataatcgacctgcaggccctcaaggatcttggcattgtgggtgatgatgatcagggcgttgtcgtcgttgtggtaggccttgatgccgctggccaccgtcttgacggcgtccacatcgaggccggaatcggtctcatcgagcagggcaaggctgggcttgagcatgagcagctgcaaaatctcggccttcttcttctcgccgccggaaaagccgacattcagataacggtcggcgtaggacgggtccatgttcagcgcttccatctgggcggccatctcatggcggaacttcatgaccttgacgggtttgcctgcaatggcaccggctgccgtgcgcaggaagctctccagcgtgatgccggggatctcctccggcgtctggaaggagaggaacatgccggcgcgcgcacggacatcggcggtctcgtgggtgacatcctgaccgcggaagagaatctggccgcgggtcacagtgtagcggggatcgcccatcagggcgctcataagggtggacttaccggcgccattatggcccatcagaacatgggtctcaccggcgttcaccgtcaggttcagtccatcaagaaggaccttttgctcctccccgacgatgacctgtaaatctttgacttccagcagcggactgctcatggaaaaaacacctccaagtggtataaaaccgggatacgggcagaaagctcccccccggatagttttgctctaccgaactatactatactatttttatagggattgcaagaggaaaccgcaagaaattgacacagaagccctaaatcggccaattttcagcaggcaagacaaaagaaaaaggcttgaagcagaagcttcaagccttgatggctgccccagtccgacttgaacggacgacaccctgattaacagtcaggtgctctaaccaactgagctatggggcaatataacgcagcgcctgtcatcaggcgacgcatattattatagcggtgcgcagggcgtttgtcaacagattttttcaaaaaaatctgttttttaaaaaaatgacaaatccctccgcccggcttgacaacacggcgcaatgcagttataataatatcgctgttcataagccggtgtgttggaattggcagacgagacggactcaaaatccgttggtggtgacaccgtatgggttcgacccccatcaccggcaccaatcgtacctaagtggtttttaccgcttaggtattttttgtttggcagacatcttttttccttgtctgccaagttgtctgccatttttgcctataattggcccagaatttgcccaaaatggcagacaatcgggctgaaaatccgtttggaaattgtgaaattttgcttctttttgccctcaagcgcttcgcttggggggattttttttgcccatttttttgtccgggcttccgcttagactgatgcaggccgaaatcatatcggccgcctcctgtttgctgtccgtatcaatatgagcgtaaatgttggcggtcgtggcaaagctggaatggcccatccagacctgcacatctttcatcggaattttatttttgatgagcaggcttgcgcaggagtgcccttacggtataattacgacaaaccggaaaagccccgtatatcaagggttttcggttatctggcaaggtttttcatccttttccaaaccgaaaaatcgagccgcgaagtagttatttcgtagggggtgttatagtaacgacaaaaataaaataccgtttgggcgggctgtcagcccgtccaaaaaatcaggacatttcctctgcaaagaagaaatgtcctttttttgtacccaaaatcagatgccgacaggaggaacacaatgcctgaaaaaaccgtgcagaaggaaccgggcaaaaagcccgtgccatccaaaaagccgaaaccgcagcaggaagtagttgttcagatttcgctctctgagctgcatccgttcccggatcacccctttcaggtgcgagaggatgcgtccatgcaggaaaccgccgaaagcgtcaaggaatacggcgtcctcgtccccgcgctggcacggccacggga

SEQ ID NO: 14024 - DNA, 3125 bp, Unknown
  gut microbiota DNA sequence
gctggaacagattttaagcggcacataaggatacaaatcaaagcgtacaaatggtgggaaaacacgagcagcatatccttgccctgcggagagaatggattccggtattcttccgcagaaagcaaaatagcagggcttattttccggattttcccttgagatttggcggcgttataaactataataagcataaggccagcaaatacgatgctggtaacagatactgcgcaggaaagggaaaaaacgcaatgaagatgcttttcaagcaacggatgttctcttggttcgacagctatgatatttacgatgaatatggaaataccctgtttgtggttaagggtcagctttcctgggggcattgcctgagaatctttgatgcggcgggctgcccggttggctgcgtcaaagaaaagatatttacatggatgccaaaatttgaactctacacaggtgaggatgattatgtggggtgcctgagccgagagctgacgcttttccggcccagctaccatatcgactgcaatggctggcgtattgagggcagcttttgggaatgggactatgacatccttgcccccagcgggcatactgtggcgcatatcgccaaggagctttggaattggaccgatacatacaccattgaggttgccgacccaagagatgccctctgtgcgctgatggtcgtgcttgcaatcgatgcagagaaatgctcgcggaataacaatacctgacaggctgcacacaaaaaatactcccctattctgctgcgcacgcagcagggtaggggagttttctggttcgtgaagcagcacgccggtgtataaagaccgtacagaaaaagcagcagcccgcagtgggctgctgctttgcggtaaaaggcgggcggtcagcccatgacgaccttgacctctacggttgagccggcgggaacaggggagaggatgttgccgcttacaggcttgccgtccacggtcatggctttgacgcccttttccagatggtcagggttctccacaacgatttcataggttgccccgcgccagacacggcgcagggtaaagccgtccatcgtgtgggggatgcaggggtcgatcttcagcccggccagtgtgggctggatgccaaggatgtactggctcacatccacaaaggtccatgcggccgtgccggtcagccagctgtttttcgcctcgccgaaggtcgcggcatcacagcctgccaccatctggctgtagacatatggctcggtgcggtggatctcgctgatgtcctcaatgtatgccggacaggtctttttgtagatctcaaacgcgcggtcgccgtggccgactacagtttcggcacagctgacccacgggttgttgtggcagaagataccggcgttctccttgtagcccgggggatagctggaaatctcgcccagctcaaggtgatacctggtgtaagcgggctgcagcagcacaatgccgtacttggtgtcgagcttgtctttcacgctctgcagggcggttacggcttcgccggtgtttacgccgatgcctgccatgacgcacataccctgcggctcgatgaagatcttgccttcctcgcattcctcaccgccgatcacatggccaaaggcgtcgtaggcgcggcggaaccagctgccgtcccaaccggcagtcagcacggtgtgttccatctctgcagcctcggcgcgcacggcggcggcctcgtccgcgtggccggtagagtccagaatctcggcaaaggcgttgccgtatttgacatacataccggcgatgaacacgctttcagccacagggccgtcactcgggccggtggtctggaagctctcgcccggctccttgctgaagcagttcaggttcaggcagtcattccagtcggcgcggccaatcagcggcaggccgtgcggccccttgtgggcgcgcaggtagccgaagctgcggcgcagatgctcaagcagcggctgtgcaaggctgtggtcgttgtcaaagtccaccggctcgtccagaatcgagtagtcgcccgtctcgcccaagtaggcgtacacggcggcaatcagccacagtgggtcatcgttgaagccggagccgatatccatgttgcccttttttgtcagcggctggtactggtggtaggcgctgccatcggggaactgggtggcggcaatgtcgagaatgcgctcccgcgcgcgggcggggatcagatgcacaaagccgagcagatcctgacaggaatcgcggaatcccatgccgcggccggtgccgctctcataatagctggcagaacggctcatgttgaaggtgaccatgcactggtactggttccagatattgaccatgcggtcgagcttttcatcgctgctcttgaccgagtaggtggacagcagggtattccagtggtcgtgcagtttggcaagtgccgcatcgacctgcgcatctgtggcatagcgggcagccatcgcccgggcgcgggtcttattgatgacgccgggcgcggcccacttctcgtcctccgggttttcgatatagcccaaaacaaaaatcaggctgcggctttcgccgggctgcagggtgatattgacttggtgcacgccaacgggtgcccagccatgcgccatcgagttggtgcagcggccgttttccacgacctcggggttcgcattgctgcgccatgcgcctaaaaaggcatcccggctcgtgtcaaagccgtcaatgggtgtgttgacggtgaacaatgcgtaatggtcacggcgctcgcggtactcggtcttgtggtagatggtgctgccctcgacctcgacctcgccggtcgagaaattgcgctggaagttggtggaatcgtccacagcattccagaggcagaactccagatagctgaatacagtaaacgatttcggcgcatcactcccgttggtcagcaccagacggtcgatctcgcagttgtcgcctaccggcacaaacaactccagttttgcggtcaaactgttctttttgccggtgatgatgctgtacccgaggccgtggcggcactcatagctgtccagctcggtctgggtgggctgccagccgggattccatacggcatcgccgtccttaatatagtaataccgaccgttagag

SEQ ID NO: 14025 - DNA, 38994 bp, Unknown
  gut microbiota DNA sequence
aacatagttacaccttccctgccttgaccgcgccgtcaccatgctcacgggtaatcatcctgatgggggttgcggtcaggccgaaggtctcccgaatctggttttccagatagcgctggtacgagaaatggaacaatgccttctggttgacaaagcagacgaatgtcggcgggcgggtagaaatctgggtgatatagaacaccttgagccgcttgcccttgtcggacggcggctggaccttggcggtcgcgcgcgccaacatctcgttcagcgcgccggtgggcacgcgggtgccgttctggacatcgacaaaatgaatggtttcaaacagcttgtctacgcgctggccggtcttggcgctgataaaaacgatgggggcataggacatgaagctgaaatcatcttccagctttttgcgcatggcgtccatcgtgtagctgtccttctcgacagcgtcccacttgttgacagcgatgatgcaggccttgccctgctcgtgggcatagcccgcgaccttggagtcctgctcggtaaagccgactgtggcgtcgatcataatgacgcagacacggctgcgctccactgcggccagactgcgcagaacactgtagcgctccacgccgctttccaccttgccgcgcttgcgcagaccggcggtatcggtaaagataaacttgccgtgcttgttctcgaccatcgtgtcgatggcatcgcgggtggtgcctgcctcgttggcaacaatcaggcggttttcacccagaatatggttgatcaggctggacttgccgacattggggcggccgatgacggcaacggtgatgcggtcatcggtgtcctcttcctcctcctcaaaattgaggtgcgcgcagacggcgtccagcaggtcaccggtgccgtggccgtgtacgccggagaccgggatcagctcgccgaggccgaggctgtaaaaatcatacagctccatcggcggctcgccgaccttgtcgcacttattgacagccagcaccacgggcttgccgctgcgcatcagcataccggcaacgtcctgatcctgcggcgttacgccggcggacagctcagtcaccatgacgatgcagtcagcggagtcgatggccagctgggcctgctcacgcatgtgggccagcagcccgtcatcaatgcggggctcgatgccgccggtgtccaccagcaggaacttatggccggaccattcgcaatcgcagaagatacggtcgcgggtaacgcccggtgtgtcctcgacaatggcgaggcgctggccggtcagcttattgaaaatggtggacttgcccacattggggcggcccacaatggctacgatcggttttgccatgtctgccttcctccctcttatcgtttcagtttaatcttgcgtttatgactgctcaggtatgccttacagcacccgccgccatcggttgggatgctgatggcacggcagcccagctctctgccaagctgctcgagcgtgatgtcatccagaaactggcccttttcatcgcggaccatgacctcgggcacggcgagcaggtcgccctgcagcctgccgcggcactgccggatgatgtcggtgccggtcacaagcccggccacactgacattgccgccgaagaattcattgcggatcgcgtggaccgtgacctgcacctgcggatatttccgcatcagggcctcggcgcagtcccgaatgagcggtgcggcgagcgtgcccgttacaacatcaaggctgtgcggcagcacaaggcccgcgtagttatccagctcctccatgaaggtgtcatggtaaagccgccacataccgactccatcctccagctgggcaaattcatcgtaaaattctgccggggggatcgggcgctcagcggtgagataccactcgtcactgggatagacgatgctgcggccgtactcggcgcggcatcgggccgcaaattcttccagtatatcgagcgtggcggcggcgctttccttatcatacgcggtaagcttgtacaggcccttgcggtaatcggtcacaccggccggtacagcggcgatgctgcccacccggggatgcagcgccaaaagatcctgcagggtgcggcgcagctcctgcccgtcgttgatgccgcggcacagcaccagctgacagttcagctcaatgccgcccgccgcaagcttgggaagatactgcagcacctcaccgccgcgcttattggccagcatccgcacccgcagctgcgggttggtggtgtgaaccgatacaaagatggggctgatgtgcatctggatgatgcggtcgatctcatgctctgacaggtttgtcagtgtgatatagttgccaaacagaaagctgagccgctcatcatcgtccttgaagtagagcggttcccgcatgccgggcggcagctgatcaataaagcagaacatacagtgattggaacagctgtgcttttcatcgcccagataggtcttgaagttgcagccaaacggctcatactcccctttttctacttgtacggtgcggtgctgctcatgctcacacagtacaagcgcaaagtgagccggtgttgtatagaactgatagtccagtgcatcgctcagggggtggccgtcaatggccagcagggcgcagcccacggaaatacccagcctttctgcgggggaattttcatctactgccgtcacatacagggccattcgtcacactcctcttccgatggttattcaacaaaaaatggggaaggcatcgccctccccacgcaagagacttacgcctctttcttgatgacttcctggcctttgtagtagccacacttgccgcaaaccttatggggaaccttcagttcgccacactgcgggcacttcaccagcgtaggcgcctccagtttccagacattagagcgacgtttatcgcggcgggcttgagaatgctttctcttgggtacgatagccataatcggacacctccttggtgaaattcaacttaatagttgttttaatatgctaagccttgcatctgcaggggcagcattgtctgccggttggcaggaacaccctgccgccttcttcttgccgcagatggggcatagaccttgacaatcagcactgcacagcagcactgcggggacctcaaagatcaactcctgataagccagctcctcaaggtcgagacaatccttttcattgcacggcagttcaaaatcagggtcatccaaatcacgatcccgcacaaaatactcgcgctcaaaatcgtaatcacggctcagcggctcaaggcagcgcgcacactcggcatcaacatgtgcctttacatgcaacagcaacgctgcgccttcctcggtgagcgtcgccgtaaagtcacatatggccggggtgtttacacggtatcccccgaaatccgcctgtgaaaagtcagcctcataatgtgccgcatagggctttcggccgctttccagaaatgaacgaagatcaaattgcatagtacacctcaaaaggttgcttaaatagtatacacaagctgaggggtcttgtcaacacataaaacacaaaaacttgatattttttaagattttccgcacaaaatcagggcgggaagcacttccccgccctgaaatctcaaatccagtggttcagaccgttcagatgacgaacttcttcagctcctccggcaggtcggctgtgtcagcggaaaccgtgacaacaacctcgatgttggaggtgatcttgtcgattgcgttcagaaccttgacagcagcgtccatatcgtggtcgatgatgcgcaggataccgtcgatgaacagctcggtaatgtcgtagttgccggccaaaacgccagcaacaaagccgtacagcatgtcagcgccgaccacaccgtactcgtccacatcgaccagacgggccgcgtgattgatctctgtggtgagcttcatgcacttttcaatgacaacaatgttgccggaggtggtcttggtagccttgtcgatcatgtcgagcatggtcttggtcttaccggagcctttggttccaacaatcagtttcagcatagggggttacctccttatattcgtcagcgcgtataacgcgtagttccttagtctttcagggctgcttccagctctgccttacggtcctcatagccgggcttgcccagcagggcgaacatattctttttgtagctctcaacgccgggctggtcaaacgggttgacgctcagcagatagccggagactgcgcaggccttccagaagaagtagatcagctcgccgacatcgtgggcggaaaggctgtcgatctcaatcaggcccagcggcacgccgccatcagtatgagcaaggatcgtgccctccattgccttacggttgacaacgctcatattctgattagcgaggaagttcaggccgtcaaagttgccctccagctcctcaatgtagaagtcctcgcgggtgttcttcacatccacataagtttcaaacatgacgcgggcgccgtcctgcaggaactggcccatcgagtgcagatcggtggagaagatgcaggaggtgggcatcaggcccttctgatccttgccctcgctctcaccgaagagctgcttgtaccactcgttcatcatggtaaagtcaggctcaaagcaggccagcgtttccacgctgcggcccttgcggtacaggatattgcgggtcatagcgtagcgataggcatcgttatccatgctcagcttgccgaacttctcgcggccatcggcagcaccctgcatcagcgcgtcaatgtcaataccggcgcaggcaataggcagaaggcccacggcggtcaggacggaataacggccgccgacatcatcgggaaccacaaaggtcggccagccctgctcggtggccagctgcttcagcgtgcccttggcgcggtcggtggtagcgtagatgcgcttgttagcctcctcgacaccaacggaatcttccaacagcttgcgcagcacgcggaaagcgagggcagtctcggtggtggtgccggacttggagatgacattgatggagaagcgcttgcccttcgtcagcttgatgatgtcattgagcgcggtcgggctgatggtattgccgcagaagtagatcttcaggccgtcatcaacctcattgtggtacaggcccttgacggcctcgaccacggcgcgggcacccagataggagccgccgatgccggcgaccagcagcacatcggagtcggaacggatcttctgtgcggcttccttgatgcgggcaaactcctccttgtcataagcaacaggcaggtcaagccaacccaagaagtcattgccggcaccggttttggtttccagctgcttatgggccaactcgacctgcggatagattgcctcatattcttcaggacggatgaattttgtaagatgcttaccgttaaaagtaacagccatcttgaactcctcctttgttatttttatatcccaatcataccgttttctgtcggtattgtcaagcaaaacccgggggcttttttcgactttttcatgaaatttgcacaaaatcagttttgcaggatgaggctttcggtcagtctgcgcaggcagtagccgaaacttaacgcttcagcgtcctgcgccgctgtgatggggtaggactgcagctcagcgccgccgtttcgtatcgtcacgcggcccaccgtctgccctgccgctatgggtgccgtcagactttcgggcagctccacgaccgcctgcagcgtgccgccctccccctttggcatcaggtagcgccccggcgctgcataggtcagtgccaccgcgtccgtaacgccgcgcttgaccgggagggtctggggcgcatcggcaggcagcgctgcctcggcgctttcaaagtgtgaaaacccatagtcgagcagtgtggtggccgcctgaaacctctccttgccggaggctgcacccagcacaaccgcaatcagccgcaggccgtcccgctcggcactggccgagatgcagacgcccgccttgccggtcgtgccggttttcaggccggtgatgccggtatagcttttcagcagcttatttgtgttgaccaactgtgtagcgccgccgcgcagggtatccatccagacggagcagtaatcccgtacctcgctatggcgaagcagtatctcacggctcatcagggctacatcgcgggcgctggacagatgcccctctgcatcaagaccgcaggcgttgacaaagtgggtgtttgtcatgccaagctctgcggcgcgggcattcatctgttcggcaaaggcagcctcgctaccgccgatatattcggccaccgccacggcggcatcgttggcgcttgaaatgcagattgccttgagcatctcattcagcgtcatctgctcccccggctccagccagatctggctgccgcccatatggtaggcgtgctcactgacagggacagtatcgtcaagccggaccttgcccgcctccaacgcttcaaaggtcaccagcagcgtcatgaccttggtgatggaggcaatggggcggcggtcatcggcgttcttttcatataagacagtgcctgagtcctcatcaatcaggatagccgccgcacagggcaggtcaaaatcggccgccgttgacggtgtaatgcccgccgccgaggccggaaaggcgcgcagaatcgaaagcgctgccagcatcagacagagcagcagggtcacagcacggtttttcatcgcagcacacctccggcgcaaatcgctttgtataaagctatgcagccatgttccgaattagtattgcgctttgctgcagattccattataataaattgtatatgtacactctattgaaagtaaaggaatcacaaaccatgcgggtaactttttataccttgggctgcaaggtaaaccagaacgagaccggcgcgctggcgcagctgtttgaggaaaacggctataccgttgtctccaatgaggaaagcgccgatgtatatatcgtcaacagctgcaccgtgacaaacttcggcgatcagaaaagccgcaagtggctgcgccgcgccaagcgcgagaatcccggtgccgtgacggtgctgaccgggtgctacccgcaggcattccctgaggaggccgccgaaattgccgaggccgatgtcgtgaccggctccggcaaccgccgcgctattctggccgatgtacagaaggtgctggacggcgagaccgagcgtgtggtggacatccgcccacacgaaaagggcgagcggttcgaggaactgccgatggacaaatttgccgaacacacccgcgcctttgtcaaggtggaggacggctgcaaccgccgctgtgcctactgcgtgattccccgtgcccgcgggccggtgcgcagccgtgacgaggccagcatactggacgagctgcgccggttggcggatgcaggctacaaggaggtcgtgctgacagccatcagtctgcccagctacggcaccgacagcggcacaagccttgcagagctgattgagaaggcggccgccgtacccggcatcgagcgcatccgtctgggcagtctggaccccgatatgctgcacgatgaggatattcgccggatggctgcggtgaaaaagctctgccctcagttccacctgagcctgcagagcggctgtgacaagacgctgcgcgcaatgcgccgcccctacaccaccgcacagtacgccgagatcgctgataagctgcgcgaagtcttcggcgcggaaaatgtcagctttaccactgatgtcatcgtaggtttccccggcgagacggaggaggactttgaaaccagcatggcctttgtgacaggtatgcgttttttgaaggtacatgtgttcccctactcccgccgtgagggtacggcagcctacgattttccggaccagctgcccgagcatgagaaggaggcccgcagccgccgcatgaccgccgctgtggaggaggtgcgcgccgccgaggtgtgtgccgtgcagggccgcaccgccagcgtgttgctggaaaccccgctgtccgccacgatgttcaccggctatacccggcagtatctgcccgtgctggtcaacgcgccgggctgcaagaccggcgatattgtagaggtaatactcggcgaatgggacggaaagcgctgccgtgcagcgattgtgtaacctatgtaactgtaggagctgatgctcgcatcgacccctgcaaattcagtatgctaccatgcagcaaaaagaaatctacccattccgcagggaaatttccggattttacagggattttcctgcttttttgttgcctgccctcttgcaataaatacggttttttggtaaaattttaacaggagcgggtttacccgccgacaagtcacttttgtagcaaacggagcaattaaaaaggagcaaaaacaatgagaggcatttatacacccgtaacggatatccgtcgtaaggtgttcactgaggttgcccgcatggcttatgaggtcaacgagctttccgattacgagaagctgatgcgtgagctgcccttcaaaattattcccggtgaggaaaagtccctgcgcagcagcatctttctggagagagcaattatctctgagcgcgtccgtctggccatgggcatgtccctgcgcccgctggacgagagcgtacccgccagcgagggtctggagcacagtgtcatcgccgacaagtactacgagccgccgctgatcaatgttatcaagtttgcctgcaacgcctgcccggagaaaatcatcaaggtcacggctatgtgtcagggctgccttgcccacccctgtcaggaggtctgcccgaagcatgccatcagcttccgcaacggcaagagccacatcgaccagagcctctgcgtcaagtgcggccgctgcgtcaacagctgcccctacagcgccattgtcaagaccgagcgtccctgcgctgcagcctgcggcatgggtgccatccattccgatgcacacggccgtgccgagatcgactacgataagtgcgtttcctgcggcatgtgccttgtcaactgcccgttcggcgccatcgttgacaagggccagatcttccagctgatccagtccatcaagcgcggcgatgaggtcgttgccatcgttgcccccgctttcatcaaccagttccccggcatgaccccctccaagctgaaggaagccatgcgtcagctgggctttaccgatgtggccgaggttgccatcggtgctgacctttgcaccatcgacgaggccaaggactttatggaagaggttccctccaagatcccgttcatgggtacctcctgctgcccggcatggagcgttatggccaagaagctcttccccgagcaggccgagtgcatcagtatggccatgacccccatggttctgaccgcccgtctcatcaagaaggagaagcccaacgcccgcatctgctttgtcggcccctgcgccgccaagaagctggaggccagccgccgctccgtccgcagtgaggtcgacttcgttctgacctttgaggagttgatgggcctgtttgaggccaagtccgttgacttcacctccctgcctgacaacccggcagacgccttcaacagtgccagtgccgatgcccgcggctttgctgcctccggcggtgttgcacaggccgttgtgaacgccattaagaagatggaccccgaccgtgaggtcaaggtcatgagcgcacagggtctggccgactgcagaaagatgatgatgatggccaaggccggcaagtacaacggttacctgctggagggtatggcctgccccggcggctgcattgccggtgccggtacgctggctgaccccgccaagagcgttgccatgctgaacaagtacaagaacgaggccagcatgaaggttgccaccgagaccccgtatcaggattctctcgacctgctgcactactaatttataaatagcaaacgccctgtggagtgattcgctccacggggcgttttgttttgcaaaaaattatttatggtatttcattcccgcattgatcgtgcaggcgcggtagagctgttccgtcaagacaaggcgggcaagctggtgaggcagcgtgatgcgccccagactgatgcgtgcctgcgccgcgcgcttgacactgtcgtccagcccgtgagaggagccgattacaaaggccatatcccctgcaccgctcatggcacggtcggcgatcatagcagccagatcctcactcgacacctgtttgccctccacacagagtgcgacaagatacgcgcccttgcgcaccgatgcaaggatggcctcgccctccttctgcagagccttggcaatctgcttatcactggcatttttatccgcgatctgtacctccggcaattccacgatgcggaagctgcagaagccccccaatcgtttctggtactcggctacacccgctgcaaagtaggcggcgttcatcttgccgatgcagatcaaatcaatattttgcatggcagcccccttaaaactcgatgtacgggcttacctcgttgcgggactgcgtctggatcagcacatcccgtcccggctgtatgcccgccgcaagcagcacattgtacacggtggtcatcaccagttcaggcgaattattcgtctggctcaggtggcacagtgcgaattttttacagccgtcctgaatgaggtccagaatttccgctgcgcaggccttgttgtcaaggtggccgcggtcactggcgatgcgcaccttcagataataagggtacggcccgccgtgcaggctgaaggcatcatagtttgcctcaagcgccacaaggtcacagcccatcagcctgtcctgcaccaccggtgtcaaatagccaaggtctgttgccagcgccatgacatggccgtccgccgtgcggatgcgatagccgcagcagggcacatcgtggctggtgggaaagcttgtcaccgtgaaatcaccgatctccagcgtctggccgtccacgggcacggcgtccaccgccggcgggatcgtaccgcgtgaggcaagcgtgtccagcgtgtctgcacagccgtacagcggaatggggtgctttttcagaaaggtatcgaggccggagacatggtcagaatgctcatgggtgatcaggatgcccacacagtcactgaccgccagaccgagggatttcaaggctgtaagggtcgtgcggcagcttttgcccatatcaataagcagatattgctgcccgcagcggacaagcccgcagtttccggaggaacctgaatacagggtggtgaaatatgccatttattcttcctaacgctttccataaaaattgggccgccagaaagcggcccaaggtgcttttacattgcccggcttacagcgctggccggaatttccacgcggcggatatccgcccccagcgcctgcagcttttctacgatattctcatagccgcgctcgatatggatagtctcatccacctcactcacgccgttggccgccagcgctgccatgaccatcgcagcaccggcccgcaaatcggttgcgcgcagcggcgcggggtgcagctcacgcacaccctcgatgacggccacctgaccgtccacctgaatgttggcccccatgtggaccagctcatccacatagcggaatcggttctcccagatgccctccgtcacgatggaggtgccctttgccagcgtcagcagcgccgtcataagaggctgcatatccgttgggaaaccgggatgcggcatcgtcttgagcttgagcggcttcagctctccgctgcgggtgatgcgcaatgcatcgtcaaattcttcgatctcacagcctgcagcccgcagcttggccgtgacaggctccatgtgcttggggatgacattgtgcagcatgatgtcaccctttgtgatggcggcggccaccatatagctgcctgcctcgatctggtcaggaatgatggaatagttgcagccatgcatctgcttgacgccgtgaaccttaatgacatcggtaccggcgccgtgtacatcagcacccatcatgttcaggaagttggcaaggtccacgatatgcggctcacgcgcaacattttcaaggacggtcgtgccctcggccagcacggcagccagcatggcattcatcgtagcaccaacagaaaccgtgtcaaaaaagacatgtgcgcctgtcagatgctcagccttgacatgaatctggccgtactcaacggaatcctctgccccgaaggcggtaaaggccttgagatgctggtcaatggggcgcgggcccagattgcagccgcccggcatggcaacctgaccggagccgaagcgtccgagcagcgcgcccagaaaatagtagctggcgcgcatctggcgggacagctcgttcgatacctcggtacattccagatgggtcgtatcgatctcataggtactgcggctgaccatgcggatgctggcccccagctcacttaaaatctgcagggatgccatcacatcgctgatacagggcaggttttcaatcaggcattttccgcctgccaaaatcgtggcgggcagtattgcaaccgcggcgttctttgcaccgccaatgttgacatcgccaaccagcggcttccctccgcgaataacatatttttccaagtgtagctctcctttgtgcggcggtctgtccgaccctcattgcagggcaaacctatagtacacactttcctagattatacaacattttgcggtggttgaaaagtcctgttctatatatttgcaataaatttgtaaaatagtacaagttgcaggcccggcggtgaaagctttttacagaatcacatacccgggaacagcgtataggcactgaacaaaacaccgttacggagcatctcaaagtggcagtggttaccggtggagttgccggtagagccgacatagccgatggtctgcccctgcgtgacagcctgtccctggctgaccgctgtggcggacatgtgggcgtagagcgtcttgtaaccgttgccgtggtcgatctcgacatagttgccgtaggagtaatgccagccggaagcaacgactgtgccggagtcggaggcaatgatcgtggtgccgtaggcggcgcagatgtccgcgccgcggtgtccgcccggaaggcttgcccagcggctgacatacttgtagcccggcaccggccagatgaaggagccggagccgatcttggcaaccatgccgctcttcagttttgtgccggtcacggtgattttcggtgtggcggcctgcagcacattgtaggccacggcctgacggtccgttacggtcccgtcgatcatcgtggtctcataggtgatctcctccgagccgtcaacaccctcctgcagtgtcacaacctttccaaagtcgtactggtcagactcagaattctgggtgtcatagggaatcggaaccgtttctgtatcacggcgcacaaccttgaccttgatcagctccgccgaggaggcaccggtcagcagaaccgtgccctccggaatctcctgatccagcgtcagcagctccgggttcatctgcgccagagagtcgaaggaaacaccggtcgtatagacaacactctgcaccgtatccccctccactgccgtgtaggtgtggataccgccgccctccgtcagggcgctgataacatcggcataggagctgatggatttctgcaggtaaacgccgtccacaaggcggatgttgtgcgcaaaggcggtgtagacattgctgtccatcgaatcctcaaacggcgccttgacattttcaagataggtgcgcaggtggtcaccctcggtcgtgacatagagcagctgatcgtccacatagacagccgtgccgttgatgatctcatcactggcggtgcgcaggatggcgtttgcgatctcgctctcggtcattgtctgaccgccgatggccagcgtataggtcgggtaaacatcccagttcgtgtccgccgcatcggagccggcggcctgcagcaaacgcttggccgtattgatacgggactgcacatcctcgcgggcgttttcaaacacctgctcgctctccacggcaccgacatgctcgccgttcacctgaacattcagcacaaaatgcaggcccagaccgccgcgcacaacgaccacaagcgccgccgctgccacagcgggcagtatgtaggtgacagcgttccacagaagaactgaatatttccggataccgctggccagataccgcgccttggctgcgcgcacctccccggcaccgctgtcctccaactgggcgggcaattcacggatatggcggatgcccgatgcaatgcgcacaaaggggccggtcagatcctcaatcagggtgatcaggccgatcagaatcgggcgcaacaggatcagaagcagattcagcacgttatccgtgataccgtgcaccacagtgctcgccttacggcggacacacacaccgacatactcgacccagaagccgaccatgtacagcatatcgccgattgcattccggcggttgagctccttcatatattgggaggctctgcggcggttttcactgcgctttttctcctgattggtatgcgcaaaacgctcggccggctgatctgccgtctcgatgcggttttctttttcagtttgcgtgggattcaaaatacggaagctcctttccgtgtgaagcggttttgcagccctcactcacagggcagctgcgtcagggtccagccctgcagcaggttttcagcttcggccagtgcggtcatatcggcaggcagcgcgctctcgacccggacactttctgctgtcagcgggtgtgcaaagcagataattccgcagtgcagcgcatggcgggcaatcagcttatctgagccgccgtagagcaaatcgcctgccagcgggtggccgatgtgggccatgtgtacccggatctggtgggtgcggccggtgcgcggtatgcaggcagccagactatgaccgtgccctgcagccagaaccgtgtattcggtcaggctgtacttaccgtccgcgcgcacgcagcggccgatgatcgaatcgccgcgccgcgcaatgggggcctcaatacggcccgggccgagcggcatcgtgccctccacgattgcaaggtagcatttacgggcgctgcctgccagcagcggggcggcgaaagcgttctgcgcacagagcaccagtccgctcgtgtttttatcaatgcggttgacaggacggaaaataccatccttcccctgctgatgcagccggtacagccagccgttggccagcgtgccgtccgggtaattcagtgtggggtgtacggcgatgcccgccggcttgtccagcacggcagcaaacgcatcctcataggcaacggaaaacggcacaggctgcggtacaacgcttgtctcccgctcgggcgggagcgcgaagcggatacactggccggtatgcaccggctcgttcgtgcggatggcgcggtcatcggcaaaaaagccgtccccgtcatatttgacggatttgatcagcccagccgtgaccccctgcatccgcagaaagagccccagtcggcagccatcgttttccggcggcacggtatagcgcaatacggtcacagtgctgccctccttaaagcctacttgcgggtattataccacaaaaccgcacagtatgcaaatcccaatgtatggaatggtgcgcgcaaaaaatcggcacagcaaaaaacagccctcccgcaggagagctgtctgtgttatttctgtgtttgtttaagttctgctgcccgttccagcaccggcttgaggtattgcccggtaaaggagtcggggttttgcgcgacctcctccggggtgccggtggccacgatggtgccgccgccgctgcctccctccgggccgaggtcaatgatataatccgcacgcttgatgacatcaaggttatgctcgatcacgatgaccgtgttgcctgcatcgaccagcttatccagcaccttgacaaggcgatgaacatccgccacatgcagaccggtggtgggctcgtccagaatatagacggtctggccggtatcacggcgggctagctcattggcaagcttgacgcgctgggcttcgccacctgatagcgttgtggcggcctgcccgagctgaatatagcccagaccgacctcctgcagcgtctgcagcttgcgtgcgatcttcggaatattggcgaagaatacgcaggcctcctccaccgtcatgtccagcacatcggagatattcttatccttgtacttgacctcaagtgtttcgcggttgtagcgcttgcccttgcagacatcgcagggcacataaatatcgggcagaaagtgcatctcgatggtcaggatgccgccgccctcgcaggcctcgcaccggccgcccttgacattgaagctgaaccgtcccgggccatagccgcgcatcttggcgtcctgcgtgttggcaaacaggctgcggatgtccccgaacacaccggtataggtggccggattggagcgcggggtgcgcccgatgggcgactggtcaatgccgatgaccttatcgacccactccatgccctgaacctcctcacattggccggggcggctgcgggcaccgttgagcgatgcggccagcgttttatacaggatttcattgacaagggtggacttgccggagccggacacacccgtgacacagatcatcttgcccagcgggaaatccaccgtgatgccctgcaggttattctcatgtgctttgacgatgcgcaggaatttcccgttgccggggcgccgcacttcgggtacctcgacatatttgcggcccgagaggtacgcaccggtgatgctgcgcttggctttgcagatatccgccacaccgccggcggctacgatctcaccgccgtggacaccggcaccggggccgacatccacgatataatccgcctgccgcatcgtatcctcgtcatgctccaccacgatcagggtgttgccaaggtcgcgcagacgcttcatcgtggcgatcagcttatcattgtcacgctggtgcagaccgatgctaggctcatccagcacatacagcacaccggtcagggcgctgccgatctgtgttgccagacggatgcgctggctctcgccgccggacagcgaggctgcaccgcgggacagcgtcagatagccaaggcccacacttttcagaaaaccaagccgctccttcacctctttaaagatcggcgcgccgatcatctcatcgcgggcactgaccttggccgtgctgataaactccagctcctcgttgacgcttttctcgcagaagtcggagatattgatgccgcccaccgtgacagcaaggctggtcggcttcaggcggcggccgtggcaggccgggcaaacctcgctggacatgacgagggcgatttcttccttgacccactcgctgcttgtctcgcggaagcggcgctcaaggttggggacgatgccctcaaactggttgtagtaggtgccggagccgaacatgctctcgcgctgcatctcgatgcgctcctcaccggtgccgtacagcagggcatgcagggcctccttgctgaaatccttgatgggggtgtcgagcgtaaagccgtaccgcttgcccaatgcgttgtagctcatctcggagatcgagccctcggcataataccagccgctggccttgatggcgctctcacggatggacttgcgtttgtcgggaatgacgcgggcggggtccaccttcataaaggtgccgaggccggtgcatttctcacaggcaccgaaggggttgttgaagctgaacatccggggggtcagctcctcgaccgagacaccatgctcagggcaggcatagctctggctgaacatcatcggttcaccgccgatgacatcaataacaaccagcccgttggcctgcgccagcgcggtctcaatggaatctgccagacgaccgcgaaccgtatcattgataacaaggcggtctaccacgatttcgaccgtgtgcttgatgttcttctcgaggctgatttcctcgctcagatcatacatattgccgtcgatccgcacgcgggcaaagcctgcgcggcgggccgcatccagttccttagcctgcgtgcccttgcgggcgcgcacgaccggtgccagcacctgaaagcgggtgcgctccggcagcttcagcacctcgtccaccatctcgtccaccgtctgctgcgtgatctcgcgtccgcagatcgggcaatgcggcacaccgatgcgggcatacatcaggcgcaggtagtcgtagatctcggtcaccgtgcccacagtagagcgcgggttgtggcttgtggtcttttggtcgatcgagatagccggggaaaggccggtaatctcatccacatcgggcttttccatctgccccagaaactggcgggcgtagctggaaaggctctccatatagcggcgctggccatccgcaaagatcgtgtcaaaggcaagacttgacttgccggagccggacaggccggtcatgacgatcagcttgtcacgcggcagcgtcaggtcaacatttttcaggttatgctcccgcgcgcccttgatgacgatgcggttgttcgggtcgattttgatttttgaattgcgctttgcaggcgttttttcgggtacggtactcaatttactttttcctcctgcccttgcgtgttttggcggcggctctgcgctcactggtgtcagccgcagtgggatcctcgccccgttccagacgctggatctcatcgcgcagctgggcggccagctcgaactgcagcaggcgggcggcctctttcatctctttagtcagccgctcaatggtctgctgccgctcggcgcggctcatgcggtgctggcgcatccgcttgttttcctcgctcatgctgatttccagcccgccgccgatggccttgacgatggttttcggcgtgatgccgtgttctttgttgtatgcgtcctgaattgcgcggcggcgctcggtctcggtgatagcacgctccatgctgggcgtcacctcatcggcgtacatcagcactacgccgtttgcgttgcgggccgcgcggccgatggtctggatcaggctcgtctcgctgcgcaggaagccctccttgtcggcatctaggattgcaatcagcgaaacctccggcaggtcaagtccctcgcgcagcaggttgatgcctacgatcacatcaatggcaccgacgcgcagatccttgatgatctccattcgttcaaaggtatccacctcatggtgcatatatttggttttgacaccgtgctcctccagataatcggtcagatcctcggccatcttgacggtcagcgttgtgaccagagcgcgctcaccgcgctcaatgcgggtgcgtatctcacccagcagatcctcgatctggccatcgaccgggcgcaccacgatgaccgggtcgagcaggccggtcggacggatgacctgctctgctacacggctggaatgctgacgctcgtattcgcccggcgtggcagagacaaatatcttttgatgaatcttcgcctcaaattcctcaaatttcagcggtcggttgtcgaaggcagacggcagacggaagccgtactccaccagcgtttttttgcggctgtagtcaccgccgaacataccgcgcacctgaggcagcatgacatgactctcatcgaccatcaagagaaaatcatccgggaaataatccagcagcgttgtcggggtcgagcccggcgcacggccggacagcacggcagagtagttctcgatacccttgcacatgcccacctcctgcagcatctccatatcatagttggtgcgctgctggatgcgctgggcctccagcagcttgccctcctcggtgaatttttggacctgctgctccatctctgtgcggatctttttcagcccctcctgcatcttctcaggcccgacaatgtagtggctggccgggaagattgccacatggcgcaccacatttttatgctcgcccgtcagcgggtcaaattcaataatgcggtcgatctcgtcaccgaaaaattccacccggatcgcaaattcatcgttgtatgccagatgaatgtctaccgtatccccttttacgcggaatttgttgcggatgaagttcatatcgttgcgctcatactgcagcttgaccagtcggctgcaaagcacatcacgctccatctgcataccggggcgcagactgatgaccatgctgcggtagtcaatggggtcacccagtgagtagatgcaggataccgatgccacaatgatgacattgcgccgctccgacagcgcggccgtagccgagtggcgcaagcggtcgatctcgtcattgatggcactgtccttctctatataggtgtcggtggaagggatataagcctcgggctggtagtagtcatagtaggagacaaaatactccaccgcatcgtccggaaaaaagctgcgcatctcggtacagatctggcttgccagcgttttgttcggctccagaatcaatgtggggcggttgcaccgtgcgatgatgttcgccattgtgaaggtcttgcctgagcctgtgacacccagcagggtttgggcgctgtcgccctcctcgattccctgcaccaaagcctcgattgcctgaggctgatcaccggtcggctggaacggtgcctgtaaatgaaactgctgctcttccatagcgcatcctttcgcgtacaacaattagttgtatattgattataacacgacacctttaccctgtaaagccccctgtccatattttgtacgcagtgggcctgaaaatgcgccctgccggtttgggcggcagggcgcggggcaggtattatgctgtgaggttaagggcgttatcggcttgcggcttgcacaacgccgccgtccgcacggtattccggcaggctgccgcgcatgagcatcgagcaggcatcctcccccgccacaataatatggtcgatgatcgtaaagccaagctgacctgtgacctccataatgcggtaggtcgtcaggcggtcggcctccgatggcagcgccagcccggagggatgattatgggccagaatcccgcaggtcgagttggtgcgcgccacggcccgcagcagcttgcgggtgtcaaccgtaacacggtttggcaccccctcggcaatgcgcagatcctgcatggggcggcaggcatcgtccagcaggatcagatagagctgttcattctggatgccgcggaacagcggcttgacatatgcaatggccgactccgccttgcacagcgactggcgggtgacgcgctttttcaaggtataatagcggctgtacgccatgacggtcgaaatcagatgggcgcttttagggccgatgccctctacctgcgccagctcctccggctcagcctccataaccttgcagaaatcaccgaaatgctcgatcaggcggtgcgccagctcattggtatccatgcgcgggatggaaaggtacagcagatattccagcgcttcatgctctgccagactttccaaaccatcgcgctcaacgcgggcctgcatccgcgcacggtggttttcgtgaaggttgctcgctgccattttttctcatcccctgtctttaccttttactgattttattatatactctataaaggcgtttgccaactattttatcaagtggaatcccggataattataaggcaatacccccgcgcggaattgtgcggactgtttaacgatcatagtgaggatacgatgaaaagttttaccgcaggacagaatgagaacggcgttcgtctgagccgttttgttgagggtgtgaccaaggacatgccccgcagcatgatgtacaaggcgttccgcaacaagcgcatcaaggtcaacggcaagcgtgccgagcctgacacccggctgcagaccggtgacctgatcgagatgtatgtcaatgatgagtttttcccggcgggcggccctgcagtaaaagcggccaagacgcccagaaagcagcctcctgtcacggtcgtgtatgaggatgacaactttgccgtgctgtacaagcctgcccacctgctctgccacagcgaccgtaccggcgaccccaatcttgttgatgcctttgcagcgtatctggaaagcaagggtgaatatgacccccgcgccgaaaagcggtttgcgccggcgctctgcaaccgcctcgaccgtggcaccgaggggctggtgctggcagccaaaagctacaccgcgctgcgggatctgaacgccatcatccgcgatgatatgatgcgcaaggaatatctgactatcacggtgggcgcgccgccgcagggccgcttcatagcgtggctgcagcacagtgaaaaaggcaacaaggtgcgcatccatgcgcgggagagcgagggctataagcagatcatcacggaagttacggtaattcgtcaggcgggtccctttgcgctctgccgtatcgggctgattacgggacgcacccatcagatccgtgcgcatctcgcgtatctgggccaccctgtgcttggcgacatcaagtacggcaaccgcaagatgaacgagcgcaccggacttaaaacacaggcgctctgtgcccagcggctcacctttgggcgtattccggaggagaacacactgcactacctctccggaaaggtcatcaagctgaatgaccctgagattgtcaacacctttgaccgcctgacggcggaacggtaatgcgccgcgccatcatcttttaaaaaatgccgggccgtctccctgaagcggggacggcccggcagctttttatgccagaacgaaatggtataccagagaaagcgctacgatcagtgcgcaggcgatggccgtgatgggcggtgccagacgaatgatgcgctctgccatgacatcgtcctcgctggtctcgtcgtcatcggcgtagcggccgcgcttcttggactttttgcggtcatcgtaatcgtcatcatcgtcataatccagatcatcggaatcgaacatctgggtgccctcatcatcgtcgtcctcatcgtcaaacaggcggcccttgggggcataacggcgcacacgctcagcctcctcgtcctcatcgtcctcggactgcggctcaaaggcagcggtagcctgctcaggctcataggcctgctgcggcgggatctcctgctggccggtgatggcggcctgcacagcggctgccgtggcacgcggatcgctggcggccggcgtcggctgcacctgaggctggggtgctacactgctggcaacagaattaacctcctgctgctggcgctccaccgcctgacgagcctcctccagaatggaggtcagcgtagccttgatggaggcgcggtcaccgccgcactccgagcagacggtggtgttttcctcattgggatggaacgcgccgcaggcgcagaaccagccgtactcgttatcctggggtacgcaggtcagctgagcattgccggtgcgctgctgcagcgtcttggcaatggagccgggcagcacacggggcaaattgagccgcacacgcttatagctgcgcaggtcaacgccgcggccgttcaggaaagcgcggtcctgctcgacctcaacgctggaaaccggcgtatcgctgacataaacggcatcatcactgccgaacacagcgccgggctgggcgttgagctgctcatagtagaagtcatcctcacacaggacctgacctgcggcatccttgcatttgaagtggacgaccagaccggtcagcggctcggtgccgacattcttgaaggtcaggcagactgcgacctcaccggtcatatcgcccttcagcagttcgacacgcacgaactgcaccgggctgccagccgtgtaatagtttgcgcgggactgcgccatcagggtaaaattctgatccatagtttacacctactctttactcttgcgtgtcgggctgggcattctccggctcggcaggctgcggggttgcgggttgttcggcaggctgcacaggttctgcattttccggcgcaggtgcttcgggcttggcggtctcaccgctggcgatgtcatagggcggcagggtcccgccctccatcagcgtcttgaactcctcgccgctgatcttctcgcgctccatcaggacgcctgcgaccttgtgcagctcgtccatgtgctcggtcagggtgcggcgcgccgtctcataggcctcatccacaatatcgcggatctcgttgtcgatttcggaggcgatggcctcggaatagccctttccctgaccgaaatcacggcccaggaaggtttcgccgggatcgctgccgtagacaacagggcccatccgctcagagaagccgtaccgcgtgaccattgcgcgggccgtatcggtggcgcgctgcagatcgctggatgcgccggtggaaatatcctccagcacaagctgctctgccacgcggccgcccagcagcgtcacgatattttcaaacattgcggtcttggtgatatagctggggtccttttccggcaggtacatcgtatagccgcccgcaccgccgcgggagataatgctgatctggtgtaccgggtcatggtgcttgctgaaatagcctgtgatggcgtggcctgtctcatggtaggcagtcaggcggcgctcctcatcggtgacaacatggctctttttctcagggcccatcataaccttgaccgaggcttcctcgatttccttctcggtgatggccttcttgccctgtcgggcggccagcagcgcagcctcgttgacgaggttttccagatcagcgccggagaaaccggcggtggagcgggcaatcgtcttgaggctcacatcggggccgaggggtttgttcttggtatggacgcggagaatctcctcacggcccttcacatcgggcagaccgacatagacctgacggtcaaaacggccgggacgcagcagcgccttatccagaatatccgcacggttggtggcggccattacgatgacaccatcgttggcatcaaagccgtccatctcaaccagcagctggttcagggtctgctcacgctcatcgtggccgccgccgagacctgcgccgcgctgacggcccactgcatcgatctcatcaataaagatgatggagggcatagtcttttttgccttttcaaaaaggtcacgcacacgggaggcaccgacgccgacatacatttccacgaagtcggagccggagatcgcgtagaacggcacaccggcctcgccggcgcaggcgcgcgcaagcagggtcttaccggtacccggggggcccaccagcaatacgccgtgggggatgcgggcgcccagagagttgaacttgccgggtgctttcaggaactcaacgacctcctgcagctcggccttttcctcgtcagcaccggcgacatcggcaaaggttgccttgcgctggttttcctgctgatccttgaccttggcgcggcccacattcatgatgccgccgcctgcaccgccgcggtacatcgacatgaacagcataccgatgctgccgatcatcgccacatagaagatgatctccagccatggcacgctggtcttggcggccacatagtcaaacaccataggggcatccggatttgcagcgttgtattcgtccacaaagtcggatatctttccggtgttgaagtcaccgccgtagggcagcttgtaggtcatatacaccgtgccgccgttggcggggagcgtatcattgtccgtgctgcccatgctcagcagaccgccgctgggcatggtagtcgccgcgttggactccggcagggcggccttgccctccttgagccacatttcaaggctgccggtgcccagatccagacggaacgaggtcacctgctggttttcaaagtagtaatagatttcggagtaggtcgtgtctttattgccggacgctgccaacaggggcgaaaggctgacgaagaacaggaccaacaccatcaggacggccaccacaaggatgccgctgaatttcggttgtttgtgctgcaagaaatcaactcctatccggtgtagccaccgggcattttggttttatggctcagccggaatatacctccggcttgagtacgcctacatagggcaggttgcggtatttttcatcgtagtcaaggccgtagccgaccacaaattcatccgggacctcgaagccgcagtaatccggctcgatgtccgccatacggcggctgggcttgctgaggatggtgcagatcctgacgctgttgggattgcgcattttcagcaccgggaccagcttggacagtgtgatgccggtatcaagaatatcctcgacgatcagcagatccttgccggtcaggtctgcatcaagatccttgatgatcttgacaaggccggtcgaggatgtgttggcgccgccgtagctggaaacgaccataaaatcaatggcgcagggcatcttgaccgcacgcatcaggtccgccataaagacaacggagcctttcaggatggaaaccatcagcagatcctttccctcataatcgcgggtgatctgctcgcccagtgcagtgactctggctttcagttcttcttccggcacaagaatgtggtcaatatcgttgtccatgttgtgcataggattatgcctcccctgttttctctgtccgcaccgtcagtacctcatgggtgtactcatcgggggcgcatccctcggcaaagccgcaaccccacagccatagtacctcgctgccgtccgccagcagcggcagcagcggccgctctgcctgcggaataccgagttcattgtaatattttttgagtgtcttgcgcagatggcgtccgcccgggcggaaaaaatcccccggctgccttgtgcgcagaataacattcccttgtattttagcacaatctgcgcaacagtttaagtcttttttgaaaattggttgattttttagaaattcttcatactttacgacctgaaatttcacaaaataaccacccggcaggcgatatgcacccggttcaaagggctgcggcggggcgggcagcctctgcgcaccctctcccgtcaggcagacaagcagtccgtcacggagcttatagttcacctgcggggtcagctgaacgccgccctcccccttcaaaacgagaaagcgaagcaggctgacatacttttcctccgcatcgcgcacagggctgaccagcgcgcggagcgctgcgtccagcaccggtccctctgcgcggcgcagggtggccgcgtcatagccgcccggcacagcggccgcctgcaaaagcgcggcggcctccgccgtaagccactcgtccatggcgcgcatctggcggcagagccgggcaatgctgcgttcggctgccgggtttgcatattgcagcgccgggatggcatcgtggcggatgcggttgcgggcgtaaacatcctcggcgtttgtctcgtcctgtatgtagtgttgccccagcgcggcgcagtatgcctcggtatcagcacgggtcaggcagagcatcggccgtacatagcagccgcggcgcggcggtatgcccgccagcccgtggaggcccgtcccccgcgccagacggaacagtaccgtttccgcctgatcggacattgtgtgcgcggtggcgatgacagcctcctgccgggcggccagctcatcaaaccagccgtagcgcagcccgcgcgcccagtcctcactggggtggggtgggatctcgattccctcctgcgcagcatcatataagaacagctcaacgccgttttggcggcagaaatccgccacaaaatcagcatcgcgcacggccgccgcgccccttatgccgtggttgacatgggtggcctgcacctcgatttcaagtgtgcggcggtggcgcagcaaaaaaagcaacaaagccattgagtctgccccaccggagcaggcagcaatgactctgtcgccagacttgaacagaccctgtcggcggcagtccgccaaaagagtctcctccatacgctgtactgttttttccgcgtcagaattcatggctcacatccagattgctgaaccgcgtgtgggcgccgtcccagccaaggcggacaacgcttgtctcaccgtggcggtttttagcgacaatgcactcggcctcattctcgttggcctgactgtcctccccattctgggcgttatagtaggctgcacggtagaggaacagcacgatatcggcgtcctgctcgattgagccggagtcacgcaagtcagacagctgggggcggtggtcagaccggcccgccgtcttttctgccgcacgggacagctgcgaaagcgcaatgaccgggacattcagctccttggccatgatcttcaggtttcgggtaatgtcactgatctcttgcacgcggctctcggtgcgcttggcgctctgcatcagctgcagatagtcgatgatgaccagcccgatcttttcctttttggggtcctgattgatcgtgcggatcttcgccttgatctccggcaccgaaatgccggaggaatcgtccatataaataggggcgttgtagagcagcgaggttgcctgtgcaaagtcgttccagtcggagttgttcaaacggccggtgcggaacgcctgactgtcaatgttggccgtgctggaaaggatacggtccgtcagctgctcgcaggtcatctccagactgaagatgatcgtggggatcttctgctggcgggctacattcgttgcgatgttcagcgcaaacgaggttttgcccataccggggcgggcggccagaatgatcagatcggaccgacccagaccggtcagcacggtatccagatagttaaagcccgtcgggatgccggcgaacttatcgcggtcggcaccgctgagcttctgcatcgtgtcgatgacctcgagaatggactcgcggatggtcttgacgccggtcttgtcgcggccggagcggatgtcatagatcttctgctcggcgctttccagcagcaggtcggcgtcctcgccggaggccgtctcgctcaggataccgcgggccgcatcgatcaggcggcgggcctgatacttctccttgacgatcttgaagtaggaatcgacattggagatggcgggcaccgtctcggcaatgcgggtgatgtagaccttggcgtcatcggcgctggcaaaggtcccgccgttggcaagggcgttgaccagcgtgatgacatcgaccgcctcgctctcggtataaagcgcgcgcatcgtctcatagacggcacggttctggtccgagtagaacatctcgggttccatgtctgtgatcaggcggttcagcaccgtctcatccatcagcgcggcgcccagcacgctctgctcggcctgcatattgtagggcatctggatgcccaggctggacaggcttacttcctcatttttcggcatggcggacatcctctcccttcccgcaaagtaattacagctcctcgaccttcagcttgaagggagcgacaacaccggcgtacagacgcaccgaggcatcgtagctgccgaactccttaatggcggagggcagctcgaccttcttcttgtcgatctcggtgccggtcagggccgtcagcaggtctgcaacctccttgccggtgaccttgccgtacagcttgccggacgcaccgcccttgaccttagcggtaacggtctggcccttgatcttggcggccagagcctcggcagcagcgcgggcttcggcctcgtggtgggccttggcctcgctcttggtgcgggcctggttcagggcagcggcatctgcgggggctgccagattgcgcgggaacagaaagttgcgggcgtagccgtccgaaacttcatggatctcatctttcttgccaatgctcttgacgtcctgcttgagaatgatcttcataaggatttccctcctgaatttatatcccggttaccgtgcggtattttccttttgcgccgcgcggtacaggtcaatttgttcacggatgcgttgttccgcatcctccagcgtgcagttctgcagctgggcgcccgccatcatcagatgaccgccgccgcccaagggctccagaatgacctgcacattcagcgcgcccatactgcgcgctgagatattgacgccgccgtttttggcgactgccacaaagctggcgtccacaccgttgatggtcagcagatcgttggccgccatcggcagcacaacattcatacccgcatccagctcgtcagaaagggctatcgcgcagcccctgtatatgtaggccccctccacgatatgggcgcgggcctcatactcctccttcgaggtgttgaaaagcagcttggtgtcggcagtctgggcaccgcggctgcgcagccatgcggcagcctcaaaggtgcgcacacccacatgcagcgcaaagctgcgtgtgtcgagcataatgcctgccaacaatgcgtttgcctccagcggggttatgttattctccttgggcatgaactgcagcagttcacacacaagctcactggcgctggacgcatagggctcatggtagagcagcagcgggttgtcgatatggcccaccgccatacggtgatggtcgatgacaacgacgcggctgcatttttcgtaaatcttctggctttcaagcaggcgcttctggtaggtgtccaccacgatgagcagtgtgttgggtgtgatgacatccagcgtctgatccggggcaataaaatcatgcccctcccctgcattgatcacggctttaagcagcggtgctgccagtgtagcctcgctattgacggcaatgaccgccgggacaccgcacatcttgcagatgcgcagaacgccgatggccgagccgatcgcatccagatcggacatgcgatgccccatgatgatcacgctgtcgctgcggcggatcaggtcgcacagtgcattggctatgatgcggctgcggacatggctgcgtttctccacaccgtgggaaatgccgccgtaaaattcaaagccatccaccgttttgacagccgcctgatcgccgccgcggccgagggcgatgtcaatgctctcccgcgccatctggtgacattcctgcagcgttttgccgccgtggccgacaccgatggaaagggtcgtaagcccgccggggtgcagcgcgcgcaccctgtccagaatgtcataccgtccctccagcatccagcggacatcgcgttcctcgaccaccgcaatatagcggctgtttgaaacgcggcgcaaaaagccggtgctgcggccgatatactcctccaacaggctgttgatggactccagttccttggcctgctcgctgtccttcatatcgtcaaacagctcgtcatagctgtcaatgacgataatcaggcaggcagggcggctctcattatactcgtccagtgtttccttgtaaaaggtatcatcgatcagatacacaaggctggcaccgcggctgcccttggctgtggcggagtaggctgtaaagcgccgttcccccactgtaagatcctgcccgtgcgggcgggagcagacggccagatccaactccggcagaacgcggtccaccgggcgggtcacggcgtcacagtcgccgaggacctgctctctgaagtggccgttgtaccacaggatacgcccgtcattcacaagcacggtggcgatgggcaggttggtcagactgtactggatgcggctgttctcaaagtctgtgctgcagagctgctttgccagaaaggcgcgcagacggcggcgctgataaagcaccacgcacagcgcaataaggatcagtaccgcagggatcgccagcagctgcggcttgaccagtgccaccggcacaaccatgacggcaaccgctgcaagcaacagcagcatgacggcggctatatccagaccatccttgtgtttcatcgtacactcccctgttctatcaggaaaaagcatttcgtccataccgcacaagtcttaggtgccgcatccgcagagcgatgcttcaccttcaggcgggaatcgtgcggggttgcctttatacttccagcagaatcggcaggatcatcgggctgcgcttggtgcggcggtaaatatagctggagagcgattcccgcacacgagcctttacgctggcccagtcatgcatattgtcggcgaggctgcggtcaagggccatctcgacctgcgtgcgggctccctccatcagttcctcgctctcgcgcacatagacaaagccgcggctgacgagatcggggccggacagcacctgcccgttgctgccgtcgatggcggccgtcacgatgatgatgccgtcctccgacagatggtggcggtcgcgcaggaccacattgccgacatcgccgacaccgtagccgtccaccatcacagcgcccgccgtgacggtattctcaacggtcatgccgtccgcagagatgcggatattctggccgttctcggcaatatagatattctgcttggggatatagcccagatgctccgccgtctcggcgtggcgcttgagctgcttgaactcaccgtgtaccggcaggaagaactgcggatgggccagcgtcagcatgagtttctgctcctcctgacaggcgtggccggacacatgggtgtcatacatgttctcgtagataacctcggcgcccagcgtcagcagaccgttgacgaccttcgtaacagtcttttcattgccggggatgggccgggccgagatgatgatgaaatcattggggccgacgcgcacctgccggtggctggcctgcgccatgcgggacagcgcgctcagcggctcaccctgactgccggtggtgatgagaacgaccttctccggcgggtacttgttgatctcgtcgatcgtgataagcacattgtccggcgcgtgcaggtagcccagctccttcgccatctcggtgttggaaaccatgctgcggccgctgacggccaccttacggccagactcaatggccagatcaatgatctgctgcacgcggtagatgttggaggcaaaggttgccacgatgatgcggcgcttgccagccttggcaaacaggcggcgcactccttccgcgacagtctgctcggtcgcggtaaagccggggcgctctgcgttggtggaatccgccagcagtgccagcacgcccctgcggccgtactcggcaatggtgggcagatcggtgacggcgtcaccggacagcggcgtataatcgaccttgaagtcaccggtatggatgaccacaccggccgggcagtcgatggcaaaggccagcgaatccgggatggagtggttcacatggataggttccacggtaaagcagcccagcgtgaccttctggcgggggcggatctcatggaagatggcgctggacgccagaccatgctcctccagcttgtttttgatcaggccgatggtcagcttggcggcgtagatcggcacattgaattttttgagcaggtatggcagactgccgatgtgatcctcatggccgtgggtaatgaacagacccttgatgcggtccttattctccagcacataggtgaaatccggaatgaccagatcaacgccgaacatatcagcatcggggaaaacaaggccgcagtccaccaggatcatatccccctggcattcatacagcgtaatgtttttgccaacctcgccgaggccgcccagcgggcagatgtgcatgggggtggccggggtcatctcatagtgctccggcgcacgctgcgggcgccggccgcggcgctgggggcgcggggcggtattctgcccggcggcagcgttctggctgctctggcgcgggcggcggggccgcggggccgggatgctctgcacggcggcctgttctgcggcggcaggggctgccgcgcgcggcttgcgggtgcgcggcttatgctgcgcgggggcagcggcattctcgccctgcggcttgggtgcgcggggacggcgctgctgcggcgcacggccggtattctggccagcctgaacaggctgggtgttatttctgcgtttcggcttaaactcttccatcgaaaacctccgaatcatcgtatttccgggctgatacctgcctgctgcagataccgaactccctgtcaaacggttgcgatttatgtatttttcagagcgattacactcctatgcctatgagatgggcgcggaaagcccgcctgaaaagacgcggccaggcccgataaaacacacacattgcaattacatcttattataatcagaatcggcgtccatgtcaaatcccttgccatatgatttcaaagcgggtataatagaatattatagacagaaattcggagtgcaacacatgaagcagattgaaatttatacggacggtgcctgcagcggcaaccccgggccgggcggctggggggcgatcctgcggtttcgcacggcgcagaaggtgtatgagaaggagctttccggcggggaggcaaacacgaccaacaaccgcatggagatgacagccctgctggaggcgctgcgccagcttaaagagccctgcgccatcgacctgtacagcgacagcaaatatgtcatcgacagcctgcagaagggctgggcaaagggctggcgcgcacgcgggtggaaaaaggccgacaaatcccctgctttgaacccggacctgtgggccccgctgctgaccgagagcgaaaagcatgagatcacctaccactggctgaagggccacgcaggccaccccgaaaacgagcgctgcgaccggatggccgtagaacagagcaaaaaatacggcgggcgtcaggcctgagcccttactgtaaggagaaacagcatggatggattcaatacttttgaaaagcaggataaggtcctgcttggtctgaacagcggccgcgatgccgccgctgcactgcgtattttgcagcagcagggctttgccgtgcagacctttaccgcagaaaatgcagtcactcccgccgagctgctgcgcctgctggcagacaaggctgccgagctggactgtgcgttcatcgccaccggccactatgcgcggattgaggtggacggcgagggactgtcccatgtgctggccgccgaggatgcagaggccgaccagagcgcggtgctggccgacctgccgcaggagatactgaccaaactcgtcctgccgctgggggatttcaccaaagcggatgtggaggagatgctggcagaaacagcggaataatgaaagagcgcctgtgcggattttgaagccgcacaggcgctttgctttttgcgttcgctttttccgcagggccttctgcatgtctgaaggtcacagctttctgatggggtggcgtatcacggttttcagtttatccggggctgttttgcgcacatcggagaggtagatttcatggtggcggcgtgtctgtgtcaagtcattggtgtagccgttggctgccaaaaaagcatccatggccgcaaccgtctccggctccttgtcgtaggggccgatgtgcatgcactgcacgcacagtccctcctcaacggtcagaaattccacggcagagaaatcctgcttctttttcgctgcagcctcctgcactgcccacgcgaaatctgcctttgtcacaaagtccggcagacggataacggatacccacacaaagcgctccttatgcgcgtaatctatggcgtccgtaccctcctgctgccagaatccctcgagcggcgggacaacataatcaaagtatccctcgatacggtggtcgccctttttgctcatcttgatggtataggcaacgccgtacaacaggccaatggcctgcttatacgcgccgttctcctcattcgggtcacccttgccgcgcacggcaaggtagttcatcggcggcaccgtaataagcgccggctttgttttgggcaggtaaaactctttgtattccttcttgaaatcaaaggccatatgcagcccccttattttttctttttatgcttcggccagggccaccatttgccttctttttcgtgcatccagtgggctaagggatagaacagcagcgccagaccgccgagcaggatcaggataaagagccagtttgcaaaggtgaaaatgacatccagcgcagccagtgccgccagaaaaaagccggcgtacatcatgaactgcccgttgtgtataacatagccgttccagttttcggggcgtatctcctcacggccctgatccccccagacgcggggattcttcatcgtggaatagccgtaaaaagccaacaccatgccgatgacaaacaaaaactcaaacaagggtattgcctcccgatattattttttgaagaaagggctgaaatcgaaggttgcgaagtaatccgccggtgtttcggcacggcggataagctggtgggagccgtccgccttcagcagaacctcggcgctgcgcagcttgccgttgtagttgtagcccatcgaaaagccgtgcgcaccggtgtcgtggatataaacgacatccccgatctcgatctcgggcagcatgcggtcgatggcaaacttatcattgttctcgcacaggccgccggtcacatcgtacttatggtcgcagggggcgtcctccttgcccagcacggtgatgtggtggtaggcgccgtacatggccgggcgcatcagattggcggcgcaggcatccacaccgatgtactccttatagatatgcttctgatgcagcacggtcgtgacaagcgcaccgtagggggccagcataaagcggcccatctcggtgaaaatcgccacatcgcccataccggcgggaaccagaatttcctcaaactttttgcggacaccctcgccgatggctgtaatgtcgttgctgcgctggtcggggcggtaggcgatgcccacaccgcccgacaggttgatgaacttgattctggcgccggtgcgcttatgcaggcggacagccagctcaaacaggacaccggccagctttgggtaatagtcatcggtgacggtgttgctggccaggaaggagtggataccgaactcctcggcaccggtagccatcagtttggtgtatgcctcggccatctggtcctcgctcatgccgtacttggcatcgccggggttgtccatgataccgttgcccagctcaaacacaccgcccggattgtagcggcagcatacggtcttgggcacacccgcaaccttctcaaggaattcgacatgggtcagatcatccagattgatgtacgcaccgaggtcgtaggcttttttcatatcctgcgccggggtgtcgttggaggaaaacataatgtcactgccccggaagccgcaggcctcgctcatcagcagctccgtatagctggagcagtcaacgccgcagccctcctcctgcaggatcttgagcaggtaagggttcggcgtggcctttacggcgaaatattctttaaagcccttgttccaactgaacgcagcgttgaccctgcgggcattttcccggatgcccttctcgtcatagaggtggaacggagtgggaatatcggcggcgatctctttcgcctgtgcaagcgtgataaacggcactttcttcgtcatggtacactttcctttccctcagtatactttcaaagatacttctattatatacgctttgccgaccgacagcaataggcaatgcaaaaacagacacactgtaaaatgcaaaaagggccgccccttagcgggacagccccaaacattataaaatcggctccgcgtggtcgccctgtatatgcagcttggcagccagcagacggttgtccagctggcggcaggtccatatatacgcgggatagaggaatacgcaggcagcgatccacgcggccgggttggacagctcggcaccgaagtagcccagcaccggcaccagcgcaatagccaccaccgtgcgggccaccatctcagccacaccggccatcatggcaagcgttgagaagccgagaccctgaatggtgtagcgccagacgatcaatgcccccagcggcacgaagaatacgctgttccagaacagatattcgcgccccatggctacaatgtcaacttccttggcagtgtccagaaacagccccatgatctgcacatcaataaaatgcaggacgaaagccgatgccacaccgtaaatcaaaataatgaggattgcgctgttgacgccctgccgcacacgatccatccgggatgcaccgaggttttgcccggcgtaggttgccatggccgtgccgacgctctccatcggaacggtcagcaggccctgcgtcttgcctgctgcggtgacggcggcaacggcggtgctgcccagcacattgaccgcccattgcatgatgacgctgccaatggccgtgatgctgcactgcagacccatgggtataccgatgcccagcagacgggcgcaggcctttttgctgtaggcaaagtcagatttctgcatcttcagcacatcaaatttacggctcagatagataaagctcagcacaccggaaatgacctgcgagatgtcagtggccagcgccgcccccagaacgcccatctgaaacgggatgatgaacaaaaggtcgagcccgatgttgagcgcactggtcagaatcagaaaatacagcggcgttttgctgtcgcccagtgcgcgcatgatggccgccaccatgttgtacaaaaagatgaacggaattcccgcaaagatccagccgatatagatgacagcaccgtcaaggatgtcctcgggcgtctgcatcagctgcatcatggggcgcgtcagcgccacggtcgtcacggtcagcaccacgctgcccgcaatgcaaagccacgcggcattggccacatggcggcgcagatcactgtaatcccgcgcgccgaacagctgcgcgatggggattgcaaagccgttgcacacaccgatgacaaagcccagaatcagatagttgaccgacccggtcgcgccgaccgaggccagtgcactgacaccgcagaagcggccgacaatgatagtgtccgccagcgcataaaactgctggaacaggttgcccaacaccagcggcagcgtaaacatcagaataactttgagcggactgccgctcgtgaggtctttcgtcataattttcccttaccctact

SEQ ID NO: 14026 - DNA, 39252 bp, Unknown
  gut microbiota DNA sequence
tagctcagtaaactgttttctttgatacctgattgtagttcctttatcatacttgaattcggacatttcgagtctatttcaaaagaataggtggggtgtttatccaaaagtccggcgttctctaccagtttatgtatatcgctaaaactcatttccacctttgtattgtttccgctgcttccgctccatgtaaaaacaacgccgaccgcagcatcgtaggagacagtgcataccccgcctgcagtcgggatacccttccagttgtcggtatctccgtccttcttatagtgcgtgatgcccgcaatcgtgatggggtccatggactgccagtcatcctgcttttgtttgaggtttaccgttttgacctgattctccgtgtcgttggtcagcgaggccgtcagcacctccatatacgcctcgcgcacatggagaatgtccgcagtctcaaggcttttctcaatatatccctgcagggcgggtatcagcatcgccgcaagaaccgcgagaatggtaagaacaacgatcagctccacgagggtgaagccacttttgttattctgcagtttgtatttcattcattcctcttgtcaataaaacaatcccccgggctttgggtaaaagcccggccgccttctgacagttaggattgctttgacaagtggtgattatcatacctgtcgcattgcccctcaggccccaaacagtcagtcgcatgtggtattatagcagaagatgaattgtcatacaacaggaaaagacaaaaaaatcgcaagatttttcaaataagtatgtgctttatttgctttcccctgccaatcagcaccggatacggcagaagaaaagcagcctgaccgccctccgccgaaacaatacagccgatttgcgaaaaaacgcaatttttaacgagcgtatgacagcaatttttcacatttttattacttgacaaaatcaagtatctggattatactgacaatcgaaaggagttgaaatccatctgccatgtttcagaaaacactttccttttatgtcgctatgctgtaccgcagtttttccgcttttaccggggagcgccttcaggcggtaggtctgaatttcgggctcttgttttttatcgtgtatatcgggaaaaagccaaactgcacaccatcagagctgactaaggagctggcccttgattgggggcacagccagcgatgtgtcaatcgactggtggaggacggctttataaccaaagaaaaatccgggcgccattacctgctgaatctgacggagcgcgggcaggaggcctttgaggccgcccaccgggttttctttgactgggacagcacttttatgacgaatctcaacgcgaaggaaaaagagcagctgcttactttactggaaaaagcagcacagggggtaccgcatcatgtacgaaacgatcaatagttctgtcaattacggcggtttggagctgaaaaaccgcatcatctttgcgccgacgaccttcggcttgtcggatgaggagtattttgaaaaaatccgccgcatcgctgcgggcggctgcgccatggtcatcatcggtgatgtgcctgtgggcaaaagcatgattgagaaatctctgtttgacaagaaaggctttgcctattaccagaagctgaccgagatcgtccacagctatgactgccgtatctgcgcgcagctgcaccagtcggattccaacatgcttgccatgctcaagtatgtgcccggcgtgctgaccaagaagatctcaatgcaggagctgcgtcccctgctgaacgccgaggtcgcgccctacatctccaagctgtctgtgaagaagatcaaaaagatcactgatggcttcggcaaggctgctgaactggcggtcaaggccgggtttgacatggtgcaggtccacggtgaccgtatgtgcggcagcttcagctcggcagtctttaataagcgcaccgatgaatacggcggcagtgctgaaaaccgcgcccgttttgccgttgaggctgtcaaggccatccgcagccgcctgccgaagctgcccatcgactacaagctggccgtccgtcaggaggagccgcattacggtaacgccggtgtgctggagtctgagctgggcatctttgtgccgatgctggtagatgccggtgtcaccagcttccatgtagcactggctaaccattccagtctggaggatacgatcccgccggcaaaccacccctatttcaagggtcagggctgcttcctgaaatactgcgacgaggtgcgtcagtttactgataagcctatcaccggtgtgggcggtctgactgatcccgcgtttgtggacgatcagctggcctcgggccgcatcacctgcgcagccatgagccgtcagctgctggctgacccggaatggccgaacaaggttgctgccggtcagctcaaggaaatccaccgctgtgtccgctgcaacaaaaagtgcctcggcggcctgcagcagcatcaaggcacgcactgcatttatgagaagggttgattatgaagacttcggtcgtattcagcagtaaaaccggcaacacacagcagctggcgaataccgttgccgctgccctgccgaagcaggagctcctgtataccggtgcgccgaacgaggcagcccttgcagctgaccgcctgtatatcgggttctggacggacaaaggcagctgcaaccgtgagatcaccgattttttgaagcaggtcaagggtaaggaggtgttcctgttcggcacagccggctttggcggggacgcagcctattttgaaaaggtacttaccgctgtcaaaaagcaccttgaccgcagcaatacggtgattggcacctatatgtgtcagggcaaaatgccccagtccgtgcgggagcgctatgtgaagatgcaggccagtcccctgcccatcccgaatcttgacagcctgatcgagaattttgaccgtgcggccacccacccggatgcagaggatctgcgcctgttgacagctgccgttaagcagacggagagccgctgatcatggtcagctataaaataagcagcacaaatacgccgccaaagagcgcgatacagaatcgcagcccttggcggcgtttgctatatagactgtttgaaaagcgtgaccgttttttacacaaagagccttgccgaataagcggtgctgcgcctgttggtgcgcgggctggtgttagaattggcggaggaataagacaccgcagacggctgtcaggcctgaatcggcagggtgactgtgaacaccgttccctgcccgtcagccggttcaactgtaacggtgccgctgtgcagcagggcaatctcccgcacaagcgcaagcccaaggcccacgccgcccatctcccggcttctggatttatctacccggaaaaagggctggaacacactcgtcctatactcctcagggatgccgcagcctgtgtctgcaacacgcagcacagcgctgcttttcttttgctggatcgtgatatgtacagaaccgccgggggtattgtacttgatgctgttttcgaccaaattaaagagcaggcggtagatcagggtgtcgctgcccttgatgctgacctcctcacattcctgaaaaagggtgacgctccggcgctgtgccagcggggtcaggtcggccacgatctcatcggccagcggggccagctcaatatgatcctcacgcggaatagattgcagatcgctcatttccagcagcgtgcggacaagacctgccagacgggacacctgatccgtctgaaagcggagcaggtcattgacctcgctgtcggcattggggtgttcctcagtaaacatttccagctttgcctgcatgatggccagcggtgttttcagctcatgggcggcattgccggcaaactgacgctgcaggtcaaaggactgcgccagccgatccagcatacggttgacagactggctcaagtcacgaaattccgggatcgtgttttcctctaagcgaacctccacaaggctgtcctgatcaatgcgttcggcctgctgtgcaagctttttcaagggcttcagcgccttgccgctgacgaaataggcaatcgctgcgctcagcagcgttaccgctgccgtgatgcaccagcccttgcgcccgaaaaccgccttggcatcgtagacctcctgcgaaaattgtacaagaaaatccgacatctggtcgtccggtatttcaatcgtcaggttttcatcatcactctgctggtattgcaggacatacccgttcagattgtccataccggtggcgccggagcggtagagcagcagattcaggcagatgcaggccccggcaatcagcacagcggtcatcagcgtgatccgccactgaaaagatatgcgattcatggttcattttcctccaattcatatccctcaccgatgcggttccggatggggtcataccccagtgcggtgcgcagcttttttctcagggctgagatatgcacgcggatcgagttgctgaacgcatcgacactgctgtcccagacatgctcgatcagctcctcctgactgacaggacgcccctgatgcagcagcagatattccagcacgccgctttccttgcgggtcagcgggatgggctgaccgtccgccatggcaaggcggctcttggtgtcaaaagtcagccgcccgcaccgcaggcatacatcacgctggataaactgccgccgggtcaggctgcgcacacgggcctccagctcagccagatggaacggcttggccagataatcattggcacctgcgtccagcccttccaccttgtcggaaatttcgctgcgggcggacaggatcagcaccggcgtttcaaggtcagtcctgcgcatcgtgcgcagaacggtcatgccgtccacctttggcagattgagatcgagcaggaccagatcgtaccgctctgcggcaagcagctcaagcgcggcctctccgtcaccgcagtcatccgtttcgtagccggagcggcgcagctttttagctacgctttcccgcagggtcggttcatcctctatcaacaaaagacgcataagcgatcatctcccgtatttataaggtgcttttttgcgctgcacaaggcaaaagcatggcagcgatacctttataatagtcattatagcagatttcgataaagtctgcgttaattttttcttagcagaaattttataccggtaggtgtatactagtctcatcaaacagaaaggagcaaccgcaagtgataaacaaaaaagcaatcgcccagtcagcgctgctgttggccgccgttttgatgatcggcttcggcatctggcgcggggaggcaaatacggtgatggcaaaggctatccggttgtgtatggagtgtgttggcattggataagaaaaacagatcttttctggcccgtttccggggctggatacaagcaggcgcggcgctgctgacgaacatccacctgccgaattttgccaagggtgttctgtatcagggcaagggaaaaacagtctgtgtaccggggctgaactgctactcctgcccgggcgcggcgggggcctgcccgatcggcgcgtttcaggcagtggtcggctcgtcaaaattccggttttcctattacattaccggcatcctgattttgttgggggtgctgctggggcggtttatctgcggctttctctgcccgttcggctggctgcaggatcttttgcataagattccctcgcccaagtgctccaccaagcgtctgaagccgctgcggtatctgaaatacgccgtgctgctcatcatggtggtgctgctgcctgcgcttgttgtcaacgagataggaatgggtgacccgttcttctgcaaatatctctgcccacagggtgtgctggagggtgcgattcccctctcgctgaccaatgcagggatacgcgccgcgctcggcaagctgttcagctggaagctttgcatcctgctggcggtcgttgttgccagtgtggtgttttaccgcccgttctgcaagtggctctgcccgctgggggccttttacgcggtcatgaaccgggtttctcttttccagatgcgggtagacaccgacaaatgcgtatcctgcggtgcctgtgcgcgggcctgcaagatggatgtggatattacaaagacaccaaaccacgcggagtgtatccgctgcggtatgtgtataaattcctgccccaccaaagcgatacactatcagtacggctttggcaacaagtcagataacagtaaggagatttgagtatgaaacgaattgcagcaattttgaccagcatggttctggtattttccctcgccgcctgcggcagccagcaggcaggttcttccgccggcagtgaagcagcctccaccgccagcagtgaagcagcctccgccgcacagaccaaaaccgaggagcagcttttgacagaggaaaacgacattctggctgcgaacaatgagctgtgggaaaaggtttttgcctcgatggacaagaatgtgacgcagaccaccctcggcaacaattacggcgaattccttatgagtgccgtggacaacgcgaaggatcagttcaccgaggaggagtacaccaccctcaaggcggacgctgataagatccgggagatcgaaaatcagatcgcagcccttcctcaggaggatgccgccagccagagcgcagcggagaacagcagcaccttcccccagtttgagggcaaggaccttgacggcaacagcgttgacagcagcctgtttgccaacaatgcgttcaccgttgtaaacttctggttcagcggctgcaagccctgcgtggatgagatggatgaccttgatgcactcaaccagcgcatcaaggagcagggcggcgaggtcatcggcgtcaataccgagacactggacggcaacgcggacaacgtcgccaccgccaagaaaattctggaatccgcaggcgcatccttccgcaatatctactttgacccgaacggcgaggccggtaagtttgcactgggcatcatggccttccccacgacctgtgttgtggaccgtcagggcaacatcgtcggtgagccgatcatgggcggcattgatcaggaggccaacatggctacactgcaaaagctgattgacgaagctgttgcaaacgacaccggaaaataacaaaaagataaagcacaatacccctgctgcccgatggacagcaggggtattgtgctgccttggcaaaaacacttaccgcattgtgtcccaaaacatcatacttctggacttgattagaaggcagtatcgtggtaatattaaagaaatagcacgaaacggagaaatacacggtgacgaaaaaggaactcgcagcggtctgcattgcgcggctgaaagccgaatacccggcaagtgactgtacgctggactatgaccacgcatggcagctgctggtgtcggtgcggctggcagcccaatgcaccgatgcacgggtgaatgtcgttgtgcaggagctgtttgcccggtttcccggcgtcagggagctggccgctgccagccccgaggaaatcgaagccattgtcaagccctgcgggctgggccatagcaaggcgcgggacatttccgcctgtatgcggatgctgcgggataaatttgactgccgtgtgcccgatgattttgatgcgctgctctccctgccgggagttggccgcaaaagcgccaaccttatcatgggagatgtcttcggcaagccggccatcgtgacagatacccactgcatccgcctgtgcaaccgcattggtcttgtggataactgcaaggacccggccaaggtcgagaaggaactgtggaagatcattccccccgaggagggaaacggcttttgccaccgcttggtggatcacggccgcgcagtctgcacggcgcgcacaaagccttactgtgacaaatgctgtctggccgatatctgccgggcgcgaaaggaatttgccaatgaataaaacgacggaaaaccgccttggcggcgagctgcgcagccagcagaccgcccaacgcctgctggacgagctgcgcgatggaatatacgctgctgcaccacagctgcccagtgagctggagctggccgaggcgctgggcgtgagccgcaccgtggtgcgcgatgccctgagcgagttggaacgcgacggctatctggagcgggtgcgcggcatcggtacgcttgtcaaccgcgatgtgctgatggttgagaaccgcatggatcagaagctggagttcaacaagatgatccgcgcgatcgggcgggtgccgcacagcgataacctgatggtcacgcgggaaactgcaacgcccgagctgatggagcggctggcccttgacccggagaaggagcatacgctggtgtttgtgcgccgccgtgtactggcagatgaaacgccggtgctgtattccaccgatattttgccgctggcactgttcggcggcaagcggcttgattcgatcgacttcagccgcccgatttttgagatcgttgagcagcactgccgcgtggaggtagccgagacattgacaacgctgcacgccgtgatgggtacgccgggcatccgccgccagctgggggttcggcccgatcaggcgctgctgcagctggatgagatctgctactcccgcacctgcaagccggtgctttgctgccagacctgctacacggatttctttgattttgcaatggtgcgcaaactggtttgattgtaagcggcataccgccgcttagaatatagagctactataaaggggattgtgtatgagacatttgatcgacccggcggattttacgctggaagaaacgctcagcctgatggaccttgccgaccgtatccacgatgacccggccgcctataaggacgttgccgcgcgcaagcgtctggcaacgcttttctacgaaccgagcacccgcacccgcctttcgtttgaggcagccatgctgaacttaggcggtcaggtgctgggcttcccggacgccggtgtttccagcgcaagcaagggcgagacggttgcggataccatccgcgttatcagctgtgtggcagacattgccgccatgcgccaccccaaggagggtgccccgctgcgcgcctcgctctacagccgcattccggtcatcaacgccggtgacggcggccacagccaccccacacagaccctgctggatatgatgacgatccgccagcgccgggggcgtctggatcatctgaccatcggcttctgcggcgatttgaaatttggccgcacggtccacagcctgatcaagagcctgtcccgtctgccgggtatgcggtttgtgctgatctcccctgaggagctgcgggtgccggattatatcatcaatgagatccttgagcccaacaacatcccgtatgtcgagacgcgcagccttgaggaggccctgccggagctggatattctctatatgacccgcgtccagcgtgagcgtttcttcaacgaggaggactatgtccgcctgaagaacagctatgtgctgacaaaggaaaagctgaatctggcccccgccgagatggctgtgctgcatcccctgccccgcgtgaacgagattacgctggatgtggacgatgacccgcgcgccgcctattttgatcaggtgcagaacggcgtctatatgcgcatggcattgatcatgacactgctgggtctgaaggaccccaagaccggggaggttgcttttgatgttgaaggttgatgagatccaaaacggcgtggtcattgaccatatcaccgcaggcacggggctggcgctctatgatttgatggagctggaaaagctgaacgatgccagtgtagcgcttttgcagaatgtgcgcagccagaaggccggcaaaaaggacattattaagattgagggcgatgtcagtgcgctgaactttgacattcttgcctatgttgaccccaaaatttctatcacggtcatccgtgacggccatgtggtggagaagatccgcccggagcagcccaagcgtctggtcaatgtcatcaagtgtacgaacccgcgctgcattacctctatcgaggagggctgcgaccatatttttgcactgacgccgagcggccgctaccgctgcatctactgcgagcaggagttccgcgtcaaaccgtaaagtgaggtaactgcgatggagaagccgaagtttcatctgaatcccaacgaggagattgtcaagaccatccgtgagggattaaagcgtacgggcggatactgcccctgccgtctgcagcatatcccggaaaatatctgcatctgcagcgagttcaagcagcagctggccgacccggactatcacggcccctgccactgcggcctgtatgtgaaggattgagtgctgttccggagctgataaaaattgggaggtatccgtctgcgacagacggatgcctccctttttgtttgtgcagcggcgttacacacaggccgtcagggtgtcctgcgtcaggatgatatgcccgtttgcatcggcatcggccgtgtagactgtgccgggctgggcggtgccgtcggcgatcctgtcagccagtgcctgctccactgcgcggctgaccgtgcggcgcagctcccgcgcgccgtagggcggtaccttggcccctgccagcgccttggcggctgcggcggtgtggcgcagggtgtagccctgcccggctgcgcgttcctccagctcgcagagcagccggtcggcgatgcctgccagctgttccgggccaagcgggtcaaacagcacagtctcgtccagacgccccatcagctcggggcggaagaactccctcgcctctcggattgcctgctggccgcagcggtccttttccgccccggcagcgccgaagcccatgggggccgtctgcccggcaaggcatcgcgcacccagattggaggtgagcaaaatgatggtgttggaaaaatccgctctgcggccctgtgcatcggtcagggtgccgtcctccaaaatctgcagcaacaggttttgaatatcgctgtgtgccttttcaatctcatcaaacagcaccacactgtaggggcggcggcgtacagcctcggtcaactggccgccctcatcgtggcctacatagcccggcggtgcaccgatgagccgcgccacggtgtgacgctccatatactcggacatatcaaagcgcagcagtgccttctcgctgccaaaccagcatttggccagcgtgcgggccagctgggtcttacccacaccggtaggccccaaaaacagcattgcgccgatgggacggttgttttcccgcaggccggtgcggctgcggcgtatggcggcggctaccgaggctacagcccgcggctgcccgatgacctcagcgccaaggcgctgctccagctgtgcaagccgctcacgctcggcctcccccacacgctcggcgggtacgccgctcgccttgctcaccacacgggcaatgtcagccggggttagtgcttttttctcgctgccgctttcggcaatgcggcgtgcagcagcggcttcgtccagcaggtcgatggccttatcgggcagataccgccccggcagataccgcacactcagctcgactgctgcatggatggctgtgggtgggatggcgaccccatggtagcgctcataccggggcatcaggcccgcaagaatcgtttcggcagcggccggggtcggttcctcaaccatcacccgcccgaaacgccgctcgagcgcagagtccttctggatcgtcttgcggtattcctccggtgtagtcgcaccgataagctgtatctccccgcgcgccagcatcggctttaggatgctggcggcatcgatagccccctccgctgccccggcaccggcaatgatgtggatctcatcaatgaacaggatggtcgagcggtcgcggtaaagctcctcaagcaggtttttaaagcgctcctcgaaatcaccgcggtatttcgtgcccgctaccatcgaggccatatcgagcgataagactcgtttgccccgcagggccggggtgatctgcccagaggcaatgcgctgggccagcgcttcggccagtgcactttttccgacacccggctcccccagcaggcagggattgtttttctggcggcggcaaaggatctccaccatccgctccagctcactgtcgcggcacagcaccgggtcaaggcgtccctcctgtgcaaggcgggtcagatcgcggccgtatttttcgctgggtcggcccgtgcggctggctgccatccggggctgtgcgggcaataccagctgacctgatagctgccggcactcccgcgcagcctgcggcagctcgacaccaagggaaagcatccagcggctggctgtgcaggtggaatcctcaagcatggcgcagagcagatgctcattttcggcccgcgcagcgctggcggcgtgtgcccccagcacagcaaactccatcgccttgcgcagctccggcgcaaggtcgcagcggtgcagcctgcgcggtgcgccctcagcccgggcagcactgcattcggccagtgctgtagtggtgacccgcttacggcgcagaaagtctgctgcactgccgcgtgccgtctgcaccagcgccagcagcagatggcctgtgtcggcctgacagcagccctgccgccctgccagtaccagcgcggtgcggacggtgcgcgccgccgtgcgtgaaaaacctttgtagctgtagacccagaacatctgcatatcctcctcttgtatctgcccattgaaagtatagacgccggacggataaataatcatcgaaatccgttgaatcaggatatgacaaattaccgaattggtggtataataatgcagttacacgcaatctgcacatatgaggtggtttttcatgcacaaattgatgcgctatatcaagggctatgagcgacaagccctgttggcgccgctgttcaagatgctggaagcctgttttgagctgtttgtaccgctggtcatcgccagcatcattgatacaggcatcaaaaacggggatgcggcttttatttggacgcggtgcggcctgctggttttgctggctgctatcggtcttgccagcagcctgacggcccaatacttttccgccacggcggcgctgggctttggcacggcgctgcgcagggatctgtaccgccatattgacacgctgagctacagcgaactggacggtatcggcacccccacgttggtcacgcggatgaccagtgatatcaatcaggtccagaacggtgtgaacctgaccctgcgtttgctgctgcgatcgccgttcattgttattggcgcgcttatcatggccttttcgatcagccccaaactgacgctgctttttctcggcgttaccgttgcggtttcgctgatcatctgggcaatcatgcgggtcacggtgccgatttaccatgaggcgcagaacggtcttgaccgtgtgacgctgctgacccgtgaaaactatgtgggtgcccgtgtggtgcgcgcctttgcccggcaggccgatgagttggctgcctttgtcgagacgaacgatcatttgaaatctctgcagtttgcagcgggccgcatctccgccctgatgaatcccctgacctatctggtagtcaacctcgccgtggtagcgttgctgctgcgcggcggcatggaggtcgatgccggtgcgctgactcagggtgaggttatcgcgctgatcaactatatgagccagatccttctgagcctgctgcgtctggcggatctggtcgtctcagtaacgcgcgctttggccagcggtatgcgggtcaatgagattctgaatacctgcaccacgatggaggaccctggcacggcaccgctcacggttgacggtgctgccgaggcggtccggtttgagcatgtggatttcacctaccgcggtgcgggcgcacccagcctgaccgatatttcctttgcggccggctgcggcgagaccatcggcgtgatcggcggtaccggcagcggcaaatcgaccctgatcgatctgatctgccgcttttacgatgccggccacggcacggtgacactgttcggccatgatgtaaagcagtacagctttgcacagcttcgcagccttgtaggcatcgtaccccaacaggcggtgctgtttaccggcacgatccgcgacaatatgcagtgggccgccccgaatgccaccgatgcggaaatctgggaggcgcttgagatcgcacaggcagcagactttgtccgcggcaagcccggcatgctggatgcaccggtggaaacggccgggcgcaacttttccggcgggcagcgccagcggctgacgattgcgcgcgcactggtaccgaagccgaaaatcctgatccttgatgacagtgcctccgcgctggatttcgccaccgatgcagccctgcgcaaggccattaaagaaaaaacgcagggtatgacggtctttatcgtctcccagcgcgcggcgagcgtgcagcgcactgaccacattcttgtgctggatgacggcactttggccggcgatgccccccatgccgcactgctgcagagctgtgaggtctataaggaaatctgcctgagccagctgagcaaggaggaggtggccaaaacactatgagcaagacatcgaagaagcttgaccgcaatacgatccaacgcgttctgcagctgatccgcccctacaagggcatggtcgtcctgacgcttacattggcgctcatcactgttgtcaccaccctgcttgcaccggtgctggcaggcaaggcggtcgataagattgtgggacccgggcaggtcgattatcaggggcttggccgcatcgcattggctatggcggccacaatcgcctgcacggcgctctcccaatggctgatgaatgttgtcaacaaccgcatcacctttcaggtcgtgcgggatatgcgggtgcgcgtatttgaacagcttgagatcctgccgctgaaatatatggacgcccaccgccccggcgatgcaatcagccgcatcacgaccgatgtagagcagttcagcgatggcctgctgatgggctttacccagctgtttaccggcgtgctgacgatccttggtactctgggggtcatgctctatatagactggcgcatcgcgctggtggtcgtggcgctgacaccgctctccatctttgtggcgcgcttcattgcgacacacacctattcaatgttccgggtgcagagtgagacccgcgccgagatgaccagccttgtggaggagctgatcggcaacgagcatctggttcgcgcctttggctatgaggcgcgcgctgaggagcgctttgaccgcatcaaccgcgacctgcagcgctgcggtgtgcgggcgaccttcttttcttcgaccacaaacccctgcacccgctttgtaaattcactggtttacgcctcggtcggcatactgggcgcctttgtggcgattgccggcggcatcacggtcggcgagctgagcgtctttttgaactatgccaaccagtacacaaagcccttcaatgacatctccgatgtcatgaccgagctgcagaatgcactggcctgtgcgcagcgggtgtttgatctgatcgatgagacaccgatcacccccgatgcccccgatgccgtgagcctgccccacggtgccggcagcgtggcctttgagcatgtgcggttccgctatcaggacgatgtacccctgatcgaggatatgaacctcaaggtcgagccggggcagcgcatcgcgctggtcggtccgaccggctgcggcaagaccacccttgtaaacctgctgatgcggttctatgagatcaacagcggcacgctgcgggtggacgggcaccccattgacacggtgacgcgggacagcctgcgcgccaatctgggcatggtgctgcaggaaacatggctcaaagccggtacgattgcagaaaacatcgcctacggcaaaccggacgccacccgcgaggagatcatagccgcagccaagaaggcgcgcgcccacagctttatctgccgtctgccgaatgggtatgatacgcaggttgccgaagacggcggcaatatcagccaagggcagcggcagctgctctgcattgcacgggtcatgctgcggcgtccgccgattctgattctggatgaggccacctccagcatcgacacccgtaccgaggttctggtgcaggatgcctttgaggaattgatgaagggccgcactagctttatcgtggcccatcgcctgtccaccatcaaaaatgctgaccagattctggtgatgaaggccggcaacattatcgagcgcggtacgcatgatgaactgctggcgcagggcggcttttataagcggctttacgaaagtcagtttgccaaggcgtaagcatagggtcaaaatctgggaaagaaaaaggagattctactatgagcagcattatcattccggaagggtaccaaagcctgctggggctgtatgacacccagaaggccatcggcctgatcaaaacgatctttcaggaaaagctttgcatggcactgcatctcaagcgcgtcacggctcccctctttgttgtacagggcagcggtctgaatgatgacctgaacggtgtggagcgccccgttgcgttcgatgttcccagcctgaatgagcaggccgaggtcgtacacagccttgccaaatggaagcgctatgccctgcacaagtacggctatcgccccggtcagggccttgtgaccgatatgaacgccatccgccgtgatgaagagctggataacctgcacagcatctatgttgaccagtgggactgggagcgcgttattaccgctgaacagtgcacgctggattttctgcgtgagaccgtctgtgacatcgtggatgcgatttgcgcgacctctgatgagctgcgctggaagtttccggagctgaagaacatccatcttgaccgtgatgtggcttttatcacgacgcaggagctggaggacctctaccccgggcttaccgccaagcagcgcgaaaacgcctttgctaaggagcatggcacgatttgcatcctgcagatcggcggcaagcttcgcagcggcaagccccacgatggccgtgcccccgactacgatgactgggcgctgaactgcgatattttgttctggcacaagccccttggctgcgcactggagctgtccagcatgggtatccgcgtggatgctgaatcgctgcgccgccagctggacgaggcaggctgccccgagcgcgcagagctgcccttccacaagatgctgttagacggcacgctgcccttgacgatgggcggcggcattggccagagccgcctttgcatgctgctgctcggcaaagcccatgtaggtgaggttcaggtcagcctttgggatgatgccacggtaaaaacctgccgtgatgccggtgtagaattgctgtaagtcttgacaaagcgctgctgtttgtggtattattatctagtacccgctagtatagcacaattggcagtgcagctgatttgtaatcagcaggttgcaggttcgattcctgttactagctccaagaaaaagagcgccgcaaggtttaatttgccttgcagcgctctttttagtttttaaattatgccttttccggcgtcatacatttccagtgaaaactcccggtcgcttgcttgcgaccgggagtttgtttagtatggcattgtagaggaattattttgtatgcagcgcgttctgcagggcacaatactcctccagcgtaagctgttcagggcgtgcgcgttcatcaagaccggctgaatgcagtgcggccaggacctgcgccttgggcaggtgcaggccgttggcaatggcgttggctgcggtcttgcggcgctgtgagaatgcggcgcggatcaaggcaaagaaggcggcctcgtcaccgttcggaacctgtacagcgggtgtcttgcgcacattcaggcgaatgacggcgcttgtcaccttgggggcggggtaaaagctgccgggctgcacgctgaacaacaatttcggctccgcataataggccaccgcgtagctgatcgcgcccgcatcgcgggtgccgggtgcggcgcacaggcgctgtgcggcctccttttgcaccatgacggtgatgttctggataggcagcttttcctccagcagacgcatcaggatcgggctggtgatatagtacggcaggttggcacagacagccaccggcttatcgccaaattcctccgccagcagcgccttcaaatccaccttgaggacatcgttcagtacaagcttgaaattatcatacccggccatcgtctccgcaaggagcggcggcaggcgcttatctacctcgatggaaacgaccttatccgcgcgcttgcagagctgttcagtcagtacgccgatgccgggaccgacctcaagggcaccccagccggggccgatgccggcggcttcggcaatgcggggacatatacccgggttaatgataaaattctggccaaaccctttggaaagggcaaaatcgtaccgcgcacagaggtcacggatggtagacaagtcggtcaatgtgggcacggtggcttcctttcagcgtatatcagttctggccggtcagcgacatggccgcgttgacggccttgctgatctgcgggtcattgtcgatcgtgtagtcgtagtaggagttctgttcatcaacggagagtgtggcgtcaatatcgggcttcagaccctcgttgttccagctctgatcctcgttgtcgagcagcaggccggaggtaatataggcggcagagccgtccgagaagctctgcacatcgctgagcacaacgcccataccggccgttttggtaccaacgatcgtggcgccgcccatcttgcgcagggcattggcaaacagttcggcgctgctggaggtggcgccgttgacgaggcagaccatcggaacattgatctcgttctcatcagacatgcgcagcacggtcacattgccgtccttatcctgctgcttggcgatctcaccggagggtacgcagtaatccgctgcgacaaggcctgcattgaggttttcaccggcgttgtcgcgcagatcaaacaccagacaggtggctccctgctgcagcaggttgtccacagcggttttaaactcgctggcggtgcttgcggtaaaggcgtcaatgcgcagatagccgcaggtgccggcggtcagctggcttgttgagatggtgggggtcttatagttggagtgtacaaggctcagctgctgctcctgacggtcgggcgtcaggtaggtgatgactgtggtagtgccctcctcacccagcaggcgggaggtcaaacgcgccgtagagccgatgttcttggtggattcctcgccaatggcagtgataaagccgccgacctgcagaccggcctcacttgcgggggaattgttgtatacacgaatgatgcgcgcatagccggaggaggcatcgttgacaacggccacgccgatgcctgtgagggtgcccttctcgatggcctgcttttcgctgtactccttggcggtataatagacagcgtatcggtcgttgatgccgctcatatagccggcggccagcttatcgttcagggtatcctcatcaatggtgaagaactcctctgcgcggacaaagcggtcgatctccgacagcttgttgtactggcgttccttattttttacgctggacacggtcgtgttgaacatcttcatcgacacgaccatcgtcagcgagaaggtgacagccattgcgatgatggcgatggtggctgccacgccgagactgatttttttgctcatggctctgatggctccttactgtttttgcgtttatgccccgtaggcaagggagaaaaataccgtagagaaaaggctcagcaccataagaacggcgaccaccagacaaaaaatgcgcacggcggttttatgcttctgcggcttcataaggactcccctttcttaggataagtaattcatgacattgaccagaacattgttgaccttcatttccagatgcaggtgattgccggtggagttgccggtggagccgacatgccccagcgtctctcccttggaaacgttctgcccaacgctgacgatgggcgcactgttcatgtgggcgtacagtgtggaatagctgttgccgttgtcatccttgccgtggtagacctgcacataatagccccagctgtagtggtaggcggctgcggtgacaacgccgccgctgacggcgtagatttcggtgccgcccggcgcggcatagtcggtgccgcggtggccgttgccgccaaagtagcaggaaatatacttataggtggcaagcgggcggccaaaatccagcgagcattgtatcgaggcgtttccgtaggcctggttggcggcgttcagggctgcatccagctccttggctgcctcgtccacttttttgttggcctcgatctgggcctccttcagggcctgttcctcggcctccgccttggagatgctctcgtttgtctgggagatattctgagcaagctcactggttttgctgttcagtgcggccttctgggcctcatagtcagccttttttgcctctagatccgccttggcctgctccagctcggcgcgctgctgctccagctgggtatgctcgtcctcaagctgctggcaaatttcctcatccttgctgacgatctgctccagtgtggtggcaaaggtaagcagctggtacaggctggtcgcactggagagcagcgcaatggaaccgccgtcattcagccgctgcatcgcgcgcatacggtccttgaaatccgcccagcgctggtcgtattcagcctgcttctggtcgatctcctgttgcttttgattgatctcgtcctgtttgttgacgatatcattatccagaccgccgatctgctcggtcagggtgccgatctggctgagcagcagtgatttttgctgctccagctgtgttttgagcgcctgcgcgtccgctttgttgctttgcgtttctttcagctgctggttgactttttccaatgcggcctgctgctcctgcagcttttggcgcaggtcgctgacactggcagccgccagcggcgtcataacggtggaaagcgtcatcgtcatggcaactgctacgctgagcagcagtgagataaattttttgctgtgcgaaaaatgcttcatctttgtttgcaattcccctgctcgtcgctgttatacattcagatgcttgcggatgctggtggcggtgccgaggccgcagagcacaaagccaagcagcacaaagccgccgacaatgtaataccatacattttccagcggaaccagctgcccgccgaacatctgcgagaggttggacgggttctcggcataccagcggcagagggcatagtacgcgccgcagacgatgccggaggcaagcgcagcggagatcaagccggaggcaacaccctccacaaagaacgggaaacgaataaagccgttggtggcacccaccagtttcatgatgccgatctccttgcggcggttgaacaccgtgatcttgatcgtattgttgatgaccacgatggacacgatagccagcaccgctacaatgccatagcaggcgtagttgataacgcgctgcaaagaagtgaacatctcggccatagccagcggggctttgacgctggcgacaccgtcaatctgcatgagctgtgcggagacagactcgatattctgcgggtcgtcaacggtcacacggtagttgggagtgaacgggttatcgttctgaaagacctgctgcaggttggtgtagtccttgagcatatcgccgtaggtggccagaacatccgccggtgacatgtaggtcacgcccacaacgtggggcgtattgcggatcgcggcatcggcagccgagatctgttcatccgtagagttctgaccctcttcgtcgcccatatagacgaccatcatgttttggttgccgatatattcgaccatataatcaatgttgacgcccagcaggtaggcggcgccgatcagcagcatgcagacggtcagcacgcccatcgaggcaaaggtcataagccggttggcgcgcagattgtgcaggccctgaccgacaaggtaggtaaagctggaaaaacgcatggtgtcccctctttaatatcaaagatcagtcttcatcgtagtcgtaatcgtcctcttcccgctgggccatagcggctgcatagcggcgggcggcctcggggtgtgcggtgtcggacgcgaccatgccgttggccagtgtgatgacgcggttgccgtacttgcgggcgagcttatgtaccagctcatgctcatgggtgacgaccacaacggtgatgttgaccttgttgatggcctcaaacagctgcatgatatccatggacatctcagggtcgatgttgccggttggctcgtccgcgatgatcagcttggggccgtgggccagcgcgcgcgctacggcgacacgctgctgctcaccgccggagagctcgtccggcagacggtccatcttgtcctcaaggccgacaagtgagagcgcgaagggcacgcggtccttgatctttttggtggagatgttcgttacacgcatggcgaacgccacattctcatagacggtcatggtcggaatcaggcggaagtcctgaaagacaacacccatctgccggcgcagatacggtaccttgcgccggcgaatcttggtcagatcctgcccgttgatgaataccttgccctcggtgggcttttcctccatctggatcagcttcagaaaggtagatttgcctgcaccggagtgaccaaggataaagacaaattcgccctcctcgatatggatgttaatgtcctccaacgcaacattttcatcgttgtgggtctcataggttttataaacatgctcgaaatcgatcattgaggattctcctgccgcagcgcggctgtcctgtttacggttacagtcatacatataatagaataccatgcagcgcgcctgcggtcaaggtgttttccgcctgccaaaagcaggaaaatggcgctgccttgcggtacagcgccatttgtgaaagttttattaaaatcaatatttggccggattggcggagaggtacttcttgaccatcagggcaaccttaaagacgatggcatcatcaaagttgcgcaggtcaaggccggtcagtttgcgaatcttttccagacggtagaccagcgtgttgcggtggacaaacagcccgcggctcgtctccgagacattcaggttgttttcaaagaagcgctggatggtgaacagcgtctcagcgtccagactgtcaatgctctcctgcttaaagacctcccgcaggaaggcctcgcagagggtggtgggcagctggtagatcaggcgggcaatgcccagatggtcatagctgatgacctgacgctcggtgtcaaacaccttgccgacctccatggcgatctgtgcctccttaaagctggaggcaagatccttgatgttgccgatgggggtgccgatgccgaccacggccttgatgtaatggtcgccctgcagcgtatccacaatggaggcagccagcttttccatatcgcgggtgttgttgtccggcttgatttccttgacgaggacggtgtccgtctcgctgatgttaaagacaaagtccttctgcttgtccgggaaaagaccgctgacaacatcataagcggaaatgtcattgccggaggtcacgcggataagcagcacaacgcgctgtacatcggagacaaagtgcagctcacgggccttggcgtagatgtcgccgggcaggatgttgtccagcacgacatttttgatgaagtttgtcttgtcgaacttttcatcgtgatactgcttgatgctctgcaggctgatggacagcatggcggcaaactgctccgccgtggtgtcggtgccctccacaaagacagcgtagtcattatgcttggcgttagagaactgatggtaggcatagccatcgcgcacaaaggcatcgccagccgtctggcggacggtagctacgccctcgcgcacctcgccgatctgccccagttcggagcaggaaatcacggtgcctgtctcgtcgataacgccgacaacacggtccactgcgtccttcatctggtacaccacattctggaataccctgttagccataatatgtgactccccttttgctgttatttagacagtctgcaccggcgtgcagtgcgggctatacatgttcgacaaaaatgccgtttggtaatctgcccgaaaaccaaatctttataatgtatattttacacaattcacttggcttttgcaacatattttcacgaaaatcgcaatattttcttgtacatttttcaaatcgaaccaaaaaatgtacccgccgcggggtttgcggcaggtacagcgtccgtcattttgacgattttctggtttttgtctggtcaagcgcgcctgtgccgccctcgacaacaccgcggtgctggaacacataggtgatgctgcggaagaaaatcttcagatccatccagaaggtcaggtgcgcggcgtactcgccgtcatagcgcgccttcacatcaatgggcagctcatcccgtccgttgacctgtgcaaggcccgtcaggccggggcgaatgtcattggcgtgtaccttgtcccgcgcctcgatcaggtcatactggttgtagagcgccgggcgcgggccgataacgctcatctgcccggccagtatgttgtagatctggggcagctcatccaagctcgttttgcgcagaaatgcaccgctgcgggttatgtagctgtcggcattcttcaacagatgggtaggcacatcgtggggggtatccccgcgcatcgtgcggaatttaagaatgttaaaatgagttttgcccttgccgacgcggcgctgcctgaaaaagaccggtcccggggaatccgccttgatccacagcgcaatgatccccattggaattgccagaaggatcgtggcggccagtgacagaataatatcgagcaggcgctttacataacgctgatacataggtcagtcctccttactagcgggcttgtccccctgcagcttgcggttgacttcttctttggagaagatggccgtgttgccggtggcggccacaacggtgtggtctgcacgcacacggcggttggggtgataggtaggcaccatctcccgcagaatgtcaacaacatcgttatcattgtgccgggcggccgttttgagcgtctgcagatcggtgtagaatttttcaaggtcgatctgcatcggcggcgcaataaagatcttgttgtgggctgtcttggccatcttgtcctgctcggtgtccatgagcagctcctcatatagcttttcgccggggcgcaggccggtgatcttgacctgcatgttgacgcccggctcgtagccgtaaaagcggatcagccggttggcaaggtccatgatcttgaccggctcccccatatccagcacatagatactgccgcccttggcaagtccccccgcctgcagcaccagctgcgcagcctcggtgatggtcataaagtagcgcacaatgtccgggtgtgtgatcgtcacagggccgccgcgcttgatctgctcctcaaacagcggaatcacactgccgtggctgcccagcacattgccgaagcgcacggccacgcaggtcatggttgtgccgcgggagaaggtctggatcagcatttcacacaggcgcttggtacagcccatgacattggtggggttgacagccttatcggtggagagctggacaaaacgctccacaccgtgctctgccgcagaggtcagcagattcttggtgccgaacacattgttcttgacggcctcggcagggctgatttccataagcggcacatgcttgtgggccgcagcgtgaaagacaacggacggatggtaggtgtcaaacacctcatccaggcgggctttgtcgcggatcgagccgatcagtgtgatgacgggagcctcagggccgtacttgtttttcagctcagtctcaagctcgtaggcacagttttcatagatatcgaagatcagcagccgacgcggctggtagcgcatgatctggcggcaaagctcgctgccgatggagccgccgccgcccgtaacaagcacaatcttgtcatgcagatactccgaaatctgggcattgttcagctggatttcatcgcgggagagaaagtcggctgtgttcaattcacggaagcctgctgcaacggggttgccgttttcatcgacagcctgcgggtcgctgagcatccgcacacggcagtgggtagagttgcagaggttgatgatctcactgaggcggtcgcccttgacggtggtgatggcaataacaatctcgaggatatgatatttgcgcacaagctccggtatatcagagatcgtgccgcgcacaggcacaccctgcacgcgcagaccttttttggtcaaatcatcgtccaccaggcagaccgggttgccgaagctctggtttttgtttttgcagaggttgaccgcccatgcaccggcattgcccgcgccgacgatcagcagcggcgtatcatcctccggcttgttggccttggtatcctgcacggtgcgaaccagacgccacaggaagcgcacgcctgcgattgccgccgtattgaacaccgcgccgaagatcagcacggcaccggagatagggcggttgtggtagatgaggtcaaacagcatgatcatgccggtagccaagcctgacaggcaggtcaggcgggcaaggtcccgcataccggcatattcccacatgatctcatacaggccgccgaaccagaatacgatcatatagatcggcagcacatacagcagcatgggggccatggcgcgcacgatctctacacggcggtaggcatcgccactgtcgaagcggagcataacggccagccagtagcatactacgataagcccgcagtccagcagcatcaaggcgatgcggcgcggcagacccttaatgatttgtttggaatcctgttgcatctgtttcgtcctttaccaaagttctatttctctataccaaaggggctccggttgaacggtacccctgccaaatgcagccatataaaagtattataacacacaaatgccccgtttgtcctacttttgcagtgacaaacggggctaatcttatataaaatttacaagtaatttttggtaaaacagacgaagtttttactcgaccgtcacactcttggcaaggttgcggggcttatcgacatccagacccttggcgcagctgacatagtaggccagcagctgcagcggtatgaccgacagactggtggcaaaatgcgggtcggttttggggacatagaccgtgaagccggctgtatcctcaatgctgtagttgccgtaggtggtcagccccatcaggaaggcaccgcggctcttgacctcaaccatgttggaaacactcttttcaaacaggcccggctgggtcaggatgccgaccacaagggtgccgttctcgaccagtgagatcggaccatgcttcatctcgcctgcggcgaaggcctcagagtggatatagctgatctccttgaatttcaggctgccctccagcgcaacggcgtagtcaaggccgcggccgatgaagaaggcatccttggcgttggcgtatttgctggcaaaccattggatgcgctccttatctgccagcgtcttttcaatcttctccggcagggccatcagctctgcgaccagctgctcatactggccgtcagccagtgtgccgcgcacccgggcaaactcggtagccagcaggtagcaggctgccagctgggtgctgtaagccttggtggtggccaccgagatctccggcccggcccaggtatacatggttgcgtctgcctcgcgggcgatgctggagccgactacattcacgatgccaacggtgcgcacgccgcgctccttacacaggcgcagggcagccagcgtatcggcggtctcgccgctctggctgatgaccatagcaagggagtcctgctcaagcacggggtcacggtagcggaactcgctggcgacatcgacctcgaccgggatgcgggccagactttcaaacacatagcgcgcggccatgcccacatgataggccgagccacagccgatgatatacagacggcgcacattcttgattgcttcctcatccagtgccagctcggacaggtcgattttcccgtccttcaggcgcggagagatcgtgtcgcgcacggccgcaggctgttcattgatctccttcatcatgaaatgctcatagccgcccttttcggcagcctcggcatcccattcgatggttgtggactcgcgggtgatgggctccttgtcgatgttgaagaattcgatggagtccggggtcaggcgtgcgatttcgagattgtcaatgtagtagaccgtgcgggtgtacttgagcagcgcaggcacatcggaggcgatgatggcaccgtcctcacattggccaacgatgagcgggctgtccttgcgcacggcatagatgacaccgggctcatcggcaaaaagcacgcccagcgcataggagccgcgtacatgcagcatcatgcgggtgatggcatccagcgcgttgcctgcagattcgccggtgtagtagtagtccagcagctgtgccacgacctcggtgtcggtctgagagacaaaggtaaagcctttgttgagcagacggtccttgatctcctgatagttttcaatgatgccgttgtgcaccacggcgatcttctggtcacgggaataatgcgggtgcgcgttgaccacagacggctccccgtgggtggcccaacgggtgtggccgatgccgcagctgccgtgtacggcattgccgccgtccgtcatctcgcttaaaaccttcaggcggcccttcgcctttacaacctcgatcttgcctgcggcgttctgcaccgcgatgccggccgagtcataaccgcggtattcaagcttggacagaccgtccagcagaataggtgcagcctgtgctgcaccggtaaagcctacgattccgcacataacagggttcctcctttatgcagttgttcaatatgaccttcccactttaacgggcaaaagtaaaaaatacttgtatagtatattcctttttgcacaaaatgtctactgtttggcctaaatttgctatactgtatgccacacaaaaacaatgcgggcggccgtcaagggctacggccgcccgctgcgcggattctccttttcccgtttcttacaccatataagaccgaatcaaaaagtatcgcgcattggatagcgtaccatatctggcgaagaatagcaagtgtaaaacggaatttttcctgctttttgtgctgcttacaaaagattattaagtttgtactgccattgctttgataaattagggcgtatcgtccccgctgctattcgtgcggtgtccccctcaggagacccggcgcgccacgactacatagcgcccgttggcggacgaatactcacaggttgaaagggtcagcagctgctccccgtaagccgggcggatgccgctgtccacatcactgcgggacagcacctcctccacataggcatcgtaggtctgcgcgtccatatcaatatactggttatagacaaatgaggtgtcgtttacaacatcaatggcgaacgcgccgaatacctcgtattttgcatcgccgtacacggtgtcaaacgcaatgtagggatgctcctgataatagccggccttcttatactcggtcaggcagccaaagatcgcgccggtcttcatattgtggccgtagatgacaaggttatcgctctcagcattggcacccagcgttgtgttttcgtcaaggtacggcacgccgtagacgctgtagctcttatcaaagtcgtgacgaagataaaaatccttattgtttggcgcgtacataaccgggaaatccaactctgtgccatcaatcgagagccaaccgatgaaatcactgttcttatcgcgcagggcggcaaacttggctccgtttgggttgacgctctcccaggacggctgcggtgcggcagctgtgtcgatcatagactgcagttcggcaaactcgttttctgtcctgcggtcatccgcaaagcgcttgacaagcagcccggcactgaccagaaaaacaacaccgaaaaagagcatggccagcgtgtaggcaaggctgccgcgctttttttcgggggcagcaggcgcgggcggggtaaagtctgtatcgttgtcctgatcgtaaagggccgcgtggggcgcggcgggcggctcttgcggcgcaaggtcgctgcggcggatttttgccatagtgattctccctgtctgaatgtcaagtctagatttactatacgatgctgcagaagaaaatgcaagaggatacgggcgaaaaatcggcctcagaattgtaaaggcagataaggcttccgcagaaaacgctgcgaaaaaagtgctgctgcaccagaatcagatgcagcagcactctatttacgcaaaaggatcactcgcggatctcaatgcccagcttgaatttgagattgccgagaatcttcttgacgaagcggtcgatctcatcgggcgtcaggggcttggtgtccggctggaaggagaggctgaaggccatgctctttttgccggcgcccagcttttcaccacggtagatgtcaaacagttcaaccttggccagctgcttgcaggcgcgctgcatctcgcatacaagggtgccgcactccatgctttcgggggctacaagcgccagatcgcgctgtaccggggccagcgcagggatgggctggtagtggatggcggcgggcaccagcgcgtggaaggccacccagtcgatctcgcccagatagatgttcaggctgccgcggctgtccttgggcagcttgagctcggcggtgacatcgttcgccagcttgccgaaaacgccgacacgctcccccttgcagaggatataggcggcgatgccgggatgcagccatgccacatcggccgcacgcgcaacggtcagctcgacaccgaatgctgcgccgaagctttcgaccgcgcccttaacggcaaagaagtcctcctcgctgccccatgcggcaaagccaaggtgcaggcgctcctccggcagctcggtgatgggctgctgtttcggaatgtagatgttggacatctcgaaaaggcggctctcggcattgcccttgcgcaggttgtcaacgaccacattcagcagggacggtgccagcagcggacgcatgatggtcagatgagaggagatcgggttcagaatacggatgacattgcgctcgagggcatcagcggcaatgtgcagcatatccagatcggcatcagcgtagaatgccagtgtttctgcctcatagaagccctgcgcacacatggtacgcttggccttggcctgtgccttctgctccgccgtcagaccgccggtggtgacggtggcagccttcaggaaggtaggcacgatatgctcatagccgtactcgcggatgatttcctcggcaaggtcaggctcgccgacctcaatgtcctcgcgccagcggggcgcaacgacctgcatcgtatcgccgtctgcctcaagcttgacctcaaactgcaggcggttcagaatgtcgagaatgtcgtccgtgggaacggtgatgcccaaaatggcattgatgccgctgaccttggcagtgaaatgcttaccctcacgcggggcaccggccgagcagtcgaaatgggtggcggtgacctcgccgcagcccagctcctgaatcaaatgcagggcgcgggccatgcccaactcggtcgtatactccgagatgcccttttcgtagtggctggaggcatcggtgctctggcccagaccgcgggcagtcttgcggatgttgtcgcgggcgaacttggcgctctcaaacagcagctgggtcgtggtgctcttgatctcgctgttcagcccgcccatgacgccggccagcgcgaccggcttggagccgtcgcagatgacgaggttgttgggcgtcagggtgaactccttctcatcgagcgttgtgatcttctcgccgtccttagcgcggcggacgaggatctggcagctatccagcgtgtccatgtcaaaggcgtgcatcggctggccgatttccagcatgacatagttggtaatatcgactacattgtcgatgctgcgcaggccgcacagggccagctgacggcgcatccagcgcggggactcgcccggtgtgatgttgcgtacatagtggccgatgtagcgcgggcagagatcctccgcttcaacgcggatggagaggcgcggttcggtgtaatcgctgacggtgtagtcggtggcgggcattttgagaggctttttcagcacagctgcaacctcgcgggcaatgcccagcacgctctggcagtcggcgcggttggcagtgatggagatgtcaaagatatagtcgttgagtcccacaacctcctgaatcggcgtgccgggaacggtgtccttcggcaggtcgagcagaccgtagacctcagagccggggtaaagatcatcgttcagacccagttcctcaccgctgcagagcataccgttggactcaatgcccatcaggggcttggccttgatggtgatgccgccgggcagcgtggagccgtccagtgcggcagcggtgtgcataccggcatagacattggctgcgccggtagagatctggatgtcgtgaccatagtcaccgcagtccaccttgcagatgtgcagatgcgttccctcctgcgggacgcactcggtcacaacaccgacaacgaccttggagatttcaccgccgaggtcgatcagctcctcaacctcaaagccgcagccgaagagtttatcctccagctcctgcgcggtgacatcaatatcaacatattgctttaaccagctgaatggtactttcatactctgtactcctcccctgtcaatcctcgaactgcttcaagaagcgcagatcgttttcaaacatcagaccgatgttgttgatgccgtatttcagcatggcgatacgctcgataccgatgccgaaggcaaagccggagtagacattggggtcgatgccgcagttttccagcacgctgtgatgcacaacaccggcgcccagcacctcaatccagccggtatgcttgcagagcgggcagcccttgccgccgcactcaaagcaggaaacatcgacctcgacgctcggctcagtaaacgggaagtaggaaggacgcagacgggtcttgacctcggcaccgaacagagcctgcacgaacttatccagcataccctgcaggtcgcagagggtgatgcccttgtcaacgaccagaccctccatctggtggaacatcggggaatgggtcgcatcagagtcggaacggaacacacggccgggcaccagcaccttgatggggggcttttcgcaatccattacacggatctggccgccgctggtctgggtgcgcagcacaatgtcgtccgcgacatagaaggtatcctgcatatcgcgggcgggatggttcttcggcacattcaggcgggtgaagttgtggtcatcgtcctcaatctcagggccttcataaatttcaaagcccatgccggagaatacatcaatgatctcgttcttgacgagggtgatggggtgcaggttgccggtcgtgcggatcttggcgggcatcgtaatgtccaccgtctcggcagcgttgcgggcagccagcgccgccttctcgacctgctcagacagggtctggtactgagcctcgacccactgcttgaattcattaatggtcttgccgacggcggggcgatcctccttggggacatcgcgcaggctcttggtcaggcctgcgacctcaccgtttttgctcagatatttctgccagaagtcagaaagctgggctttgtcagtgacggctgcgccggcctgctcaatagcggcgcgcagctccttgattttttcttccatagtacacctctgcttggcttttgggccggagccaaataaaaaggccccgtccctgtgtgaaatcagggacgaagccttgtaaatacaattctccgcggtaccacccgtgttccgcattatgcaatacggcactctttgctgcgggtaacggtgcagggccgttgcgcactaccgggccgttgggcctttcccgcgcaccactcgggagagaacttccgcgcatagtccctgcaggcggcttacagccggtgaccgccctctcttgcccaaggcgcattgcgcgtacttactccgtcattgtgttttgcgaatacttgtttagtatagcgcgaaatttgcggcctgtcaagcctgcggcatgggatacttctgcttatcctccacgctgatggccttgccaagctgcacctcgatcaccttcagctcggtatcggccaggatcgtgtgcttgcagccggctttcatcgtcaggatgtcccctgccttgacgggctgtgccttgccgtccagaatcgcacggccggtgcccgagataacggtccagacctcatcgcggttctcgtggctgtggtagttcatgccgtgaccggcgttcagcgtgatcttgatggtcaggctttcatcctccacatccagcacgcggaaggacccccacgacttttcagcaaacatgatctgctggtggatgctgtccacatagggcttgatatagctggactgctccttatcggagacgaggataccctcggggctggcagagacaacaacatccttcagtcccatgcaaagcaccggtacatccagctcattgagaacatgcacattctcacaggtctcattcagcatggccttgccgatgctcggctcctgcatggcctcggtcagggtgttccaggtgcccatatccttccactggcctgcaaagcgcatgacctgaatcttcggttcattctcaacgaccgcataatcgaaactgatcttcttcagcgtatcatatttacggaaaaggtcctgataatcggtaaagtcgatcagctcatgtgccttgtccagcacatagcgcagcttgtaggcaaatacgccgccgttccaaagcgcaccctgcgcaatgtacttttcggccgtggcggcatcgggcttttccttaaaggtcttgaccgggctgacggtgtcggcgctctccggaatgatgtagccgtacttttcgctgggataggtcggctcaatgcccatgagcgagaggttggcgctgcccttttccgcaagatcggagagatcctttaacgcggcaaaatagtcattgttgacatacggatcaaccgggcagacgaccacagcctcatcaaggcccacgccctttacatcgtgcagataggccgtggccagtgcaatagccgggaaggtatcgcggcggcagggctcaacgcagacgccgaccgaattgccaagctggttatggatggacgacacctgcgtcttgctggtggcgatcgtcacgctggcatcagcgtccacctctttgatctggcggtagacgcgctgaaccatcgactcgtagccatcatcggtcttaaagatcttgatgaactgcttggagcggatatcgttcgacagcggccacaggcgcttgccggagccgccggacagcagaatgatattcatagcttttcctttcagcgctcggcgcgcatcgggttgtgtaagaaatcctcataggacaggcgcaggccgtcctccagctcagtcctgtaggtccagccgaggttcgtggccttggacacatccagcagcttgcggggcgtgccgttgggcttggaggtgtcccacttgatctcgccggtatagcccacgaccttggcaaccagctcggtcagctccctgatggtcagctccttgccggtaccggcgttgaccgtctcattgccggagtagttgttcatcaggaaaacgcacaggttggccagatcgtccacatacaggaactcacgcagcggagagccgtcaccccagcaggtaacgctctccacaccgttgaccttggcctcgtggaagcggcggatcagcgcagggaccacatggctgtgggtcgggtggtagttatcattggggccgtagaggttggtgggcatgaccgagatatagtcggtgccgtactggcggttcagaaactcgcagtatttcaggccgctgatctttgccagcgcgtaggcctcgttggtcttttccagctcgctggtcagcaggcagctttccttcatcggctggggcgccatgcgggggtaaatgcaggaggagccgagaaattccagctttttgcagccgttctgccatgcggagtggatgacattcatctccagcgtcatattgaaccacataaagtcggccagtgcctcctgattggcaacgataccgccgaccttggcggctgccagaaagacatactcgggcttttccgccgcaaagaaacgctcgacatccgcctgacggcagaggtccagctccttatgggtacgggtaatgatattggtgtagccctgacgctgcagctcgcgcacgatggcgctgcccaccatgccgcgatggccggccacatagatcttcgcattcttttccatcatgattgttaccttcttttgatgcttttgatgaaattatttgataacgcccttttcgagatattcagccagattggttttgatatgctcctcggcgcgctccacggcgaccttcttcatgtcatgatcgaccatgatcttgacaagctctgcaaaggtggttttggtggggttccagcccagctcacgcttggccttgctggggtcaccccacaggttgacgacatcggtgggacggtagaaatcggggctgacctcgatgacgaccttgcccgtggccttgtcgatgcccttttcgttcatgccctcgcccacaaattccagttcgatgccgacattgtggaaggccagctcgcagaactcgcgcacggagtgctgctcgccggtggcaatcacaaagtcctcgggggtcttgttctgcaaaatcagccacatgcactcgacatagtctttggcatagccccagtcgcgcaggctggacagattgccgagatagagcttgtcctgcttgccctgcgcaatgcgggcagcagccagcgtgatcttacgggtgacgaaggtctcaccgcggcgctcagactcatggttgaaaaggatgcccgagcagcagaacatattgtaggcctcgcggtattccttgacgatccagaagccgtactgcttggcaacagcatagggactgtagggatggaacggcgtgttctcgttctggggaacctcctcaaccttgccgtacagctcactggtggaggcctgatagatgcggcagctgtccttcaggccgcagaggcgcacagcctccagcacacgcagcacgccggtggcatcgacatcggccgtgaactccggcacatcgaagctgacctgcacatggctctgggcggccagattgtagatctcatcagggcgcacggtgctgacgaccgagaggatgctcatcgaatcgctcagatcgccatagtgcaggtggaagttggggtgaccctccaaatgggcgatgcgctcacggtaatcaacggaggaacggcggataacgccgtggacatcgtagcccttctcaagcaaaaactctgccagatagctgccgtcctgaccggtaacaccggtgatcagtgcttttttcataatgcggtttccctttcatttgtatcttgcgcggtggttttgcgcgtagttttctgtatgtttgttattctaccgcattatttttcttttttgcagggcgaatcttgcaaaagactagcattatattgacttttttgctatactggttttgcagtgttgagatgtaaagatgtcggggcgggcattgctcacccacacaaaacaaggacggtagagttatggaagcaccgttatttgacggcaagctggtacattcccagcgcattatttatacaccctccccctttgcacggtcgaatcttgtgcatttgcaggaggttggccgactgcaggcgcgcagcccccatgccagcacccgcagggggctggcctcctacctattcttcatggtggagagcggcagcggcaccttggaatatgatggcaccactcgcgccctgcgcgccggggactgcgcatttcttgactgccgcaagccgtaccgccattatacgggtgaggacctgtggcagctgcgctgggtgcatttttacggtccgaacatgggggctatctacaaaaagtacgaggagcgcggcggtcagccaagcttccgcgccgagaatgcagccgcctatgccgtgctgctggaaactctgtacgcgctggcggattccgacaattatgtgcgcgacatgcagatatgtgaaaagctgctagccctgctgaccctgctgatgcaggaaagctggcaccccgaggccgtgcgcgcagggggtgcaaaacggcagaatctgcaggagatcaaggattatcttgacgcccactacggggaaaagatcacgctggacgacttggcggagcagttttacatcaataaattctacctgacccgcgtttttaaggagcagttcggtcagacggtcacaggttacctgatgcagctgcgcatcacacaggcaaagcgcctgttgcgattcagcgataaaaacattgaggttatcgcacaggaatgcggcatgagcgatgccaattacttttcgcgcatcttcaaaaaggtggagggcacaacaccgggccagtaccggcggcaatggtaagcaaagcgcaggagccatgcttgggcggcatggctcctgcgttgtttcattgtgttattttttcaagatgctccatgctgacccagccgtgccacctgccgtagagagtcagcatccaagagccatcctcgctgcggcccaactcctgcagggcggtatattccggcacaaggctgattttttcgtagcttgtatccggccccacacgcagccgcaggcctccggtggcggtgacccgccaaaaggtgtctgttgcctttagctcctttggaccaacctgaaagcgcatttttgcatcctgccaatgctccggcacgccgggcagcgttctgctttgccagtgtccgtcctgctgcagccagaggatatggccgttccatgctgcccctgcatagtcgcaggggatgtactccttcccggcggcgtccagtacaccccatttcccatcacggcagatggcagcata

SEQ ID NO: 14027 - DNA, 9566 bp, Unknown
  gut microbiota DNA sequence
gggctcccctacatccattgtttacaaaccgcccaaactacgctataataaaaccatcaaaaactttgacgaaagcaggtcacaccatgctcatcagtctgatcgtaccctgttacaatgaagaagaagcgatgccgcttttttataaagaagcctcccgcgtggcggctgagatgaaaaccagccacggcgcggattttgagttcatctttgtggatgacggctcccgcgatggcacgctgcgcgtcgcgcgcgcgctgcatgcgcaggatgaccgcgtgcggtatgtctcgttcagccgcaacttcggcaaggaggctggcatctacgccggtctgcaggccgccaacggcgattatgttgccacgatggacgccgacctgcaggacccgcccgcgctgctgccgcagatgctggacacgctgctgaccggcgagtacgactgcgccgccacccgccgcacgacccgcaagggcgagccgccgctgcgcagctggtttgcccgcaagttttaccagatcatcaacaggatgtctgacacggagattgtcgatggtgcgcgtgatttccgcctgatgagccgcaagatgaccgatgccgtgctgagcatggccgagtacaaccggttcagcaagggcattttcagctgggtcggctttaagaccaaatggttcgactacgagaacatcgagcgcgtggccggcacgaccaagtggaatttctggggcctgttcaaatactccatcgagggtattgtcggcttctcgaccacgccgctgctgatggcggcgggcgtgggcgtgctgttctgcctgctggcgttcatcggcattatttttgtcattgtccgggcgctgatgttcggagacccgacctccggctggccgagccttgtctgcatcattctgctgtgcagcggcgtccagctgttctgcaccggcatcgtcggcgagtacctggccaagacctatctggaggtcaagcaccgtcccatctacattgtggccgagacggagaaagacaaaaaataaaccatgcgtgatatgaccaagggtgccccgctggggcacctctttctgtatgcggtgccgctgctgctgggaaactggctgcagctggcgtacaatgcggtggattccatcattgcggggcggttcatcgggcaggatgcgctggccgctgagggcgtggccgggccggtcatgaaccttgtgatccttgccatcagcggcctgtgcatcggcgcgggtgtgctgatgagcgaggcgttcggcgcgggggagacggcgcgcctcaaggaaacgctggccacaacgctgctgttcggcgcgctgctctgctgcggtgcggctgcggcgggctgtctgctgacgccgtggatactgcgggcaacggccgtgccgccgtcgatttttgagatcacgggtgtctacctgcgcatcacctttctgggggcaccgttcaccttcttctataacgcgctcgcggcggggctgaaaagcgtgggcgacagcaaaacgccgctgaaattccttgcgttctctgcggtgctgaatgccgtgctggattttgtcctgatcggcgggctcggcttcggcatcctatgcagcgcggtcacgaccgtggtggccgaggctgccagcgccgtgatggctgctgtttacatggcctgccgcgtgccggagctttgccccgagcgcggccagtggcgcatccgccgcgcactgctcggcccgatcctgcgctacggctcggtgacggccctgcagcaggcggtgcagccgatctgcaaggtgctgatccaggggcaggtcaacgcgctgggcgttggctccatcgcggcgttcaacgcggtgacgcgggtggacgatttcgccttcacgccggagcagagcatcgccacggccatcacgacctacattgcgcagaaccgcggcgcaaggcagccggaacgcatccgccgcggctttgcggtggggctgcggctggaactgggctactggctgctggtgggctgcgtaacgctgacgctgcgccggccgatcctctcgctgtttgtggcgggggagggcgcggacgaggtcattgcgctgggcagccgctaccttgggtatatggcgctgctctacgcgctgcccgcactgacgaacagcctgcagggcttttaccgcggcatgggcaagatgacgaccaccctgatcggcacctgcctgcaggcgggcctgcgggccgctgcggccgctgtgctggccccgcgcgtggggctgccgggcgtcgcgtttgcctgcgccttcggctggtgcgtcatgctggcctttgaggtgccgtactatttttggacatgtaaaaagcaaaatttgaaaaaggcttctcccatgggagaagctgtccgcgaagcggactgatgaggggcggcgctgccggtattgtccatttgccgggcagacgcgcccctcatccggcctcgcgggctcggccaccttcccccaatgggggaaggcttttttgtgtaaaatttccccaatatctgctgcggctgattgtaatttcttcgacaaaatgctacactaataatagctatccctgcataaaatctacccggagagaggtaaaccgccgtgccagaagaacgcaaagtctaccgcagccccgcccgcgctgccaccaaagccagaccggcccaaacggcggcgccgcgcccgccgcagccgccccaaaaaccaaagcgccgcagtgcaaaacgccgccgcagccgtattgtgctggggctgtgtctgctctgcctggcggtcgtgctggttgtgtccgttgtgatggtgcgctgcacggcggagtccggcggcccggccgaggctgacttcggcacgcctgccgccgcatggcagaaaaacgaactgggctactacttcaacgccagcggcggggcgatcccggcggcggtgctgaagggcatggatgtctccaaatttcagggagaggtcaactgggagactgccaaggcggccggtatcgactttgcgattatccgctgcggcttcggcggtgagtgggacggtgtcgaggaaaactggacgcaggatgacccgcagtggcggcgcaatgccgatgaatgtacccggctgggcatcccgttcggcacctatctctactcctacgcaacaacggtggaggaggcccgcagcgaggccgaccatgtggcgcggctgctgggcctgaccgcgcccccgcaggaggggctggacgactacaccgccagcccgtaccggctgagctaccccgtctactatgatctggaggacaaatacatcagcggcgttttcccgtccgagatggccgagatcaccaaggcgttcttcgatcgcctgcaggagcatggctataccggcgagcagggcgtctatgcctcgctgaactgggtgcgcgcgcggttcagcgaccccgggtttgacccgtggcgcgacaacctctggatcgcccgcttctctgatgagctgggctacgccggcacctacgacatgtggcagtccacctacagcgcccccggcgcggactacggtgtgcagagtgagacggtggatcttgattttgtcatgcggccgtttacatttaccggcgtgagcgcctgcaacggcaagactgccgcgccggtgctgcaaaacgatacccgcaccgatgagctgcatatggacggcaaggacgcctacgccacccttgagacgaacgagcctgacgaggaggcgggcggccgcagggtctactggacaacaagcgataagagcgttgccacggtggacaaaaacggaacggtccgcgcctgcaccgacagcggcgagtgtacgatcacggccacgctggccgatggcaccgagagccgcacctgccttgtgcgggtgggggacatcacggtcccggtctttgccacggcggggctgcggggggaccgcaccacgctggcggacgccgccgcgctgaaggcctccaccccggattcgatcctgctggacgcgggcgatgccctgcacggcacccagagcgccagcctgaccggcggcatggatatgctgtcagccttctcggcggccgggtatgacctgcaggcgatggcgctgaacgattttgcctacggcacgacccgccttgtcagcgatgccaacatgggcagcggcccctcgcttgcctccaacctgctgaacaacgaggccaccgccgtattttaccgctccaccagctggaaccgcaaccgcgttacgaacggcatgtatacgatcgtggagcgcgcggggtacaggatcggcttctttgcgctgaacgacccggcgcaggccgccgggatctcggccgccaacggtgagtttatcacggcccgcgactggaccgataccgccaacgagcagatcgcggcgctgcagaacgccgggtgtgatgctattattgcgattgcggccaccgcgcccgggggtgactggcagaaggcgctgctgaacagcggcgtcaccgccatcattgacgtcaccgccgccgaaaacggcacgaatgtgctgggggcggcgcaggggcttggcggcatagcccggctggatctggtgttcacgcagggcggcggctgccgcgccgtgctgcagagcgcggtgacggccgaggcgatggagagcagccgcagcacctggcttgaaatggctgcggcgcaggcccagaccgagactgccgccgacgccgccgaccccggcaaggataccgccgctgcgggcggcaaggacaccgctgcccccactgagacggcggacgcagcccggcaggccggtgcagatgcctatgtctacgcggcggccaagatcgccgcgctggacgccgatgaccagagcatcctctacacgccgcttttcacctacgcggaaaacccgaacgcgagccggacgatcagcttcggcaactatctggcggcgctctacgctgaggctgtggccaacgatacagccagcggcctgccggagggtgctgcggtcgaggcccttgcaggcggtgtgaccgagccggagtacggagagatcacccgcggcgatctgatggcagcgctgcccgccaccgcgcgcatccagcttgtcagcgtccccgccgacgctgccaaggcgctggcggacagcggcagcgtgagccgcgtctaccagaacagcctgacagagtacacaccggcaggggacaccgcctacatcgtcaccgacacggccacgctggcggcgctgaacgcggactacaccgtcctgcgggattacggcgatgtattctgggcggtgcggatgaacattaacgatttgacgaataattttaccgatggctttaccctgcccgaggccccgcagtacggcgtggggcggcggggctgaaggatggacggcagcctcccgggaggtgttctttcttttgccaacaaaagaaagaaccaaagaaaattgccgctctttcgacggagcggacccgcgacctaggggctgcacgcccctaggaaccccaaagcggaagtcggaagtctcggcggctaaacggacgcagtattactgtccgttcttaacgccgccgagccttcctccaccttaaattcgggtgttcccccgaacccccgcagtggaaaatgggatgcgcgtaggggcggggctctgctccgcccgcgccgtcaggggagggcttccgccctcccttacccctctcgcttttcctctgctgctccgtagggcggcctgtcctctggccgccgtacctcgcctttggcacgacttggcactttagctgtagggggcggcgtcctcgacgccccgcggtcttgcctgcaggttcttggctgacaccaccggccaaagcccctccggcctttgcttcgctcggccacctccccgctatgcgaggaggctttcacgcgggcgaagcccgtgtaaaaggctccccattctggggagctggccgagcttgcgaggcctgaggggctttgcgcaccgcacgatcactacccattctccctgcaagcatctctcttctttctactctcttcactgaaaagggggacctacatgaaactcacattcttaggtgctgaccgtgaggtcaccggcagctgcacccagctggaggcagcgggccaccgcatcctgatcgactgcggcatggagcagggccgcaatgtctacgaaaatgccgagctgccgtatgcccccggcacctatgaggcgctgctgctcacccatgcgcacatcgaccactcgggccggattccttatctgtacaaaaacggctaccgcggccccatctacacgaccgaggccactcgcgacctctgcgcgatcatgctggcggattccgcccatatccagcagcaggaggccgactggaaaaaccgcaaggcgatgcgcagcggtgccgagatgatcgagccggactacacggtggaggacgcccagcaggtcatgaagcagttcgtgccctgcccctatgaggcatggcagaccctgttcgacggccctgccggccgtatggagatgcggtttaccgacgtgggccacctgctgggcagcgcatcgatctcgctgcgcattacagaggcgggccgcgcgccggagatcatcgttttctcgggtgatatcggcaacaggcatcagccgctcatccgtgacccggccaaccccggccatgccgactatctggtcatggagtccacctacggcgaccgcagccacgggccaaagccggactacctcggcgagctgagcggtatactgcagtccacctttgacaagggcggcaatgtggtcatccccagctttgcggtcggacgcacgcaggagctgctctatttcatccgccagatcaaggccgagggccgcgtcaagggccacggcaatttcccggtttttgtggacagcccgcttgccagcaagtccaccacgatcttccgcgaaaattttgccgagtgctatgacgaggaggcgcttgcactggtgcagagcggtgaaaacccgctgcagttccccggcttgtatatcagcgagacgaaggagcagtcggtggccatcaacggcgatgaaacgcccaaggtcatcatctcggcggccggcatgtgcgatgcgggccgcatccgccatcatctgaagtacaacctctggcggccggagtgtacggtgctgtttgtgggctaccaaagccccggcacgctgggcaacgcgctggtcaacggtgcgcaggaggtaaagcttttcggcgagccggtgcaggtacgggcgcgcatcgcccagctgggcgggctttcgggccatgcggacaaggacgggctggaagaatggctccgcgcctttgacgaaaagccgcgctttatctttgtcaaccacggtgaggacgctgtggccgagcattgggcggaccatctcaagagcgagggctatgaggccgaggccccctacaacggctcgatctggatcgcggccgagggccgggtcgcctgcgccgaggtcggcaacacccagaagatcctccgcacaaagacggccgccgctgtgcgcaccagcgcggcctacgaccgactttacaatatgggccagcgcctgctggaggtcatccgccacaatcagggcggtgccaacaaggaccttgcaaaatttgcgggccagatcgcggcgctgtgcgataagtgggacagatgatcgccatgctgcagaaaaaatggaaaaacctgcccgccgccctgcgcacggtgctcaccctgctggccgtgctggcgctggcggcactgctgacgactgtgcgccacaatgcaagcgcctaccgcaccggcgtgtgggacaccggctcgcagacgctgatctacggccgtatgcaccagatggagcagggccagcgtgcgcccggcggctttctgggcgtgtataccgaggattggagcgatgaccagaaccgctgctggttccgggaggatacccccgccgatgcggcgcagttccgcccctacacccaccagtccggcctgcagggctgggcgctgggcgggctgaaccggctgctgcgcggatttctgccggatggcatcgcccgggagactgcgctctactgggtgaacagcaccctattctacgctgtgcagctgctgacggcgctggccgtctggcaggagctgggcctgctgccggctgcgttctggatggcggccatactgctggccccatggctgcagcgcggcatgaaggacctgtactgggtgccatggacctggcagctgccgctgctggccgtgctgctgctctgccgctgcacctgcgcccgggggcgcaccccgcgctggtgctggccgctggtcagccttgccgtgctggtgcgctgcatgtgcgggtttgagtttgtcacgaccttcctgatcctgtgcgagataccgctctgctacgctgcggcaaaggcatactgtgtggaaaaggccccgcagcgggcctgccgctggctgggccgtgccgtgggtgcgggcgcagcggcactgaccggtgcggcagcggcgctggcgctctggttcgggcaggaatgcctctgcttcggcagcacggcggcggcctggcagaatatggccgaggccatcaccgaccgcatcagcctgacggacgatgcggtgcgggctgtcacgatcgggcaggtgctggcgcagtattttgcgctggataccgagccggtgctgcagctggggccagctgccgtcacggcggggcagctgcttcttttcgggctggcggtcggcgcggtcagcgtggtgatcgcgctgcggcgcggcgtggcggcgcagcttgtgccgctgggcgttgtatggctgctcagccttgcggccccggcctcgtggatggtgctttccaaggcgcacgccgccatacatacccatcttgtgccgatgctgtggcactttgcctttgtgccggtcagctgtatgctgctgccggcgctggccgcactgcttatccgggggaggaaaaaagatcttgtggcatcccattaaacattacaggaccatccaccaccataaaatgctggtgatgaaaaattgcttccgctgcgggctgtactggcagggcctgacccatgacctgagtaagctggccccggtcgagttctgggcgggggccaaatactggcagggcacctgcagccccaacaacgcccagcgtcaggccgagggctatagcgcggcatggctgcaccacaaaggccgcaacaggcaccatctggaatattggatcgactacgccccaaacggagaccatgccatggccggtatgcgtatgccggaacgctatgtggccgagatggtctgcgaccggatcgccgccagcaaaaactacaagggcgcgggctataccgatgccgccgcatgggagtattacgaccgcagcaaagatcactacatcctgcaccccgagacccgccgccagctggagacctgcctgctgatcctgcgcgatgagggcgaggatgcctgcttccggtatatccgtaccgagctgctcggcaaaaaagcataaggcaataccgcataattctaagtgccgatacgg

SEQ ID NO: 14028 - DNA, 292533 bp, Unknown
  gut microbiota DNA sequence
aagtaaattctttaatgtaccaccgtcagaaacaactccgaaaagtccatttcgaataagttcgtccccagtagagtgatggtacagattcatgattttatgatgttgcccatcaaaggtaccagcaaaatgtctgacaaagttgtcaccatttccaatgggggtccactgggtgccggataagtcgaggtcattatctaagtaaatcgttttcccttcaaatgatacagatgcagttttgtcattgactaactgcgctaaaccggccaactgttcggcagtggtgaaatggtattcagtatccgtcttatggtcggtgtaccagcttgtgtctgccgagccgtcccaattatctactgaagttccttcagcaaacgctaccattggcaaggaagtcatagcaaggcaaagcgttagcagaaggctaagaacctttttcttcattttcattcctccagtgtgttttaatcattaagaattgttgccgcagcaagtgtaccgataaaatagattgaagcatccgcaacacctgacaatcaggcgtaaagtttcagcagtgttcccccttcccacaaaagaaaaaatccgaaaacagggcacagttcaccctgcttccggattttacctgacgatttgatgtaatagggcttgacacattgaataaaaggcgcaatactactgccgagccgagccgagccgagccgagccgagccgagccattttcgcgccactgacagacattgtcaagccctcctttcacaattttaataagaaaaggatataagtccccttcccttacaaatatacaataacattataacagatttttcttataaccacaagtggctaataaaagagttcgaaaagaaatgccctaaaacgcaaaagtaaaccagagcacttttaaagctaaaaaagccaaagtctccggtttacttttgcgctttagggcgccaaaggattttcaatttacaaattttttgccgcgcacagcagaatttcctcggccttgtccagcccgagtttgctggtgcagagggtcaggtcatagttgcggctgtcgccgtagatctggccggtgtgctgcttgcagtagctgcggcgggcgcggtcggcactgtccatgtcggtctccagctgctcaaacggggtgtcgggcatcagcttgcgcatgtgcaaaagacgccagttgcggtcggcatggacgaacacccgcaggcagtggtcaaactcccgcaggatatagtcggcgttgcggcccacgatgacgcagctttcccggtcggcgatctcgcggatggcgcggacctgagcatcccacagctcctcgctcagggggcggttgtagaagttgaaaaggctctgggtaaagccgaactcatgggggacacgctcgtcccagcggcgcacctgctccggtgtcaggtgggcgctggccttggcggtctttaagataatgtcgcggtcatagtaggcaatgtccagctcccgggccagacggcggcccagctcgccgccgcctgcgccgaactcgcggccgatggtgatgatacgcttcatggcaggatcctccttcaggtaagcaggaagtgtagggcgctgccgtaccgcagggcggctcgataacgccatcatacccttattgtatcaaatccggcgggaaagtcaactggcgctgttcagccggtagccgaccttgtagacagtctagatgtcgttttccagcccaagcttgcggcgcagccggttgatatggacatcaacggtgcggctctcgccgataaaggcgtagccccacgcagcctcaagcagctggctgcggctcagggccttgtcacagtgggtcacaaggacggccagcagggcaaattcccgcggcgtcaggcaaagctcgcagccggcgcggcgcacacggtgggcgtgcaggtcaacggtcaggtctttgtaggcaatgtatgggtcatacggggtcatgataggggccctcctttcagattgggtaggggtgctgttatctataataacgatgaatgtttccgagttgttacaaaaatcgaaaaaatccgtaatttttttaaaaaatgggaaggacgggcgttttccacatttcaacaaaacctatatatcgtgggttttggacagtttacaccgggttttccacagtttcaacatggttttccacatttcaactgtggaatgatgtggaaaacctgtgcaaaatgctaaggcaacaccgcacaattcccgcctgacggcttaagcaccgctccggcggctgcggtacggcatctgcgttgccaaaatgctcgataagacatccagtattatctgcgcttttggcttagcagctgccgcacctcgctcgccgtatcggcacttagaattatgcggtattgcccaaagactgcgccgaacggcccagcgcggcggtattttttgcgattcgttcaaagttgtgtcacatgctgttcatttttagagcgcatgctatactcgtacaaagggcagcaccgccaaagatgcggtgtctgcccggacaaaagaggaggccaatggcatgaaagaaacgacacagccgccgaaggacccgaaaaagaaactgtgggtcggctatgcggtcattctggcaatcgtgattttgagcaatatcttcctgtatccggcgctgatgcaggccggtgtcaagagcgtgaactacagcaccttcctgcagatgctggagagcaaggagctggccaccgtccagatcgaggaccagcagatctattttgtggacaagaacgaaaactccttcaagacgaacgccatcgcgcaggacaacaacctcgtggcgcggctggaggatgcgggcgtggagtttggcaccgtctaccaaagcccgacgatctgggactcgctgctgaaccttatcatctccttcctgccgatgatcctgctgttctggttcatcaaccgctgggcctccaaaaagatggagcagatgggcggtgccggcggcaatgcaatgctgttcggcggcaaatccggcgccaagcagtatgttgtcgatgatgagaccggcatcaagttcaatgatgtcgccggtgaggacgaggccaaggagagtttgcaggaaatcgtagacttcctgcacaaccccaagaaatacgaggacatcggcgccaagatgcccaagggcgtgctgcttgtcggccctccgggtaccggcaagacgctgctggcccgcgcggtcgccggtgaggccggtgtgccgttcttttcgatcgccggcagtgagtttgtcgagatgtttgtcggcatgggtgcaagcaaggtgcgcgacctgtttaagcaggcgggtgaaaaagcgccctgcatcgtctttattgatgagatcgacacgatcggcaaaaagcgtgacggcggggcgaacctcggcggcaacgatgagcgcgagcagaccctgaaccagctgctgaccgagatggacggttttgacgccgccaagggcgttgtcattctggccgccacgaaccggccggagtcgcttgacccggcgctgacccgccccggccgctttgacaggcgcgtgccggtcgagctgcccgacctcaaggggcgcgagagcatcctgcgcctgcacgccaagaaggtgcgccttggccccgactgcgatttcgccgttgtcgcccggatgacgcccggtgcctccggtgccgagctggccaacattgtgaacgaggccgccctgtgcgcggtgcgccaccgccgcaaggccgtgacccagtttgacctgcaggaggctgtggacacgatcttggccggtgcgcagaagaaaaataagatcctcaacaacaaggaaaagtgcatcgtctcctaccacgaggtcggccacgccctcgtcgccgcactgcagacgaacagcgcccccgtgcagaagatcaccatcgtgccgcgtacctccggtgcgctgggctttacgatgcaggtcgaggacggtgaccacaccctgatgaccaaggaggagatcctgaacaagatcgccaccctgaccggtggccgcgccgccgaggagctgatcttccactccatcaccacaggcgccagcaacgatattgagcaggccaccaagctggcccgcgcgctggtcacccgctacggcatgaccgaggattttgacatggtcgcgctcgagacggtgaacaacgcctatctgggcggcgatgccagccttgcctgcagtgagcagaccgcagcgaaggtggatgccaaggtcgtggagatcgtgcaggccgagcatagaaaggcctataagctgttggcggacaacaagcgcaagctggacgagatcgcccagtacctgtacgaaaaggagaccatcagcggcgaggagtttatgcgtattttgaacgcgcagccgcaattaccggcggggacttcggcagattccacaaacgcagtgcagtaattttgtatagttgtcgttcgattgccccttgacgccgccgtcacagccttgtatgataagtacacaaaccaacccggcgagagggggaaaacgagagtgacctttgaagaattgcaggatctgctggcagagcagttcagctgtgacaccggcgatctgaccagaagcacggcgctggaggatctggacgccgaccatgaggatatgatcgagctggcctgggcgctgggcgaggcaatcggcgtggagatcgatgaaagcgagctgagcgaggatctcaccatcggtgagctgtggcgctttgtgcgcgataaggaagaaaacgccgaggagtaacaacaaacggaaggcctgccctttgcggcaggcctttttggtatctgaacggccaagccgcccggggcggcgcaggatgagaaagcgggaatcatgacaaacacgaaagcaaaacatttctgggcagtagcggcgctgctggcggtggggcttgcggtgatgctgctctatgccgggcgcaagcagggctaccatgtggatgagctgtatacctatgagttggccaactaccccggcggcttctatgcgctgcaggacggctatctggacagctggcatgacggcagcttttacaaggcggccctgtcggcggagcggccctttgcctacagcatcccatggaacaaccagaagatcgatgtccacccgccgctctattactgtctggtctacacggcggaatcgctctttccgggactggggctgccgtgggtcgggctgctgccgaactttgtctgcctgcttgcgggggcagcggtgctgtacctgacggtacgccgtctgaccgggcggttctggtctgcgtggacagcggcggcctgctggctgctgagcgtcggcgtgcagggtatggccgtctttacccgtatgtacagcctgatgatgctggagggcatcgtgctgctgtactgccatgttgtgttgtggcaggcgctgcagcagggggcgcggccgccccggaccgtatgggccgggctgtttgctgccacgctggcgggggtgctgacccagtatttctttttggtgtactgctttttcctctgcgggctgttcgggctgtggctgctggtcacgcggcggttcagaacggcggcgggctatgcggcggctgaactggccgggctgggggcggcgtatctggccttccccacgatgaagcagcatatcttttccggctcccgcgggaagcaggcgtttaccagtgtgttcgatgtctcggcgctggcggactgggcggccagtctgggccgggtgttccgcctgctggcggcgcagttcggcgggctggcgctgtggggcgttgtgctggcggctgcggcgatcctgctgtggcggcgcggtgcgcggctgcggggcaatggcctgtttgccgccgggctgctgctggctgcctgcgggtatgtggtgctgatcgacaaggctgcgccgtttgaggctgaccgctactatgtagtgatctatggtgcagtcgtgacggcggcggcagtgattctggcgcggctggacccatggcgggatgctgtgctggcgctggctgtggtgccggtgctggcagcacattttgtgcatcccaacgaatatttgtacgagcagtatgccccgcgcaccgaggcgctggccaagacggccgccctgccggccgttgtgctgaacaacgccggctacgatgttgcgccggacctctttgtcacagagttcgccgcgcgggaggctgtctatcaggcaggcgccggtgacgatacggcaagcctgcaggcggccgcccaaagccgcgatctgcaggatggatttgtggtgtacgggtatgtatatgacgcagatgcgctgaaaacgatgatcgaggacacgctggacacagaaagcgtggaattgctgaccgatgtggcgaagtgcccggtgtattatgtgaagctgaagtaaggaaaacggggcagacgaaaaggggctgtgaatggtttataagaaaaaaatcaacggctgggcggcggtgacgctggtgtttctggtgtgcgcggttgtctatgggctgctgagcagctacccgcgggagctggccgtctacagcgatgagctgcgctatctggatgtggcgcgcagcctgctgcaggggcgcgggctgcgggtacgcaatatgcccagcgattaccagaagatcctctacccgctgtgcatcctgccggcgctgctgctgcggaccacagccgcgcagatcacggccatcggctggctgaatgctgtgtatatggcaagcgcggtctttccggcctatgcgctcgcgcgtgcgatgcggctgaacccgcgccgcacggcgtttctggtgggggtcacggcggtgctgcccaccatgtcggcagcggctacctttatgagcgaaaccgtgtttctgccgctttcactgtggcaggtgtactttttcctgcgggcaatgctggctgcgccgcgggcccgggtgggctggtgcgcggcggcaggggcgttctgctacctgctgtatctgaataaggaggtcgcgctctattacctgattgcatgggtgctggtgcgcggctgggtatggtggcacgataaggcaggctggcgtgctgagcttgcctgcaatgcggcgctgctgggcagctttctggcctgctttgtgctggccaaggtcacgctgttccgggggctgggcaactcctacaaccagaccggctggctgaccggggagcagtggcgtttcctgccctttgcgctggtctgtgatgcgctgtttaccatgctggcgttctgggtgtaccccgtgctgctgcctctctgcgggctgcaccggccccgccggggcagcgatgcccgccgtacccagctgccgcttttcctgctgctctgtctcggcatcggcgtggcggtcatcgcatggtccatcaccgtgcgggaggatctgcacgatccctcgccccggcagcatatgcggtatctggagccgctgctcatcccgctgctggccgtgacgatggacacgctggacgaggcactgacccccgcccggaaacgcctcctggccgcgctgaccgccctttggggcatcggctttgcagtggtctgccgggccattggtgcgggcgcgggggacaataccctgctgcagtggtttgactttgtggccgaccgcaccgaccgcctgcccggcggcagccagaccctgtggctggctgtctggcgcgtctgcattgtgctgggcgtggctgtgctgggcgctgtgctggtgcggcaccgcggccgcagggggctggctgccgccgcgctggtgctttgcgcggcctgctatctgggcgagtggcggatcaaccgctggacctacgcgatacccgctgagagcgcggccgacgccagcgcactgaatgagagccttgccgcgctggacggcagggtgctgttcctgccctatggggtgcgccagcgggacagccagcttatcgaaacctatatttcacgcgatctgtaccttgtggaatatgagacgctgcagcacagcggtgtgctggcggacggtgtgctggatctgaccgccgaggcggtcggccccgagtacccgggccgcgcgtatgaggatctgaccgctgcagactgggtgctggccgccgagggcgtgccgctggacaccgacacgctggaaaaggcggacgcggtttgcccagcggggtatgtgctgtatcggaatccggatgcacagagagtcaggtttgtggtatcgtgagcgggcgcgggcggatatggaatccgcccgcggaggtctgcgctgccctgacctgcaaaaatggcctcctcttttcccaagagggggctttttttcttgcgattggcggtgcggtgttgtataatctttattatgtagaattgtgtgcagaaaaggagctttccatggaaaaactactggtttttatccctgcctacaactgtgaaaagcaggtcacgcgggtgctttcgcagctgcttgacaaacgcatcgccccttgggtgggggagtgcatcgttgtaaacaaccgttccaccgacggcaccgaggccgctgtgcaggactggatggcccgccaccccgatgcaccggtcagcctgctgcgcaatgactgcaactacggtctgggcggcagccataaggtggcgttcggctatgcggccgcccacgggtatgcgcatcttgtcgtactgcacggtgacgatcagggggccatcgccgacctgctgccgatcctgaacgatgatacctataaaaaatacgactgctgccttggctcccgctttatgcgcggcagcaagaccggcggctacagtgcgctgcgcacggtgggcaactacggcttcaactggcttttcagtctggtggcgcgcagaaaaatcaccgatctgggcagcggactgaacctgtatgccgtggccccgctgcaaaacgaatactacaaaaagttccctgacacgctgtattttaacgattgcatgattctggcgctctgccagatgaagcagcgggtgctgttcttccccatcagctggcgggaggaggatcaggtcagcaacaataagctgacgagcttcggcatcagtctgctcaagctctgcgggaagtatctggccgggccgaaggcgtttgtggagcgcgagtggcgcgacaacatcattgaggattacagctacgaggtcgtagcgtccaacctgtaaggaggtttttgcaatgaaggttctggtaacgggtgcagccgggtttatcggcggtcagctctggcacaggctgtggcagcgcggcgatgaggtcgtgggtatcgacaacttttcctacggcaatctggacaacctgaagtttgacgaccatgatttcggtgccgaggtgcggaagatggatatccgcgacaaggccgggatgctccagctgtttgaggaagaaaagttcgatgtcgtgtacaacatcgcaggtatcgcccccctgccggactgccagagcgacccggtgcaggccatcgaggtcaatacgctgggccttgtgaacctgctggaggcaggccgccgcaccggcatccggcagctggtgcaggcctccaccaacgctatgtatgagaacgaaaccgagttcccgaccgtggagtcgaagttcaacccgccgacgctgatctaccccaacacaaaatactgcggcgagcggtttgcccagagctttgccgacacctacggcatgaccgtgacctgcctgcgctttgccaatgtctacggcccccacatcgactgcctgcgcaagcagccgccgtttgtgggctacatgatccgcgagctgtactatgaccgcacgccggagttccactctgacggcagccagcgccgcgattatatctatgtcgatgacctgattgcgctggcgctgcgcgtggtggagcagccccggaagggctttgacgcggtgaatgtctccagcaaccgcagctattccgttaaggagctgtatgccattgccagccgcctgatgggcaagagcatcgaggccaaatactgcccaagcagccattactgggccaaatatcccgagctgtacggcggggcctacggcatcaaaccggagatccttgaccatgaggtgaacaagttcagccagtgcgacaacacccacgcccgcgaggcctacggctggcagccgcaggtggacatcgagacgggcctgagccgggtcatcgaggcggaaacgaagatgctggcggaaaaagataaaagataatagataagagataatagaagatatggagtttttgccctgcggggcaaaaacaaaccaccatacttatttgttaaaaagcaggtacttacatgaataagctgcacttaatcttacccatggccggtcgggggagccgcttttttgaaaacggatttgtctgcccgaagccattgattgaaattaacggaaaaccgttcttttactgggcggcgcgcagtattgagaaatatgtggactgcgccgacatcacctttgttgtgctgcaggagcatatccgcgactttgcgattgacgaaaagatccggacctactggcctgaggcgcgcatcattgccctgccggaggtgaccgagggggcggctgtcacggcgctgaagggctgcgagggcctgcccgacggtgagccgatccttttcaatgactgcgaccacctgtttatctgcagcgcgttcaatgcgttctgcgaaaagggccgctttgccgacggccctgcgggggcgctgctgacctttgagagcgattccccggcctacagctacctgcagtacggcgcagacggcaatgtctgccatacggtggaaaagcaggtcgtcagccatgacgccatctgcggcgcgtattattttaaggataagcgcacctacgccgatgcctgcgccgcatatctgaaaaactgtgagtataaggaattttttgtatccggtatctacaatgtgctggcagcgcagggcgcacggatcgcaggctttgcgtgtgatctgcacctgcccttcggcacaccggacgaataccgcaccgcagaaaaaccggagaaccgcaccggatttgacgcgctggggtgacaatgaaagtctgctgtccggttgtgatcctgcctgcggcggggatcatctatgcggtgatgaaagataaaaggaagcgggagagggtcacggactgatgatcggactatattttgtgttggcactggtgctggtgctggtgggccatgcgttccgtctgctgcggtgggagcagtttatccgcatttatgagcggccgctgcgcgggcagatgctgcgcggtatggccggcggctatgcgctgaactttgtgctgccgttccatctgggggacgtgttccgcgcggtctacacgggccgcaggatgaagagcggcatcggctttgcgctggcgacggtcatcatggatcggttcctcgacgtctggtttgtggcgttcgggtttattgcgttccggctgctggggctgggcggtgcgccggtggacggcgcggcgcggtattaccttgtgttctcgctgctgctggtgctgggattggtgctggtcgtggcgttgcgggattttttgaagaaaatctgccttgcgttctgcgggctgttcaatgacacgctgaagctggacggcatgatgttcttctggagcctgatcaacaccttcaaggatcttggccgggtgaagatcggccgccttgccgccaatacagtgctgatgtgggcggcgtatctggggtcctacacggcgctgggggcggccctgaccgctgccgggcagccgatgaaactggtcggcgtgtttgaccttttgttcgggcgcagcgcggccgatcttacggcgctgctgcccggcggtgcgctgggcaccgccgcccctgcggcgcgcgggctgctgctggcgtggtttatgctgccgctggcggccatgtgggcagctacgctgctgcccgagcgtgtgcgcggtgcggtcaatcaggcaacgcaggccgccccggcggaggaaagctatctgaatctgctgccgcaggccgatgagcatgaccgtgccgtctttctgggcaagtatttcgggctggaaaacaaggagtatctgcagcgctttctgcagatgaaccgggatattacgatcctgcaggattattcggcgggctccaacgccacaacgatgctctgcatggacaagcagtctaccttttaccgcaaatatgccttcggcgcggacggagacaagctggccgagcagatcgactggctgcgcgcccagcaggaccggctgccgctgtgcgagatcctgcgcactgcgcgggaggatggctgctgttggtatgacatgacctacaacccacaggcggtggggatgttccgctatctgcactccaacccggtcgagaagagccggcgcatcctgcgggaggtgctgcagacgctggaggagcagctgtaccgcccgaccgcccgcgcggcggaccctgcagcgatcgaaaagtacattgagacaaaggtggacggcaacctcaaaaagatccgtgaggaccgcgccctgcgcgagctggtcagctgcgatacgctctggatcaacggtacagagtacaaaaatctgaaccggctggacgggctgtttgaccatgcgcggctgcgcgagttgtttgcggcagaccctgtggggacgatccacggcgatctgacgattgaaaacatcatctgccgtaccgacaatgacgggtggtatctcatcgacccgaacaccggcaatctgcatgaaagccccttcctcgattacggcaagctgctgcagagcctgcatggcagctatgaatttatgatgaaaacgccccgcgcggcggtgcaggaaaaccgcatcgactttcagctgacccgcagcgccgcctacgatgcgctgctggcagccctgatggaggatctgaagcagcgctacccgcgtgtgcaggtggagagcatcctgatgcatgaggtcatccactggctgcggctgatgccctacaagctggccaaggaccgcaagcgcgcgccgatgttctatgcagggctggtgatggtggccaacgatgtggctgatttttgtgaaggaaaagagggaaagctatgctgatctgtgtggatctggacgggaccctgctggacacggtgccggctaatgcggcgtcctaccgcgcggcgctggaggaaatgggctttaccgtgaccgatgaatactatgcagcgtcctgcaacggcgggcattacacccgctttctgcgcccgctgatgggcggcgacccctgtgacgccgatgtggagcgggtgcatgaccgcaagaaggagctgtacagtgactttttggacatggtgcggcctaacacggcgttgatggagatactgcgcacgatgcaggcggccgggcatgatctggcctgtgtgacgaccggcagcaagcaaaacgccaccgaggtgttggagcatttcggtgtgcgggaactgtttgggctgattgtgaccggcgaggatgtggaaaagcagaagcccgacccggaagggtattgcaaggcgatggcgtatttccatgtgacacctgccgagacgatgatttttgaagattcgggcattgggctggaagcagccaaggccagcggagcgaccgtatttagggtggagcagttctaagaagcagcactgcaggggccgggcatgcccggcctctgcgtagaaggtaggagggcggttgcggaaaggcccggcaaagcccctccgccttcgcttcgctcggtacctcccctgagaggggaggcttttcggggcgtcgaggacgccgccccctacaacaaaaaaacagcccttggggaacttatcctcaagggctgttgggttattttggggaaattacttgttttcggggcggacgatctcgcggatgacgctgacgatgttctcggcggtcaggccgtaatcgcgcaggacctcattggcggggccggagtggccgaactgatcctgcacgccgatgcgatgcacgagacagggcagcttctcgctgacaaccgcgcagacagcctcgcccagaccgccgatgacgctgtgctcctcgaccgtgatgatgcggccgcactcgcgagcagccgtcaggatgatctcctcgtcaatgggcttgatggtcggcatgttgatgacgcggacattcagaccctgacgcttggccagaacggcggcgcgcagcgcctcgttggtcatcaggccggtggcgatgacggcaatgtcgtaaccatcggtcagcttttcgcccttgccgatctggaactcataggtttccggatcgtggaaaacaggggtggccagacgggagaagcgcagatagacggggccctgatagttgtaggcggcgatgacggcggcgcgggcctcgacatcgtcagcggggctcagcaccaccataccggggatggagcgcatcagggcgatatcctcgcagcactggtgggaggcaccgtcctcaccgacagagaggccggcatgggtggcaccgatcttgacattcaggtgggggtagccgatagagttgcggatctgctcaaaggcgcggcccgcagcaaacatcgcaaagctggacacaaagggaacataacccatcgtgctcatgccggcggcaacgccgaccatgttctgctcggcaatgccgcagtcaaagtggcggtccgggtaggccttcttgaagatatcggtcttggtggcggcggccagatcggcgtcaaaaaccaccagattgtcagcgccctgctgggccagttctaccagcgtgttgccgtagctgacacgggtagcaatttttttaatctcagccattgttgaactcgatctccttttccagcgttgcatgggcggcgcgcagctcagacatggcctgtgcgtactcgtcgtcattgggggccttgccgtgccagccaacggaattttccataaagctgacgcccagacctttggtggtgcgcagcaggaagcaggtgggcttgccgctgccgtgggacaggtcaaacatcttgaaggcctgctccagatcggagaaggagttgccgttgcagacgatggtgttgaagccgaaggcatccatcttgtggtccagcggctcagagttcatgacatcgcgggtggcgccgtcgatctgcaggccgttgacatcaatcatgatgcacaggttatccagcttgtagtggttggcgaacatgaaggcctcccagcattcgccctcctcgatctcgccatcgcccagcagggtgtagacattgatgtcgctgccggactgcttggcacccagcgccatgccgcaggcggcagaaacgccctgacccagactgccggtgctcatatcgacaccgggcacggtgttcatgttgggatgcccctgcaggtagctgttggagtggcgcagggtgggcaggtcggcgaccgggaagaaaccgcgctccgccagcgtggcatacaggccgggcgcgcagtggcccttgctcaggacaaagcggtcgcggttggggtcctgcggctgctcgggatcaatgcgcatctcgcggaaatacaggtaagtaaaggcatccgctgcggacaggctgccgcccggatgaccgcacccggcaccgtgggtggcctcaatcacacccatgcgcacgcgggtcgcagtcaatttcaactgcagcgtttccagttttgtcatagctaagttcctccggtcactattggtaaaatcgggtggtattttgagataccactacacaatatactacttctattatacacatttcgcagaaacacgcaagatttttttacaattttcgtggctgcacggcgcggcggcgaaaaaaccgcccgccgcacaaagtgcgatgctgcgcaccctttgtgcgttgtgccaaaaaatggcgcgattcgtacataaactacggcgaaaagccccttgcgcacggggcggttttgctttatactttatgtaaagccgcggtgcggaaaacccatcatcttacgcagccgcccggcccatactactatatctgggagggaaacaaagtgcccaacgggatctacatccagactgagtaccacggcaagcttatccgcaaaatcgtctgcaacggggacgaacggtggttcatcggctccaactgcgccgtgacctttctgtcgatggacgactgcatggccgccattgaccgactgtaatggaataaaatgctgccgcaccccgtcttatgcgatggggtgcgttttgttttacgggatcatgcagcaggaggaaaggcctttatgaaaaaacataactggcggctgatgctgcgccgggtgctgaaccttgtgttcagccgtctggtcgtgacggccgtgctgcttgtgctgcagatggtgtggctgtttgcgctgttttaccgtctggcggactatgcccggtggttcaacgctgccggcctgacgctgagcattatcatgtgtctggcgctgatccggcaggactccaccgtgccggagttcaagatcagctggatgatcctgtttgcggtcatgccggtgcagggcggccttttgtacctgctgtggggcaacaagcgcccggcgcttggtctgcgccgccggcaggagcgggccgagcaggccatggcggatacccggcgcgaggaccccgccgctgcggcccaactgtgcgcggctgacccgcgggcggcgctgacagcgcgttatctgcatgattacgccccggcgccgctgtacggcggcacggcggtgcgatactacccggacggccagacgatgctggccgacatgctgcccgccctgcagagcgccgagcgcagcatctttgtcgagagctttatcatcggcatgggcgagatgtggggtcagatccatgagatcctgcgccgcaaggctgccgcgggactggatgtgcgggtcatctacgatgatgcgggctgcctgagcctgctgccccacaactatgccgagctgctgcgggcggagggcatccgggcgttcagcttcaaccgctgcgtgccggtgctgaaccttgtcatgaacaaccgcgaccaccgcaagatcatggtcattgacggaaggatcggctttaccggcggcgtgaatctggccgatgaatacatcaaccggctggtgcggttcggctactggaaggacagcggcgtccggctggaggggccgggcgcgggggcgctggccaacatttttctgaccttctggaaggcgcagtaccccgatgaggatattgacatcgaccgcgacctgcccgccgctgcgccggtgccgaccgactgcttggtgcagccctttgccgacagccccgtggaccgggaggccgtggcgaagaatgtgtatctggaactgatcaatcaggcgcagcggcggctgcagatctgcacgccctacctgatattggacaacgacctgctggcctgcctgcggctggcggccaagcgcggcgtggatgtgcgcatctacacgcccggcgtgcccgacaagccgacgatctaccagctgacccggagctacttcccgcatcttctgcgcgcgggggtcaggatcttcagctacacaccgggctttctgcacgccaagacatggctggtcgatgaccgcatcgcggcggtgggcacggtaaatctggattaccgcagcctttacctgcattttgagaacagcgtactgatctacggcggcgcggtgctggatgatgtgcggcgcgatctgacggaaatcgaaaaggagagcgccgaggtgaagctggcggactgccgcacagggttcttcggcacgatgtacagcgcggtgctgcgattggtagcaccgctgtgctgaggcaatgcagagcggagcaaaaccgcaggctggcgggcggtgcttgcctctgcaaaaagcataccaataggaaaagcccgtcccgggtcataccggggcgggctttgtcgttcaggagccgctggggccgcgggagctgacgcttgcaggcggggcggcggtgtaaaaggcggtgccgtttacggtgccctgtgtcatgccgacgaggtcgagcagctgattttccgtgtagggggcggcgtccagcttggaggatgtgcagcggtagacgccgtcggagaccgagacgatgccgcgccttgccaagcgtgccagcggtttttccagcgtctgcgggtcacagggatagcccctttcggtgagcgctgctgcgagctgggcggcggtgcgcggcttgtccctgagcaggagggcaagggcaagcagctgcccccggagatagtacgggagcagaccgcagcggagccagagaccttttgtgtacttcatgggggacactccttttcctcgtagtatcgtcatcgtagcatggatgggagcgggtgtcaagcgcgggaaatgaaaaaagaaagtggaagtcccgttttttgtattgacaaagaaaagttgttaaaatactattgacaactagcggttgttgatataggatggagataaccaacaatttccgcaatgacacaggcaatacaggaggaacgcgatgaactatcaggaaaaagtggcgtggcttgggcgctaccagaccgcgctgagctgccagcgtatgctggaggaggagattactgtgctgcgcagcgatgcagcgcgggtgacggcgtgcatgtccggtatgccggggcgcagcggccccgatgctgaccgactgccccgcgcggtggaacatatcgaagatgcgcagaaaaggctggcgcagcagctggatggctgcatggcggcccggatggaggtgatgcgcggcatcctgacggtgggggacagcgcagggcggcaggtgctgcagcggcgctacctcatgggccaaagctttgcagagatcgccgatgcgatgggcgtggtgcagcgccgggtctaccagctgcaccacgcggctgttgagcggatggagccggaaaagggggcgtgaaaaacatttcccggaatttcgcagagagttcacgggatttcattgtatttcacaaccaatagtggtaatatggtagcatcgaaactcgtgggagacaggtaagtcgcccgcgagttttttcatgcccgaagggaggaatgtcattgtgcgaaattaacgcggaccatgtgctgggcgagctggccgagatcgccttcgccgtcccgggggaggagggcggtccgccggtcaaggtggccgataagctgcgcgcactcgagatgctttacaagcatctggggctgggggacggcgcaagggaggagggggtcgtcatcgtggacgaatgagagagaggagcaggcggcagacggatgcgggtaagactgaaggaaaagataccgggcgttttctggccggtgcataccgcgatacgcagcggcggcataagcgaggttgtggccaagggcgggcgcgggtcgggcaagtccagctatttgtccatcgagcttgtgtggcagctgctgcgccgcccggactgccatgccgtggtgctgcgcaaggtgggcggcacgctgcgcaacagtgtgtacaaccagatcgtatgggccatcggggagctgggctgcgcggggtacttccgctgcacggtcagcccgatggaatgtacctacctgccgaccgggcagaaaattttgttcttcgggctggacgacccgggcaagctgaaaagcctgaagctgccgttcggctcggtgggggtctgctggtttgaggagcttgaccagtttgacggccccgaggaggtgcgcaatgtcgagcagacggtgctgcgcggcggcagctgggcgctgacgctgaaaagcttcaacccgccggctatggcgcgcagctgggtcaaccgctacgcgctggagcagcgccccggcaagctggtacaccactcgacctaccgcgacctgccccgcgggctgctgggggagcgcttctgggctgacgcagcgcatcttgagcggacgaacccggcggcataccggcatgagtacggcggcgaggtggtgggcagcggtgcggcggtgtttgacaatttgcagctgcgcacccttgcgcaggacgagctggaccgctgcgaccgggtctaccatggcgttgactggggctggtaccccgacccatgggcctacaatgcggtgtgctacgatgcggcgcggcgcacgctgatcatctatgacgagctgacccgccgccgcacccccaaccgcgagacggcccggctgctggcggagcgcggcctgaccgaccccgacagcggcccgcttacggcggacgccgccgagccgaagtcctgcgccgactaccgtgccgccgggctggcctgccgtgcggcgcaaaagggccccggcagcgtgcggcagagcatgaagtggctgcaggggctggcggccatcgtcatcgacccggcgcgctgcccggacacggcggccgagttcagcgagtatgagtatgagcgcgacccccgcaccggcgaggtgctgcccggctaccccgatgtgaacaaccaccacattgatgcggtgcgctacgcgctggaaggggtgtggcggaggagaggaaattgaggcagcgcggcttcccctttgggggaagctgtcagcggctccgaccgctgactgatgaggggcgaagctgccgggattgcccgtttatgggatgcgccggaaacgctgcccctcatccggcgctgcggcgccaccttcccccgcagggggaaggctttaagaaaggaggaacggactatacaaacttatctggaacaggcttttggaaaaagcgatgtgacatcggcaaaaatgcgggccgcgctgcgggagtggctggatttgtactacggcgcgccgcgccccggcgaggatgcggccccgcggctggcggcgctcatcgtgggcaagctctgccgcaccgtgtttgctgaatatgagacccggctgccgcccgctgcgccggaggccgtgcagcgcagtctggaagccctgaacgcggcggcgcgcaccgccatgcagtacgcgctggtcggcggggaatgtctgctcaagccggtgccggcggaaggcgggtttgactttacggccatccgccgcgactgctatgtgccgctggcgcgggatgcacacggccggctgctggcggtcggcacgatggagcgccacagctgtgacgggcggcagtatgccctgctggagcgccgcacggccggtgccgaggggctgaccatcgagacacggctgtttgagctgaacgggcagatgctggggcggtgcgtgccgctgagcaccctgcccgcctgtgcggcgctggtgccgcagctggtgctgcccggcgtgcagggtgtggggctggccgtgctgcggatgccgctgatgaactgcgtggacggcagcaccgatgccgtgagcatctacgccccggcggcggggctgctgcacgcgctggcccgctgcgaggagcagctgaacaccgagtttgcgaacggcgcctcgcgggtgtttgcatcggaggatctgctccggcctgatgcacaggggcggcgcgcgctgcgcgatgatttgtttgtcggcctgccggacgaccccgccaatgtgggggtgacggtctacagcccggccctgcgggagcagagctatctggcccgcaagcaggatcttttacgcggctgcgaaagcctgctggggctgcgccgcggaatcctgagcgagctggacggcaccggcgagccgcgcaccgcgaccgagatcaccgcaacagcggtggactatgacctgaccatccgcgacctgcaggccgcctgggcggacaccgtgcggcaggcgatggcactctgcggcacgctgggcgcgttgtatggcgtgccgcatggtgcggcggacgcggccccgtctatagactggggcgacggcgttttgtatgaccgcgcccgcgtctgggcagagcagcgcgagatggtggatgcagggctgctgcgccccgaactggcgctggcatggtattttgacctgccgtgcgagacggaggcggagctggccgagatacggcgccggtttatcggcgcggagagacagaagggaggtgaggcttgatggacgagcagaagcagatgaccccggcgccctatgcggcagggaccggcagtgtgccggtaacgcccgaccgcgcggcatttgaccgcatgggctaccgcgagcggctggcgctgaagcgggaaaacccggaggtgtatcaggagatgaagaagtaggaggcggggtaaggacacccctgcggcaaacaggaaaagaggcaaccacaaaaaagttgagggccgggcatacccggcccctacaaagcaatcggatttgaaaaggagaaaaatttatgtctgattttatcacgaagctgtccgatctgatcgacccggaggtcatgggcgatatggtctcggcccgcatccccaaaaagctgcgtgtggcgccgttcgccaaaattgatgatacgctcgccggtgtgcccggcgacaccatcacggtgcccgcctacacctacatcggcgatgcgtccgatgtggccgagggcggcgaggttgccattgagaagatgacgacctccacccgcaaggccaagatcaaaaaggcgatgaagggcatcggcctgaccgatgaggcggtgctgtccggttacggcaacccggtgggggaggccaacacccagctggcgctggccatcgccgccaagatcgacagcgactgcatggacgcgctgcagacggccagcctgatctatgacggcagcaaggccgccatcagctacaatgcgatcgtggacgcggtcgatctgtttgaggaggagatgggctgctccgacaaggtgctgttcatccaccccaagcaggtcacgcagctgcgcaaaaaccctgacttcctcagcgcggacaagtacacccctggtgtcggcctgaccggtgagatcggcatgattgcaggctgccgcctggtgcccagcaagaaggtgccgctggtggacggcgtctacgcctgcccgatcgtcaagctggaggctgaccccgaggtggacgatgagatccccgccctgaccatctaccgtaagcgcgaggtcaacatcgagactgagcgcaagcccaagacccgcaccaccgagatcaccgcagacgagttctatgtcgccgtgctgtcgaacgaggccaaggtcgtgctggcaaagtttaaggcgtaagggggcgggcgcatgccggattacaccttttataaggagcagttcgccggggaggatatccccgagagcgagttcccgcgctttttgaggcgcgcagagattgaactgaagcgtatgcgccgcatctaccccatgaccccggcgggggcgtataccgaggacgccgccgccgcgatggcgctctgcgcgatcgccgatgcgatgtatgaatttgcgcaggaggacgagcggcgcggtctggcgcgggtgagcatcggcagcgtgagcgagacctacaccgctccgccggagctttgcgcccgcacgctggatgaccgtgcgcggcattaccggcgcgaggccgggtactactacagcatagggcggtgggtgaatgatggataagctctgcggcgagaccgtgaccctctaccaccccgacgcggcgcatcgactggtggtgcgccgcgtggtacggggtgtgtactggcagcagggcaggcgcgctttgcccgatgcgggcggcacccggcagggcacggcgctgctggtggtcataccgcagacagctgcgcgctatggcgcagactacacactggccccgggtgaccggctctgccttggtgaggggcctgcgctgcagtgggaggactggccgggctttgtacccgctgcggtggaaaatgcggcggtggtgcagtatgtgctgccgatgcggctgcgcggcaggctgcaccatgtcgaggccggtgcatggtggaacggcagcggcacaggcatccacagcctgacgaggtgaaaaaacctttggcttctccctcgggggagaagctgccgcccgcaggcggctgatgaggggcgagccggccgctgctgcacgggaaagggacgccgggtggcaggctgcccctcatccggccctgcggggccaccttcccccaaagggggaaggcttagagataggaggactaccatgatgcaaaaactctacgcgtttctggcccgggcccctgccctgcaggggcttacggtgcaggttggtgatgtcggccccgcaccgggcacggccggcctgtgggccgggggcatcacggtgctggaccgacggcagaacctgctgggcggcgtaaggcagcgctgccgggcggagttcacgctgcggctctgcctgccggatacccgcgccgagaatgagacaaggctgctggcgctgcaggcatggatcgccgccgagagcgccgcgcaccgcacgccggtgctcggcagtgagccgcagcaggagtgcctgcgcgcggagcagggccggatggagcgcgccgaggcaggcggcacggcggtatacaccctgcgcctgcaggcagaatacacacagctttatacggaggaaatgcaatgaaaattgaacgcagatacatggcccactacctgaacgccgcctttggcagcggcgaggcaagctacacccgtctggggcaggatctggaggaatacgcccctgagctgacggccaatgtcgagaagaagtccaatatcctcggccagacctcggtggtcatcgacagctaccagaagcagggcgaggtcagcccctattatgccgaggagggcgacccgctgtttgaaaagctgcaggccatcattgacggagatcttgtgctggacgacctcaagaccgacatggtggaggtcaagctgtggggtaaggacacggcgggcgcttacccggccgtgcgcgaggaatgctacatcgagatcgtcagctacggcggcgatacgaccggctaccagatcccctttaatgtgcattacaccggcgtcaagacaaagggcagctttgacccgacggctaagaaatttaccgaagcgtaaaaacggcagggggcggcagggcaaggccgcccctcatccggcgctgcggcgccaccttcccccgcgggggaaggctttatggaaaggagtatccgatggaactgaacattgacaccggtgtggaggaattttccgtcaacgggcggggcgtgctgcggttcaacccggcggacccgaacctctaccaccgcttttttgcagcgggcaaaacactggagcgctacgatgctgagctgacagccgcgctggggcagcttggcggggacgagcagcagcgcgccgccgccggtcttgcgctgctgcaggactatgacgggcggatcaagcggctgctgggggagatcttcggcgcggagaatgactttgacgcgatcctgaacggtgtgaatctggccggggtcggggcaaacgggcggcgcgtggtgcagaacctgctcgaggcgctgacgccgatcctgcgcgagggggctgagcgccgcctgcacgccgccgccgatgcggccgaggctgccgcgcaggccgcccgcgcagcccggggcgcggaatgacgggctgctggtgcctgccgatgcaggctgagctggacggcgcggcgtatgcgatacgcaccgactaccgcgatattctggagctgctgcgctggctgggcggcacggctgacccgcagctggatcaaagcgggcgctggtatgtggcaatgcggctgttttacccagcatttgccgagatgccgcagacctgctggccgcaggccacagattttctggcgcggtttctggcggcgggccgccgtgagcaggcgcgccccggcccgccgctgatggactggcagcaggatgcaccgctcatcgctgcgggcatcagccgggcggccgggcaggatgtgcgcaccctgccgtacctgcactggtggagctttctggcgtggtttgatgccattggcgaggggagctttgccacggtggtggccatccgcgacaagctgcgccgcggcaagcggctggaaaactgggagctggacttttaccgcacccaccgcgcggcggtcgagctgcgcggcccggccagccccgcgcaggaggccgaaaagcaaaggctgcttgccctgctgcagtgaccagacaaaaaaggagggaaacctacgcaaacgattcaatttgacgagctttcgaccctcaagctcccggcggggagcctgcgggcggcgctcgatggcatcacgcaggcgctgggcagcatgggggatgcgggccagcaggcccgcagggtcgtggaggagctgcgcacggcactgcaggcaaccgcggtgcagagcgtgaaaaccacccgcagccttgcgaaatttgacgagatcaaccgcctgcccgcccctgcggcgcagaaggccgcagcgcccgaaaaggaaaagcgcacggcgggcaatgccgccggtacggcccgccgcaccgccagaggcagtgacggcagggactgggccgatggctggcgggccgtgctggacagcctgcgcggcgtctgggcggatttctgggcgtatctcagcggcttttttgcgccgtttgctgcagcatggcagaccgtgtggaacgccctgcgtgaggcagtgctgcgcgtctggcagccgctttgggccgaactggaaacggtgcttgcccctgcggcggcgctgctggacacagtctggcaggggctttgggccgggctgcagaacgcatgggcactctacgggcagcccattctggccgggctggccgagggctggcagaatgtggcgggccttgtggcggcgctctggtccggggtggtgcagccggtgctgctgcagctatttgcgctgctggatacgctctgggctgcgcacctgcagccgctctggaatgagctgactgcctgcctcggcgcggtgggtacgctgctgctgacggtctggaacacggtgctggccccgtttgtgcagtggcttgtgacggcgctggccccggcggcggttgaggtgttcacggtgctgggtacagccgtgaccggtgcggccggcatcgtggcggacggcatcacgatcctgctggccgtgctgcgcgggctggcagactttttgaccgctgtgctgcggggcgcatgggacgctgcatggaacgcgatggcggctaccgtcacgaccgtgtgggggcgcatcgtttcaatcgtgcagacggcggtcagcacggttctggcggtcgtgcgcggcatggtcagcgccatcgcggcggccatcaatgggctgctgtcggccatcgggcaggccaaagcggcggcaggcggcgtgctgggcggtgccgggcagctgctgagcgcccgggccgccctgcccgggctgggctatgccgccgccgtgccggtgccggcgctggcgcagggggcggtcataccgccgaaccgtcagtttttggctatgctgggcgaccagcgcagcggtacgaacatcgaggcaccgctggacacgatccggcaggcgctggcggagacgctggccgcatggcagggcggcgcacagggcggcgaccagcccatcaacatctatattggcgaggagctgcttgacagcgtcatcgccaacagtcagaatcgccgcgcactgcgcagcggcgggaggtgaagcgtggaaatcttaaccattgacggcacggcgctgcccgcgcccggcgcgtacaaggtgcagctttccgatctggacagcagcggcaccggccgcacggaggacggcgttctggtgcgcgagcgggtgcgcggcggtgtggccaagatcagcgtcagctgggaggccctgaccacggcgcagtgcgccgccgtattgaatgcgaccgccccggacagtatgcaggtgcagtatttctttggcgagatgcgcacggcccggatgtacgccggggaccgcacggctgacctgaaggccgcccgcgatggcagggcggtctgggcggcctcggtccatctgattgaattttgaggggagggaatccggatgtatccggtatcggaagcctacaaggccgccatacgggcacgcacccgcaccgaccgggtgacaggcacactgaccctgacggacggcaccgtgctgccgctgacggcggccgagcttatgagcgggtcgctgacccttgacaaccagtgcgtcacgggggaggagctgaccttcggctgcgcttaccttgggcaggcggcgctcaacctgcgcacggcgctgagccgccatgccttttacggcgcaaggctctgccttgcctacgggctgcagctgccggacggccagtgggaggaggtcccgcttggcagctataccgtggcggaggccgagcgcagggcactgtatgtcagcatcaaggcgtatgacaatctgctggcgctgcagcgccgctatgacggcaccgtgctgcagggcacggcatatgaactgctgggccagatcgccgatgcctgcggcctgacgctgggccagacggccggggaggtggcagcgctcaacgagaacgctgcccttgtctgccagatcggcccggcggacggcctgaaaagctggcgggattgtgcatcggcggtggcgcagttggtgggcggctttgcggcggcagaccgggccgggcggctcgtcatacgcccctttgccgtagcggcgtgcgcggcactcggccccggggaccgcagcgaggccggtatctcagacctgcgctgccactatgcggcgctgagcatcgagacagccaacggccggtttgcggcaggaaacgagcaggacagcggcctgaccatgacgatcaccgagatgccgctggcggagaagggcctgcccgagatgcgcgcgcagatcgccgagcatctgtttgcggtgctgcaaaagcttgactacaccccggccactgtgacaatgcccggcgacccggcgtttgagccgggggaccgcattgccctgccccgcgcggacggcagcgcccccgagatgctggtcacgcattttgtctggcggtaccgcgggcggcagacccttaaaagcgtggggcgcaacccctatctggccagcgccggggacggcgcgaccgagcgcacgctgcgccgcctgcagaacagcgccgagagcaagcggctgacctactacagctttacaaacgcggcggcactgaccgtgcgcacggcggaggtgccggcggtcacgatctcctttgcggcgatcgaggatacgagcgcgatcttccttgcgcagctgacagcggacgctgagccggacgatgcggcgctgaccctgaccgtgcattactacctgaacgatcagcagatcgaaaattttgcgccgcagcagcggatggaggcaggcccccacacgctggcacttttttacccgtttgcaaatgtcgaggcaaacaccgtcaagcggctgtcggtgcggctggtctgcagcggcggtacggtgcgagtggcgcagtacggcatcaaggccaccgtgaccgggcagggcatggcgggggagacgccgtggaacggcctgctggaatgtgaggagctggtcgcgccgatccgcctgacgccgcgcacgctggcgctgggccccctgcaggacggcggcgccgggataacgaaggaggaaccgaaatgagactgcacggccatacacggctggaactgaccgacatacacaccggtgcggtggaggtggtcgagaaggacaacatcatcaccaacgcggtgggggagatcttcaacggctacggcggcagcctgaacaaggcaatgctgctctggcgcggccagcaggatgaccccaacgcgccgaaggaccttgtcacgatgttctacggcgggctgctcctgtatgacagccccctcggcgcagacccggcaacgcggtttgccccggcggcggcaggcatcacgggcacggccatcgccggtcttgtcaatgcaacgaccaacacgacccgcggcagcgccaatctgaccgagacaaagctggacccggcgggcggcacgatgacctatgtctacgagtttgccaccaatcagggcaacggcgtcatacagtccgtctgcctgacccagccgcagggcgggtactattccgagatgatcgatgcgcccaatgcttcccctgtgatggccggccggctgcgcttcggcggggcgctgggcggcgaccagctgctgaccggactgctggccaaggattgctaccccacgggcgagcgcggggtgctgctctatgcggacccggcggctgatgaagcgctggcgggcagggtggacaccgcccgcggtgtgctggagctgcgccgccactgccttgggctaaggacgctggatcttttccggcgcgatacgcagggcggctgggacagccttatctcaatagatacagtggatatttccggctttttgcagtcggtatccggcaatgcgggccggtactgccgcctttgctttgacgccgaggcggacaagctctaccttatcgcagcgccggagggcagcaccatcgcggcgggcggcagcatccgggtgcgggagtatgaccgcaaaacgctggcggcgagagactacaccgtccccaacaacaccggcggtgcgctgcgcgccgctgtaagcgaggcaaagtccacaccgctgaacggcacggtctacggcggcagcctgtacatgacggcaccctcgacctatcagatctaccgctttccgctggcggacccgaccgatgtgcaggccgtcacgatgcacggcgataacctgcaatacctgagcgatgcgcatgacgggcggctctactgctattaccgcacccgcggcgtggtgctgaacaccgaaaaaaacgagctgttctcctgcgaggcagcgggctacgatacctcgaccaccggctttgccgccatggtgccggtgctgggcgagccggtaacgccgctgcgccgctactacagcgacagccgtatgcgcaccgagcgggtgctgcgggcaaactatctggcgaccatcaacgacctgccgaaggcggtggaaaagaccgccgacaagacgatgaaggtcatctacacactgcgcaggggggcgtgacggcatgaggcagagcggtatctttgcagggcgcacccggatcgcctacccctacgcctgctttgggtttacacggggcggcggccgtgtgtggcacggcggtctggatctggtggggctggacgatacgaccgtgcggatgccctattataaaggaaagcagatcaccgggcgggtgacgcgggcgcgcatcgtgaccgaccgccaaaacaggacctgggagtggggctggtatgtctgtgtgcagcttgaccgcgcgcagaccccggatgcggtgaattttctctactttgcccactgcgcacggctgctggtcaaggccgggcagcgggtggccagcggagacgcgctgggcgttatgggcaataccggcaatgcggcgctggccgacccgccctacccgcactgccattttgaggtgcgcgccgcagcaaacggaacagggctggacccgaccgcctacgccgggtgcggcaacgcgccgggcgtgtacggcggcgcggaaaagcgccagcttatcacagtcgggccggtgacgcagggggacgccgatgcggtgcttgcgctctgcctgcagcgcggattggtgcaggcgggcctgtacaagagcagatgggaggatacataatggaaaagagaaacctgctgcagtgcagcaaggcagcggtggcggcagcctgcggggcctttacggcggtgttcggctggctgggctggctggtgctggcgtggggtgcctgtatggcgctggactgggccagcggcagcgcggcggcggcctgccgggggcagtggtcgagcgcggcggcctgcgccggtatctggcacaaggccggtatggtcgttgtggtgctggtaagcgccctgaccgatggcgtgctgggcatggcggttgccaacctgccggggctggggctgcagccgaacggcgtggtgctgcccgtggtgctggtatggtatatttttacggagctgggcagcattgccgagaacgccgccgccatgggcgcgccggtgcccgcatggctggtaaagcttttggccgaggggaaggagggcgcagacaagtgatgcaggggatggcgccccccaataaagcaaacaaaaacggggtatctgccgtacaatggcggataccccgtttttgatttgggcaacaccgcacaattcccgccttacggcttaagcaccgctccggcggcttcggcacggcatctgcgttgccaaaatgctcgataatacacaaagtattatctgcgcttttggcttagcaactgccgcacctcgctcgccgtatcggcacttagaattatgcggtattgcccttgcttataaataattttgcagatcgctcttgtcggtggcgcagcgctcggcggcctcgcgggtgatgcggcccatgctgacaaggcgcgccagatcggcgttcaggctgtgcatgcccagcgcggcaccggactgcaggatgcttgggatctggtagcacttgccctcacggatgaggtttgccacggcatcggtgccgaccagaatctcggtcgcggcgcagcggcccttgcccccggccagcggcagaagctgctgggtgatgacgccgcgcagcacggcggccagctggccgcggatctggttctgcgcaccggcggggcagacatcaatgatgcggtcgatggtctgggctgcgccgatcgtgtgcagcgtgctgaggaccagatggccggtctcggcggcggtgacggcggcggagatcgtctcataatcgcgcatctcgccgaccagaatgacatcagggtcctcgcgcagggcgctgcgcagcgccgaggcaaagctgcgcgcatccgcgccgacctcgcgctggtggatgagcgcctgcctgccctgatagacatactcgatggggtcctcgatcgtgatgatgtggtcgctgcgggtctcgttgatatggtcgatcatcgcggccagcgtggtggacttgccgctgccggtggggccggtgacaaggatcagaccgcgcggctcgtccgccagctttgtcagcacgggcggcatcgacagctctgccagcgtggggatggcatcgttgagcaggcgcagcgtggccgcagcccgcccctgctggaaaaagacattcacgcggctgcgggtgccgtccggcgcgaccagcgcaaaatcggcatcgatccgctcggtaaggatggcctcgcggtgcgcctcgtccatcagcccaaggatcagggagcgggtctcgtcagcgctcatctgcacggggggctgcatcagccgtccgtccacccggaacatcaggggcagcccctcggagagatggatgtcgctggccttcatctgccgcgccagcgcggtgagttcatggatttgcatgggacatacctcacttttaagaaagagaagccggagagaacgctgccgtcagcacccgttccccttattcctcatagaaggtgatcttcagcagctcttccggggtggtttcgccctcgcgcacaagctgcagggcggcctcgcgcaggctggtcatgccctgattgcggcgggcggcatcggtcagctcctcctgcgtggccccggcggagatcagctcgcgcagctcacggttgatgatgaccagctcgtggatggccacgcggccgcggtaaccggtgccgttgcactgggtgcagccgctgccgcgccgcacaaaggggatgtcggggccgagataggtgcgctcctcctcggtgacgggcatctgccgggcgcagtgggggcagacccggcgcatcaggcgctgggcgaccagaccggccaccgagttggcgaccatgtaccgctccacgcccatgtcctcaagacggacgatggaggagagcgcgtcattcgtgtgcagggtcgaaaagaccatgtggcccgtgatggccgcgcggaccgagatggacgccgtctcggcatcgcgggtctcgccgaccatgatgacatcggggtcctgacgcagcagggcgcgcaggccgctctcaaaggtcaggcccgcaatgttgttgacctgcgcctggttgatgcgggccagattgcgctcgacagggtcctcgatcgtcgagacattgacctgccgctcggcgatggtctgcaggaccatgtagagcgttgtcgtcttaccggagcctgtcggcccggtcaggtagacgatgccgttggggcggttgagcagcggcaaaaagcgccggtaggtctcatcgttcatgccgaagtggttggcatttttaatgtaggtgttgctggacaggatacgcagcacggccttttcgccaaagacggtcggcaggatcgagacgcggacattgacatcggggccggtctcaagccgggcacggaaatgcccgtcctgcgggatgcggtgctcggcaatgtcaaggttggacatgatcttgatgcgggcgatgagcggctggtgcaaagcgcgctgcagcgtcacatagtcgatgatgacgccgtcaatgcgcatacggacctttgtctcgccctcaaacggctcgatgtggatatccgaggcggtggtcgtcacggcgcgctgcacaaggctgttcagcaggcggatgatcggcgcgtccagatcgccgccctcggcggtcatgtcgatggcgaaatcctcggtctgcgcggcggccatatcgctgctgttggcgttgcgggctgccttgcgggcgctgacctcggcgtaatagtagcggacggcgcggcgcagcggctccagctcggccagcacgatctccggctccatagcggtcagctggcggatgtcctcgatggcgtagtagttcagcgggtcgttggcggcgatggtcagcgtatggccgctctgcgcgatgggcagcatgtcatatttctgcgccagctcctgcggaaccttctcgacagccgtcacatcaacggtagtgtgctcaatgtcgatcatgcggatctgcaggcgcttggcaagggcctgcaggacctgccgctcattgacatagcccagctcctgcagtgcctgaccgacacgcaggtcgcggtgctccttctggtaggcaagggcggcgttgagctgctcggccgtgatgtagccgaactcgatcagaacatcgccaagacggatgtttttcacggctgtacgcctcctttgtcacagagtacgacgcgcagcgtcacatcgtagatgctgccgctggacgaggtgccgtccgctgcggcaaagctgcgggtggtgatggaaaagttctgcagctggatggacggatagttgtccgccagatcatcgagcaggctcagaaaattgcttgcctcgcccgagcagctgaaggtcacatcggaggtctggaggtagccgggctggtcatagtagggtgcaaggtcagcggcaaggaactgctgcagcagggcattgcctgcggcagtggtgtccacctgatctgccgtgacggcggccgcggcgctgccggagggggcggggctctgcccggcctgtgtgccggcaatgtagccggtcatgctctgggtcagcggctggccgatgctcagggagacgggctgcatgctgtggttcagctcaaggccggtcaccagcgtatccagctcatcgctggtcaggatgctgtagtaccgcgcgttggcagtctgcagctccccccaggcggtgttcttgtcggcggcgttcacgcccgcctgcaggatcgtctcctgcatggtgatctgggcgtcctgcgcctcggtcagatcagcgcgggcctgctgcaggctgccgatgccgggaatcagcaaaaaccgcacatacagcacgataaaggccagcatcagcacgacatacaaaaggatcttgtcgcgcttggtcatcggtgcaatatccataaccgcacccccttactgcggcgctgccagaacgcagcgcaggtcgatggaatagccgtcattgtcggcgttgtagccggtatagctcacggtcgaaaaaacgccgcagctctgcagcgagcggatgtaggtcggaatgtcgatgacctgactggagttggcgttgaactgcagctcgcccgtggcggcgttgtagctggtgaactggatcgtgatggcagcgtcgcccgccgcttcgacccggtgcagcaggctgcttgtcacagcagggtagccgtccagcaggtcggtcatgccgtcggcgtactgcgtcagagattggaactgcacggccgcctcggcatcctgactcgaggcaaggaacgccgcgctgttgtcattgcaccagtttacgatgtcctgccgctggctggtcagggaggcggtgtacagcgtcatggcaccccagcccagcagggcggcggccaccacggcaacgccgggggcagcggtccggatgctgcggctgcgctgctcgctcttggcggcgcctgcggccttttgccagcgcagataaaagttgttctgtttcatagccataatttgtatgttcccctggcttgtatagttggtgcgcgggtcagcgcgcaatcagattgcctgcggcgtagagcgcctgcgcaagggctgtgccctcaggcagcttgacggtgggcgaatccgggaattgcgccacccgcagcgagagcgcctcgcagcccgggcggcagacggcaaggtcatcggcgtttgcaccggcaaagtaggcggtcgtgatcgggttctcgctcttgccggcaatgtggaactgcaggatgcccgacagcttttgtgcaatctcggcgccggattctgccgagccgcgcggattgaacaggcggctgcgggtcgagtaggtgtactgccctttcacaaacaggcaggccgagacggtgtcatcatcaaaatgcagcagcacaaaggtttcgctctgcagggcagggatcgtgcgcaccgccttgatgggggcggccagacccagatcaatgctgtacagcttgaagccggcagccttggccagcgccgcatacccggcaatgacgctctgctccacgcgggtggccagcaccgtgtcagcgcgggttttggcatcgcgggccagcagcatatagtcgtcaagcggggccgttgtctcggcgccgccggacgaaagctcatgcgccagcacggtcagccgctttttctcgctcatggcgggcagggagatgacgcggtgtacgaactgactgccgcctacgatcagcgccacccggcccgtgggcagcttatggcgggcaaaaaaggccttgagcgcctcggcgaggtcggcctcgttggtaatgacgccgttgatcaggcagccctcgggcagctgggctgtggcggcagcggtgatccgtgcgcccttggcggtggggctgcccaacgcggcgtacaccgtgcggctgcacagatacaaagaggtaagtgatgccatgaggaaccctccggaatatagtttaaatggcaccggacgatgcgccgatggtgccgtaggactggtaaatcggcacgataacagccgccacaacgccgccgaccaccagacccatgatgacgatcatcacaggctccagcagggtgacaaggcgcttggtggccatctcggcctcgtagtcgagcgtctcgctgatcgtggccagcaggctgtccagcttgccggtctcctcaccgacggcgatggaggaggccagcttgacctcaaagccgtcgatcgcggcgatggactgcgacaggctgtggccggcgcggatgctgtccagcgccgtgccgaactgactttcgatccagcggttgccgatcgagtcgcgcgccgcgcccagcgttgtgatgatgggcacaccgctgccgtacaggttggacagggtgctggcaaagcgggcggtgcagatcttgcggttcagcacgcccacgaccggcgcatgcaggataaagcggtcccactggcggcggatgcggggctgggccaaaagcagcctgaagccgaaaaagagcagcgccagcgccacaagcagcagcggccagttggcgcccacaaagtcgctggcatcaaacagaagctgcgtcaggaagggcagcttttccatctggtcaaacatcggcttgaactggggcagcacaaaggtcatcagaattgcgatgaccgccacgatcagcacgcagaggatgagcgggtacatcatgctgttgccgacctgctggttcatcttatgctcacgctcatagtaggtggccatccgggtgcaggcgtggtcgatgctgccggtgccctcggcgctgcggatcatcgccagcagcaggttcgggaacgccggtgcgcaggactccatcgcatcggacagcgggatacccttgcgcagctcacccagcacggcctcgtacagggcccgctgctgcgggtcgatgctgcgctcatccgccatgatgcggaaggcgcgcaccagcggcacaccggcggtcagcagggtgcccagattgcggcagaaatccgccagcacggcggtctttaacgggcggaaggtgctgcggacgcgcttggtctgcagcgcctcgctcatgtacaggccgtcatcgcgcagcttggtgtagagcgcctcctcgctgggggcgtcagccatgccgcggacagtcttaccttcggcgttggtcgcagtataacgaaattgtggcataggggagaaacctccgaacggatagtgagatcaggcgggtgctgcaccattacaaaaacgcgcagtaccattgcaggatcggctcgccgaaaagcatggcgattacgatgcccgcacataaaaacgggccgaaggcgaagtgatccttcttgtcggcttttttggcggccagcagccagatgccgtaaaggccgccgcccagaatgcccaaaaacatcgccagcagcgtgttctgccagccgaggaacagcccggcggccgccatcagcttgatgtcgccgccgccgaacgcgccgtcaatggcaaggcagagcaaaagcatcggcacgctgacgcacaacgccccgatcaggtggggcagccacccggcgggggagagcagcgtccccaaaacgccgcagacggccaacgccagattgagccggtcggggataagctgcgtctcggcgtcaatgagcgcaacgctcagcaaaaggccgcagaccgccagcgcggtgagggccgcccagctcatgccgaacagcccctgcctcaggctgagcgcggtgccgaagcggcgggtgcagcccagcgccagcacgccgcccagcacctcaaccagaaaataccgcaccgggatgcgggtaccgcagtggcggcaccgcccgcgcagaagcagccagctgaaaaccggcacaaggtcgggcgcgcccagcgtgtggccgcactgcgggcagtggctgcgcccctgcagggggtccatgccccggggcagccgccaggccacgacattcataaagctgaacagcgctgcgcccagcaaaaaacggatcagatccaaaaggcattcaagcagcagcatggctcgcctccgtcaggtaatgcaggcggtcctccgcgcgaaagacacggtagccctcggcagcgtcatagatggcgaagatgctgttttcctgatagagcagccgctgcacggtgtagccgttgtccgccacctgcagaaggctcacgctgccgggcagtgcgcccagtgtctcgatctcctcggccacgccgtcggcaaagccgtctgcggtggtctggtcggcaaaggtacgcccggtggaatagcactgtgcggacacggccccggcggccagccgcgccgccttgacctgggccagcgcctcccgcgcgcgggcctgatagcgcagctcggccgcgccggtcacaacggtatagatcacagcgagcaatgccagcagcagggccagcttttcagcaaaggaggtcctggcccatttttccccggtgttgcgcagccaggcacccagtcgtgctgccagcatggtttcacttcctctacttctatatatgatacactaaccagtataccccgcaaagactgtatttgcaaggaatttcacaaaaaaatcccatgtttttgttggaatgtaacacaaaatctgtcaaaatagtatgtgccgcccgtatagaacactatatttggtgtaaatttgtcgaaatctcaccacacttgttgcgaaaagatcacaaaccgagtataatactatcatatatagtcttattatgccttactgtacaaatttgcagggcgctgccgcaaattccaacggccactacggcgtctgccgggcgggaatatgcggcaatgccgtgatataaacgggagcatctatggtgcattgcaacaagaaaacgcgcagaagcagcggcttcacgatggtggagcttatggtcgtgctggcgatcatggcaattttggcggcccttgtggggggcggcctgattgcctatatccgtctggcccggtttgagaagaacgaggcgaacgcccgcacccttttccagaccgcgcagatcgccctgacccgcaaggacacagcgggtgagctggacgatttccgccagaaggtgctgctgaacggtcaggcaggcgcgcattttgaccccgccgcgcttacgctgaccggcgaggaaaacgaagaaacacgcaagcagaaggccgatgagctgaacaagaatatctatgccctgtattatgataaagtaacagataccgacagcgacaatgcgctgctgcgcgagctgctgggcgattacatctacgatgattcgctgctgaatgcggccatctgcgttgagatagacgccgccagcgggcaggtgtactcggtgttttatgacacaaacgccgacaagctgcgttttacagaaacaaacggcgcaacgaatatttatgaccgaagctatgaccaccgccgccatgacagccttgtgggctactactcagccgaggaccgcgtaaatgtggtcgagctgcagcagaccaagctgaaggtcaagaacccgcgcctctccaacaccgaaacactgaccctgagctggggcggcgatgtgacccgcgacacgcaggtccagtatgtggcaacagcctacagcgaggacggcgcgaaaaagctgtttgagatcgaggtggagctgccggcagtcaagaccaatgagccggtgccgctgaaaacaagaatctacagctatgatgcggatggcaaggaaacatcggttgaaaagaccctctactaccccctgagctacaacaagggcaactttgtcctgacgctggacgcaatggccagcgctgatttgctgcgctcctgcgagaatgacagcggcgagggggcaaacaaaattagtgtggccgacaccagcctgtacagcatcacccgcctgatgtcgggcgggccgcaggatttctatgtcacgctgcaggccaaggcgcgggacgactattccggcagctatacccccagcacacctgctgacaccaatgtggaaaacagcctttttgcaaaaaaggcaacaaccacagagggccagcttacctatttccgccatctgtacaacctgcgctgggcggacagttgggcgtccggtcagactgccgccgcctacaccctcgccgcgcagagccttggcgccaccggcctgaactggaccggcggcagcgttacggtctactgcccggcgcagggcaaaaacttcccgccagaggcaaaggtcccctcggcagaggaggccgtggcgtggccgaccattctgaccctgcccaaaaatgtgacgctggacggcggaaatatcactatcatgaacctgcagctgcgcgggggctctgtctcccggaccggcagacagggtaaggaagaactgcgtgaccgctacatcggccttgtgggtgagaataacggcataatcaaaaacatgaccctgcgcgatgccgatgtgcaggtcaatgttaaggtcgttgcccgcgcagcaggcgccctgccgctgaccgggaccacagccctgcagccgctggaaacaactgacagcgcataccgcgacatccgcgcggtcggtgctttgtgcggcgtcaacaccggcacgctggaaagctgcaccctgacccacggcaaaaacaatgcggtttccgcgcaggtgctggcaatgctgccctttgacgacaacgccaccgcgacagcccgcacaaacgcaacagaaaatggcacagcctattatgaaaacgagccgcgcggcattggcggcctcgtgggcgttgccatacccaaaagtggccaaacaatttccgcactgacggtggacgccaatgtgacggtagccggtttgctgcaggacaacgcccccaaagctgcggacaaaaaccttacagaacaggcgcgctacgccgcagccgctgtcaacggggaaggctcaatctggcgcagcatcggcgtgggcggtgtggtcggcacgatggatgccgccaacctgacgcttgatctcaataaagaaatcatgaccaacaaggccgccgtcaccggcagcgcctttacgggcggcgttgtgggcaacctttataatagcaatagcggcagtgcgcctgtcaccctgaccggccttcggaacgagggcacggtcagcgcgggtgccaactaccttggcagtgccgaggggcaaaacagccgcgtgctgggccagttcttcggcggcattgcgggctactgcacaaatgtcacgctgagcggcagcgccagcaccacccgccgcgatatgaccgaaacacagctgaaaaccgccgtaaagggcgggtatgctgctgatggcacactcaccgatgacagcccgctcaagggtgattttgtcggcggtctggtgggctttgccagcggttgcacgctggataattgcactacgcaaaagggctatgtgctgggccgctgctttgtcggcggcatggcgggcggcttcagcggcagccggcttgaaacaaccggcggcagcaacagcagcaccgtgctgggcaaccgctatgtgggcggtgtcgtgtcggtcaacggcagcaaaagcacggtcagcggcgttaccaacagcggccttgtggcgggccttggcaaaaatgcggcctatgtgggcggcatcgcgggcctgaacgatgccgattggggcagcaccgcagcaaatacaactgctaccatcaaaaactgcgtcagcagcatggcctcggatgcagccaccaacagcagccgcagcgccctgctgcaggcgctgagcacctacgaagctgcaaacaatgagaaagcaaccacccgcgcggactatgtgggcggtctggtcggctgcaacggcaaaaatgccgtgcttacatgggacaaggatgcaagcacggtgcagatcggcgcggtcatcagcggcagcgattttgtcggcggtctggtcggctgcaacgatgcaacggcgaaaatcacaaataccagcacctcgctgctgactgtcagcggcgaggtcgcgggcagcaatgcggtcgccggtatgatcggcctgaaccttgccccggccctgcctgcggccgatataaaggtgacggaaatcagcggcacgctctgcgtgggcggtgtcatcggcgctaacatgccggtggccgcagccggtgaagatgcgtttaccatcaaagaaaccgccatatccggcggcaaggtcagcacatttacaaccaccgcaaaggcgggccgcatcaaggccgacggtctggcgggcggcatcatcggctataactgcctgctggcatcggccccgatcccgaccgatttgacaacgattctgcccaccgtgacgcaggataccggccttgtgacggtcaatacattgccgcgcagtgacaaagagatgaccctcaacggcgcggccaaccagtttaatcttgaggtcaacgcctatgtgggcggtattgtcggctataacgatgcagcaacccgcctgaccatccgcaacgcaacaaacggcagccaaaacaacgcggcatcggtcggcagcctgaaaatgcggggcgagaccggcaccctcggcagcggtgtcagcctgaaggggtataaagacagctttaactataacgactatgctggcggtaaagatgcccgcggctctatggcgggcggcatcatcggctgtgtgacccaaaacacaaagctggagggctgcaccaactacggcattgtctcccacaagagtgcggcgggcggcatcgcaggctggaatgacggcagcatcaacaactgctctacctacgctacattgggcacccagcaggacggctatgcctaccttggcggcatcgttggcatcaacagcggggcggtcacaaactcggccccggcagcaagcatcaccgtgcgcggccggtacatcatcggcggcgtggcgggcctgaacctgacaggcgcgagcataacttataacacttccaataaaatccccgttacggtgcaggcaaatgagtgcgcgggcggcgttgcaggcgtaaactgcggcagcatcgcactgggcagcacaaccctgcaggtcaacattacggcagaaagctatgcaggcggcattgcgggcagcaacaacacgcgcaacgccacaacagccagcattgggggcggcgaggtgacaggcaccgtcacggccactaagagctgcgcaggcggcgcagccggtgcaaactatgccaatattagcgatgttacgctgattggtggggcgtgtgtgcgcgccaatgatcagtttgcaggcggtattgcgggctgcaatagagctggtaacgggcagaccggcacaattacacgctgcaccaacactgcggggcagaccgggaacaactacacggtatatgccaccaacggcaatgcgggcggtattgcaggcagcaatgacagcggcgcccaaattgtagaaagcaatgtaagcggcgtcaaaatcggcgttgccaagtgcgatgcggcgggcattgcggccaataacttcggcaccattcagggcggcactgtcggcagctgtacgattacctttgcaggggaaagcatcggcgcggtcacggccatcaacaataagggcgcaacaatcagcggcgttacgcttgataatgccgcagccattgtttaccaaggcccggccaccaatgtgggcggcattgcgggcaaaaacgccgatacgattggtaattgcaatgtcaacagccctgcgctgaatctcggcggccttacggcccgggcagacagcatcagccttggcggtgcggcgggcgtcaatatgcagggcgcaaccatcagcgaaacaaatgttacactgaacattacagatactctgaataaatacaagaatctgggcggcgtagccggcgaaaatgccgacggcggcactctgttaaagtgtgcctatcagggcgcgctgggcaaggctgataacggtaatatcaccacgggcgcagccaatgtgcaggacaccgtaggcggcatcgttggcctgaacaatggtgaggtcaatgggtgcagtgtgcccaaaatcacgctgcaggtgatgggtgcctcgggcctgagcgacagccagacctatgcggaaaagctgaaaagcgccagcagcgtgggcggcattgcgggccgtaacaacaacgaaattacatcctgctatgttgccacagaaaagaacggcggcagcatcatcaccgcgcgctacggctttgtgggcggcgtggcaggcgcaaacaacggcagcattaccggcagcggtgcaacagaagtaacagctctggtcgatgaggttaaggggtggtttaaggatggcagcaccaatgagatgatcagcaccctgaaaggcgatacttataatagccttaaaggcgttgacacggtgtccacgaataactacaacaatgtctacaccgccaccggtcttgccaaaaatgacctgctggtcggtctgcgcggtacaactgctgcaaacggcaaatccagcggctatctgggcggcgtggcaggcttcaacactgtcaacggcacgatcacacgcgcggcaaccggcaagtggtttgtctacggtgacaacacgaccgatgaatccaaaatcggcggtatgatcggcatgaacgaggcaaccggcgaggtcaagctgctggtcaactgcgccgccgtgcgccgctttacccgcacaaatagcacaaatgacgatgacacgacccatagaggcaacgcaaatattgcctatgtgggcggtgtgattggcgtgcagcagaacacggccaatgacaagtgggtcatcagcgagtgtgtgaaccttggcactgtgtttgacagcggctccaactatatcggcggcatcattgcctcttggctgaaaaacggcggcacgattgaaaaatccttcaacttcggcagcctcagcaccaataccaactgtgacggcagttcgggtacggtcggcggcattgtgggcttttttgaccagcctacccccggcggcacggcaaatatcctctcctgccagaaccacggcgatattctgtcccgtggtaattgggcgggagacaataacaataagcatggcgccaacgatgttgccggtatccttggcaaggtggtcatggcggacggtacaaatgactatctgcgcattaacattgtcgattgcgtgaacggcgatgttaagatgcagtgcgagtcgctggcagccggcatcatgggctggctgggaccatatggcgacggtgggacaaaaattccaaataaggtcgaggtttacattgaccgctgccgtaactatgctacggatattacaatctcacgtaaatacaactatacccccttgttagcgggtatctgcggcaaccgtggcaatggcagtaaaacgagtgcatccaccacagtgacgaattgttttgctctgtataaaaatactgttagttccaataatgcacccattgcgatgaaccgtggaaatgaaaacattgtggcctacggcaactactttatggacgaaaacagctttgaaaaagcgaagatagcggcattgctgaagctgacagaaaaagtaccaagcaacgagaaagtcaacggaaataagacatacggtgagccttgtagcggccactataactacggtacacggctgtatgcgggtattgataactccataaagagcggagacagtttctttgcggcaggtatgatgacaaacgcgcgggatttgaacacggtttctactagaaaatgttatataatacctgcggccgatgaaaaactggctacgattttctatgatagccacgattgggggactaacgatatcaaccaaaaggatcttgccaccatcctgctgtggtacggcgatacggacaacagcaaagccccgagtatgcaggacatcacggacgacttgatccagaactactatacgcaaattctggacaagcgcggccccggtacggtctccgatttgacagttacgcataataacgatagcagtgctgtctatggccgctatgaggtgacatggtcggccgcggccacagatggcattttcccagataaccagatacagaatgtaagccattatctggtaacgctgtataaggttgacggcgatagcaagacggctttgccggactaccaagacataaaggtctacggcacgcgctatctgtttgacgcggatgatgcgctggcgaaagctattggcaacagccaattctgtgtcggtgtaaaggccgtgaacggaaccaccacaggtgcagaggaaatgtctgccgcgcaggactttgtgcgccctctgcctaccccgaagctggagatccgcctgaaaaaacaggaaagcagtggacaggcctacggccagtatcttgtgctgacaaacgcaagcgattaccaaaacgcgggcgaatggcaggtaaccgcctacctgatgaacaaacccaatacaaagattacgctgaatcaaagagaaaccgaggcatggataacagacggtcttggctcggccacccgcctgcgcgccacggcaaccccgggtgcaggtgcaacaggtgcatggatggagtctgcccgctatgatgaggagatcggtattcccaagacatactataaggacaatgatcaaaatagaaacagcggccttgtccacggtacggcgtctataagagagccggtcataaccggcagcacggcggatgacctgtcgattaccgtgaccctgcaatttaccgcagatacgatccccaacaccgtgccgaactaccgcgttatgctgctgggtcaatataccggtgaagaaacaatcagcaatgcggcagaggatacaacggcaaccaacacgcagccgctgaacggccagtatgtgacgcttgctgcggtggaaaagccggtctacagcagcggcacggaatttgtgctgagcaacctgcccgccgaggtctttgacggcagctacaccgacctgaaggtcgtctctgtgcctgtcgatgccggttatccgcaggtcgtgacccgctgggaaatcaccgcagacgaggccctgaatgctattggaagtaacaataaccccgtcagctggaacaacggcatcgagatcgtgcgcggggcggacggcaaattcagctattaccacctgaccccgctgcagttctttgcggacaatgactcgtggtacagcatggctaaaaagcagattcgcagggatgacctcaacctcacgcttctgaaagcccccacggtaagcgatactgccacgggtgaagtgaacaagaacaacaaactgaactatacctttacatggacgcaggacgatgacaacggcggtgttgatacaagcaagcatgactacgatgtaaccctgtacggcctgctgaccgaaaaggatggcgaaaccaccacaatcgcgggcaaggaaaaaatcgagctgaaggacggcgtgtcgctggcgggtaaaaccgaatttgacgccgaaaccggcacctataccctgaccctctgcgtggatgatgaccttgcaagcggcagctggcgctatgatacggtgcggctgcatgtcacccgcaagccgggcgagggggacacccatgcaatcggtctggcgggcgaggcggattgtgctgttaagcagcgcttgtctgcggtaggtcaggtcaacagcatcatgcgcaccaacgacaacagcgccaatgcactgaactacgacatcacatggcccgcaagcgcggacgccaaaggcgaaaacacggtgacatataccctgtacgcggaaaagcaagacggcgaaaagtggacgccgcttgccaactggcagggcatcacgaaaaacagctgcaccgttgaccttgagaagtatcagggcgtgaccctgcggttctatgtcgtagcaaatgcggttgacaaatcgaagtattgcagcccgaacggcgagtacagcaaccccctgcttgtcgaaacgcgccttgctgcacctgttgtgaccgcagccgatttaagctacccaacaccgagccagacccagttcctgaccggggaaaagctgacgctgacggttgaaggcgccagcggcagcagctactactacatgggctacctctttaagaatgtcgaggattacaagcaaattgctgcgctggcgaacagctatcagaaagagcagacgcccgatgcaaaggcccaaaagctggcagacctgacggacgcgctgaatgcaatgctgaccgacacgaccggccgcgtgctgcgcctgctgccggaaggccagatggacggcggcgcacaggcagaaacgacagcggatggcgcagcgtttgcgcttggcgatgaaagctttgccatgaagccggagtatgccggttactggctgctgcccgccctgcgcagcatgtccaccaacgacacaaccgccagctccaactggtactactatgtcgcagacagtgcgcagacaacccccacccaaatgcagctgcccaagatcaagctggatacacctgcggctgtgatcggcaatgtggaacgcgaggaaaaggtcggtctgtatgccaatccggagtataccggcgaagcgctggaaaccaagacgctgcagctgtcccgccgcacagtagaatggccgctgggcaatctgtatgacgatgaggacgctggtgcggtgcgcagcctgaccaatgtctatcagtttactgtgacgccggtttctgcaaacgaagtaccctacacggtaaaggtctgggtgaatgaccgggagtatacggatgatgacggcaaggtttacccgatcggcgagatagtcaaggtagaaaaggccgtcacgctgaccgatggggacggcaaacagcaaacactgacaaaggaaatcacgcctgctgtggacgaagcagcacagcgtgtctggtatgatttgagcctgctgccgaccgctgaaaagaacgaagacggaacagcgaaatgggagcgccagacaacgcgcatcacaggtactaaggtggaggataccacaaaggcgtactacgcagccgatgtatacccgatgctggaggttgtgaagaacagcgcgaatgaagtgatgctccgtgtaacactgcctgacctgttcaaggtctatatggatacgcaggataccctgcaaaaaatcaccgccacactgaccgtgcaggccctgtcgtatgaggatgcagacggaaaaacagacggtaaaacggcagaatccgagcagaatgctgtcgtactgaacgagaccgacacggcatcccagacagcagaggaagcaccgtacagtgatgacagcgtggcagaggacacggtgtcagagcaggtgtggcgaggcttgacccgcgcggtcacggaatcgcacccgacgagccagaccccggagaccgcagctgatgcggaaaccatacaaccgcctgcggcctgacggctgcagcagaaaggaggtggcattatgtgccggaaagtgcgcagcatcctgcagggaaagcagggcttgtctatgatactggttctctgcatgggggcactgtttgcggcgctgtctacagcgctggtctatgcggcttctgtgctgacggccaatgccaaccgccagctgttggagcaagaggtgtatcagcttgccaccagcttctcagacatactgggggaacagctgaacgacagtaacagcgaatttgctaaatttatcaatactacctacatgcggtcagagtattacggcaaaaatccctttgaggaggaaacggagcccaaaacctttgaggctgccttgagcggggacggcagtgacggcgcagatacaataaaaatcacgctgcgccgccgccccggcgaggaagcggaaaagctgaacctgaacggcagtatagggcagtctgtggacaccggcgatacaagctggcagcagcttttgaatagctggcaggctgctgactataagctggttgacctgcagctggatgtgactgttactgtagaaaaaggcggggagagctttgcctataccgtgacctatgaccgcgcggtgcattatgctgtcagctattatacgctggataataatacggcacagtataaatgggacaataataagacatttaacgctgttaatggcggttcaacggttacaatcaatgccgatgggacatccaaaaagattgtcccgcactttgatacagctgatccgcagtccatcacctacacacgcggcgttaagcagaaaaccaccgcacaggagtgaccgctatgaaaaagatactgaaaaatcagcgcggagaaaccattgtggaagtgctggtgtcgtttgtgctgctgcttatgtttaccgctttgtttgtggtatcgctgcggtatgcccgggctatgtcccaaaaggcggaaacgctgcgggaaacggcatatcaattatgcgccgggctgtacccgataccgaaaacgcagggcgaagcgcagcagggaaatgggtggcagcctgtggccggtaaggaaaatatgacctttcaatttaagtcaggggaggcaatggtgttttccgtatccggaatcaaactggatggcatgaaggtggaggcgaatattactgcagcggagggcggcgaagagaacacaaaaacggaatcctacaccttccaccgttacagcaaaggccagtcaaataccagcgggggacagggaacaccatgatgcgagtgctgaaaaacaaaagggggacaacgctggtagagcttgttgtctgcatggtgctgctgtcgctgtttacgcttgcggctgtcacgctgatacagcccagcgcgcaggcgtatatgcaggtgcagcagcagacccgcgcccagaatctggccgatgcgctgatcgagaccatccgcggcgagctgctgaacgctaacgggtatatccgctttgcggacggcgcaacagacagtgatttggacacggtgttcaaagaaaaaaccggtgccagcagcggtacggcgttggagttcagcgtctatcccaatcatattgagctgatcgacaaggataaggtcccggcgctgacaaaggcggacggaacgaagctgctgagccaagcggccgcagacgagctggacggttacctgcacatgcggttctatctgcaggaagaaaacacctataagccccagcatgaagtgacatcagatggaaaaaaactgcctaatgttgcctacgcctacacgacagcctaccccaaggacgcctacatggggatgtttatcagtgacctgcagttttatgcccgcagctataccaaggccgagggggaaaaatacgcccatgttacggcgctgaccgttgtgctgaccgtagcccagaaggacgcgcggggcagcgctgtgccgctgtgtacccaaaaggcgatcgtgccgctgccgggcgcaccggtgtatatcgaggagccaggcagctgggacggcagcaacccggcgatgtcctgaaacgccgcccaatgcgggatattccatgttatgctggacaaaccccttaacttttgttatactataaaacagtatgggaagggtggggcgctgcgccccgttgtatagagcagagaggaataccacatggcaacaatcgaaatcagaatgttgggcgattttgagatccgcgtaaacggcaacccggtgctggcccagctggcacagtcccgcaaggcaatggcgctggtgcagtatcttgtgctgcagcgcggggagcgggtgtcccacaagaccatcaccgatacgctgtgggcgggcgagcgctcgaccaacccggatatggcgctgcgcgcgattttgcaccgtttccgcaatatgatcgaggccgagggcctgaccgagctgcagggctgcatccagaccagccgcggcagctaccagtggaaccccgcgctggattgcagcgtggatgtgtttgaggtcaacgacctgtctgagcaggcccgcagcgaggccgaccccgaaagccgcggctgcctgtatgaggagatcgtcaacctgtacaagggccgtctgctgccccagtttgccaccgagccatgggtcgagagcgtcagcgtccggctgcacgggcagtaccgcacggccattctgggcctgctggagctttgcaaaaagtggggcgaaagcagccgcatcatatcgctgtgtgcccgcgcgcttgagctggacccctacgaggagcgcctctatctggaggagattgtggcgctggaatcgctgggccgccacaccgaggcacgggaccttgcccgccgcggcaacgcaatgggctgcctgcaccatgccattgacccggggcgcgccggctctgcctaccgccagatgcgtcaggcggaccgcaacatggagagcgagctttcccgcctgaccgccgccctgcccgacaccgaaaacaccggtgcctgcctctgcgactttgaaacctttaaggagatctaccgcgtgctgcgcggtgtgcaggcccgctacggcctgccggtgtttctggccattgtgacggtggcccccggccagaatgccgagcctgccgagaccaccgccatggtggagcagcttggcgagctgatccacaccgcgctgcgccagtgtgatgtggccgcccgctacagcgatatgcagtatgtcatcatgctcagcggcagcgcggccgagacaggctccagcccgctggagcgcatcaaggcggccttctaccgcgtgcccgcccacggccggtatctgctgagctacaatgtctatgtgccggagatcaaggctgacagcggacgcgcccgccgccgcaaaaaaacaacgaagaaataagcaattttaccagccgcgccggtgcgcggctctttttttacactttacacaatcttttgcctaaaattttttacaaaaaatataaaaaaactgtttaaatttccacaacaatgtggtaaagtagtatcaaacaggtgggaagtgttcaaaattcactccgccgcaaagaatatctacgccgcagggcggttggaaacgccccggcgcgaaaagaggtttgacgatccatgggctacgcaagcaaagacatccgcaacattctggtggccggccatgccggctgcggcaaaacaacgctgaccgaggcactgctgtacatgagcggcgctaccgagcgtatgggccgtgtggaggacggcaccactgccagtgacttcgaccccgaggagacccgccgcaaggcatcgctgaatgccagcgttgtgccggtcgagtatgagggcaccaagtacaacctgatcgacgcccccggtctgtttgactttgagaccggcgccgccgagggtatcatggcagcggagagcgtgctgatctgtgtatccggccgctccggcgtcaccgtcggcgcagaaaaagcctaccagctggcgctgaaaaacaacaaggcgcggatgatctttgtcaccaagaccgaccttgagaacgccgattactttaagatccttgagcagatgaagatcaagttcggcccaagcgtctgcccctgtgtcgtgccggtccgccttgatgacggcacggtcgcgtacatcaacctgttcagccagaaggccttcaaatatgagggcggcaagcaggtgcagatcgaggtgcccgacatcggccaccgctttgagggtctgattcaggccatgagcgaggccatcgctgagacggacgaggccctgatggagaagttcttcgagggtgaggccttcaccaccgaggagatcgtgcagggcatggccgccggcgtgcgcagcggccagatcacccccgtgttctgcggcagcgccgtcaacatgcaggcgctggatatgctgctctacaacatgaatgtgctgctgcccggcgcagatgccgccgcagccgtggccgaggataaggacggcagccctgtgggcatcgcggtcgatgacgctgcgccgctgtgtgcctatgtgttcaagaccgtggcagacccgtttgtcggtaagctgagctttatcaaggtgctgtccggcaagctgaccgctgccagcaacgccgtcaacgcccgcaccggccagccggagcgcatgggcaagacactgactgtctgcggcaaaaagcagaccgataccgccgagatcgcggcgggtgacatcggtgccgttgccaagctggccaccgccaagaccggcgataccctgtgcgaccccgcccgcgttgtggcgctgcccgcacctgtctaccccatcagctgctaccgcatggccgtcaaggtcgccaagaagggcgatgagggcaaggtcagcggcgcgctggcccgcctgatcgaggaggaccccgccatcagctttgtggtcgatcccgagacgaagcagcagatcatcagcggtctgggcacccagcatctggaggtcgcgcttgccaagctgaaaaataagttcggcgttgagatcacgctggaggccccgcgcgtgccctaccgcgagtccatccgcaagagctgcaaggcacagggccgccacaaaaagcagaccggcggccacggccagttcggcgatgtgtggattcagttcgagcctgtgcagggcgagggcatcgagtttgctgagaatgtgttcggcggcagcgtgccgaagaacttcttccccgcagttgagaagggcgtccgtcaggcggctgagcacggcgtgctggccggttacccgatggtcggcatgaaggccaccctgctggacggcagctatcaccccgttgattcgagcgagatggcgttcatcatggccgccaagatcgcctacaaggccgcgatccccgaggccggccccgtcctgctggagcccatcggcgcgctgcaggcccatgtcccggcggacaacaccggcgacatcatgggcgaggtaacaaagcgccgcggccgcgtgctgggcatgaaccccgatgaggacggcctgcaggtcgtggaggctgaggtccccatggcggagatgcaggatttcaccaccttcctgcgccagctgacccagggccgcggctacttcacctttgattttgtccgctatgagaccctgccccagatgctggagagcaaggtcatcgagcaggcaaaggcctttggcaactttacagatgaggattaaagcgtaaaaaataagcacctgctgaccggtatgcgtgtgaccggtcagcaggtgtttttttgttgtattgcgttgtaggggggcggcgtcccgcggggcatcaaaatgtagggcacacacccaatcaggtaatcttcagcgcacgctgcacccgatatacaatataccggaacagcccgacgatcaaactgccctccacccagatatagttgggcagattcttccaccggaacttgggcttgtcgatcttcggcagggcgacccatgcctcgtggaagccctttgcgtagtcattgccaaagccgcgcagccggaacataacgacttttaacaggtagcccagcagcatcgggatgaaattcaggaccagcatcagcagcggctggtttttgtagggcagcaaaatgctattgcggccgctctggatgctcttgaacgggttgtaccgcaccgcgccggtggtcgcaccgcagatgtggcggcatttggccgtggggcagtagacatttttgtagccgaagctgttggcgcgccagctcaggtccacatcctcataataggcaaagaacagttcgtcaaagacgccgatctcgtccagaatggatttgcggtagagcgctgcgccgccgcaggcgctgaaaatgcggcagggctttgtgtagcggctggcccgcagaccatcgccgcgcttgcaggcaaagcccaaaatcgtcacataatcgcctgcgtcatcggccagctccggctcatagtagcgcagcatcaggctgctgaccgcaaaaatcttcgggtcggcatcggcggtccggataagctcggccagccagtccggttcggcgaaggcgtcgttgttgaacaggacggcgtactcgcccttggcgatcgcaatgccctgatttaccgcgtgggaaaagccggtgttgtcggcgttttcgatcagggtgtagcggtcgcggccgcagtagctgcgggcgatcgcaaggctttcatcggtggagccgttgtcgatgacgatcagctcaaaatcctgctcggtctgtgcccagatcgactcgatggaatcccgcagccagcctgcgccgttcagattcgggatgatgacagatgctttcatggcgtctccttaccagaaataggggttggcgtagtagtaggtgagaccggcgtgcaccacggcgcccagcaccagcgcgccgaccagcaggaacaccgcaaaggcgactgccaccacggcggtgcggatcagataggcgcgcgccagccgctgacgagcggggttgcgggtgccgccgaagctccacaccagtgacagaaccagcccgaccagcgggatggcaaagaaaatcagcgcggctgccgtggcgctctggctcatggcagtgacggcagcgtcctcgtccctgtcgggcgtgtcatacagcggctgggcagggctctgctgcggggctgtgcaggcggccgggggcaccggtgcgccgcactgggggcagctgcgggcgtcatgcggcaccagcaggccgcagtttttgcagaagcgtagcataacctcgttattcctccaatgtcaggttgcggtccagctgggtgttcagaatgatctgggtgttggtggagcccatcttctgcatcttggtcagcagatgctccagcgcgtcaatgtcggtgcagcttaccttgattataaaattgtagctgcccgtcacccggaagcactgcagcacctgagactcctgttcgatcattgagagaaagcttgcgcgggtggcggcgtccaccagcaccgagatcagcgcctcgacccgggcaggggcatcggggtggcgcagcacaacggtgtagccgccgatgatgccctcctgctccagccggtggatgcggctggaaacggcggggctggtcaggctgacccgctgggcaatgtctttgacgggcatacgagcattttctgccagcagctgtatgattttgtggtccagttcgtccatgaaatgactccttgcttttgttttgtataatgcgcacaaaaaaataatgtgaagtatacagacattgttgtctttaacaaagttgaaaaagtatgcttttttgtgccgtcgctaaataaaattaagcgccgatggttttattataatcttttgaaaaccaaaatgcaagtatgacatttgacattttaagaaatcctgctataataaaacttgtaatcaatcaagacattcactgacctttatatactttcccacccctctatgcacaaagccccgcaggtagcccctgcggggctttgtgtttgtatctgctacaaaataagtaaaagtgttcaaaatatctctgcgggcaagtgcgctataaaaaagcggactgtcgaaaagggcggtgcttgcgttttagctgtttcttggctccctcacagttgggatttttcggtatcgtgaataaagtaagtaaatgcgcgcggcaggagccgcaaagccctcgattttgttactattattaacggattccgggtttgacggcaggccgactgctgtgctataataaaaattccgacatcaatcgtcattttttaatgggaggaatcactatgcttatccctgtactgctgtttattgtcggcttgctctttttgatcaagggcggtgattggtttgtggatggtgcgtccgcactggcccgccgctttcatctgccggagcttctcatcggcgcaacggtcgtttccatcggtacgaccctgccggaggtcatggtctccacgatgtccgcgctctccggccatggcgaaatcgcctacggcaacgccatcggctcggtcatctgcaatgcggcgctgattgcagccatcaccatcgccgtgcgccccggcaaggtggaccccaagaccttaaagacgccggtcgcctttttctttgcggcggcagccatctactgtgcggcggcctatgtgttcggccggtttacccgcgtcatgggcatcatcatgttggcgatgtttgtcgcttacatggtcgtcaatgtgctgcagatgaaaaacacccccgccgaggcccatgaggacgccgaggaggagatgcccctcgccaaaacgctggtgctgctggtgctgggcgcggtgctgatcgcgctgggcgccaacctgctggtggacaacggcactctgatcgcgcagacgctgggtgtgccggagagcgttatcgcgctgacctttgtggcgctgggcacctctctgcctgagctggtgactgccatcacctcgctggccaagggtcacagcgatctctcactgggcaatgttgtcggtgccaatgtcttcaatctggtgctggtcagcggcgtttcggtcacgctggctcccttcaccgttccgcagagcgccactctgttcggcatcaactccagccttgtgctggagctgcccgtcatgctggctgttatgctgatcctcacggttcccgccctgtgcaagggcaagctgaaccgtgcgcagggcattttgctgctggcgatctacgcagccttctgcgctgtgcagttcacgctgtaaacaacacaggcttggcccggcacacccgctgcctttgcgcagcgggtgtgccgggctgttttttgaaaagcgccgcacagagcctgcagacagggataaaaagcagaaacccggcatacatttccgcgaggtggtgtgtatgctgggcattttgggttattttttgcaggtggctgcagggcatatcctgtatcttgcgctgcatcttgagagcgggacctttccgcggccgctgccgccggagcgggagcgcgcggcctttgccgacctgcgccagggcggggcagctgctgccgctgcgcgcgacacgctgatacgccacaacctgcggctggtggcccatatctgcaaaaaatactacgcgggggatgccgcgcaggacgattacatctcgatcggaaccatcggcctcatcaaggctgtggataccttcgaccccggcaagggcaaaaagttcgccagctatgcaagcagatgtattgagaatgagctgcggatggaactgcgccgcacgcgcagggcagggccgcagctttcactgcaggagccgctggaggcgggcggtcagctgacgctggcagacaccttgcccgatgagactgacatggaggcagactgcgagcagcgtgccgatgcggcccggctgcgcagcatggtggagcagctgcccgggcgggagcggcagatcatgcggctgcggtacggcttcggcggtgcggcacagacccagcagcagacggcgcagacgctgcacatcagccgcagctatgtttcccggctggaaaagcgggcgctgaagctgctgcgcgagcaatggaaagaatcgaaataaaatcaaatctgaaaggcgtagcgtacctgtgcgaggcagatgtgtggcaaggtgtggcaaattgtgccgcacatgtgccacaccttgatgaagcatcgaatctatgtaggaaataaaaaaacaggcagttgcaccgtaaaatgtagaaaagctgtgaaaatgttataaagtaacaataattccgaaaatatttcgcaaaaaatcattgacattttactcacaaccagatagtataaaagtataaacgaaattatgggctacaccgcatggttctatgcgccgctgtaaagggcaaagtgtaccctctgcaaagatcaaaacgcctgcagtgccgcagcgttttgggcggagggtgcacagccgccgggcggcgcacaggcccgcagggcagacgccgtgcggcagtgccttagggagagaggtataccaagtgcacctgacaaaaagcgaacaacagatcatggagattttttggaaggccgatcatgcgatggcccagacggaggtcgtttccacctgcgtggagcgcaaatggaaggaacgctcgattttctcgatgctgaacagcctgatggaaaagggcgtcctgcgtgaggtcggttttgtccgcagcggcaagacctatgcccgcacctttgagccggcaatgtcccatgccgaatatctggctgctgtagtggcagagcagctgcccgcaaagcagctgccggagctgctcgccgcgttgatgcagaagatcgaaacgacccctgcgatccagaaggaaatgcgtgccgccctgcgtgagaatacgcagtaaagcaagccgcagggcatggatcgtgtgcagatgccagagggattggattcgttcaaaaaagcaccgctgcccgtatcgggcggcggtatttttttgcatccctttcgcctgcagcgtgcttgcaaggctaatataaaagcggtatacttaataaagtaagcagtatacctatactgcgcagattctattcgatttacaggagaaccccgattatggataaacgcaataaaaccgcgctggcctatctgctcatcggtgtggcggcggcaggccgggcactgctctctgtgccggaaaacgccgccattcaggaggtttcactgaccgtgctggcgttggtaggctacctgctgctggcctccaaaagcaggctgccggtgcttttcggtgcggcgggccttgtgctggagctgatcctcagcggtgtgcctgcaggcggtgcatcggtctggctgattcccgcgctgcgcgtggcggatctctggctgttctgggggacatcggtggtgctgctccggttggcagggcggcagggcagcagggtgccgtacattgcggcgctgccgctggctgtctacagcgtggcgcactttctgcccgcgttgaccacgctggcggctgtggcctttgtggcgttcagcgtcctgatgctctggtttgcagcggtcatgatccgcgcttacaacgatgcgcgtgtaaaaaagtgacaaaatccgaaaactgtggtatactgtagtatctgaaaaaattcagccgtgaaagaaggattcttatgatcccgtttaatgtgcccccctgcgtgggtgaagagatcgaatatgtaaaacaggccattgcgtcccacaagatctgcggtgacggcgcctttaccaagcagtgcaacgcatggctggaggagcgctttcatgcccagaaggtgctgctgaccaccagcggcaccacggcgctggatatggccatgctgctgtgtgacctgcagcccggcgatgaggtcattctgcccagctataccttctccagcacggcaacctctgccgtgctggcgggggcccggctggtgtttgtggacatccgccccgacacgatgaatattgatgagacgaagatcgaacaggccatcaccgacaggacgaaggtcatcgtggcaatgcactacgccggtgtagcctgcgagatggacactatcatggagatcgctcatcgccatggcctcaaggtcgtggaggatgcggcgcagggcgtcatgagcagctacaagggtcgtgcgcttggcaccatcggtgatttcggctgctactccttccatgagacgaagaactactcgatgggcgagggcggtgcgttggttatcaacaacccggcctacaacgagcgcgccgagatcctgcgcgaaaaaggcacaaaccgcgcgaaattcttccgcggtcaagtcgataagtacacatgggtggacttcggtgacagctatctgcccagtgagctgaatgcagcctacctgtgggcgcagctgctccacgcggacgaaatcaacaatgaccgcatgaacacttggaacgcctatcgcgccgccttccagccgctggccgatgccggcagggtcgagctgcctgtgattccggcagactgtgtacacaacgcgcacatgttctacctcaagtgcaaggaccttgaggagcgcacggcgctgattcgtcacctgaaaaacaacgatattctggcggtattccactatgtcccgctgcactccgccccggcgggcgagaagttcggccgctttgacggcacggatgtctacaccaccgccgagagcgagcgccttgtccgcctgcccatgtattacggcctgaccgagtccgaccgcaagcaggtcatcgaaaaagttctggaattttatgcgcagtaagcgtataccgggctgggcgcaggtgctgtgcaccgccgctgcggcgctggcttttctgcttgtgtatgagctggccgtctaccgcgtcccgctgcagcagatatttctgccgtgcagctattggagcgatgaggtcatctacagcaagcagctggccgctgtggtgcgctgcggtgcgccgcagggatatttcggctttaatgaatcgcatgctgccagcggcacctttgccgcatggggaccggctgtcttttttgtgtacgcgctgccggggcttttcctgcgcgggcagaatgcttttttgtggtgcaatctgctgtttgtggtcgcagggtggacctttttcgcgcgggctgcacggctgaacggcaagcagcaggcagtctttgccgccgcgctggctgccttcaacgcaccgatacgctatattttctccgccatgcaggagccgcttcactatgcgcttgtgctggcggcgctgggctgcggtattctggcacggcgggataagagccgcgccgcatggggtgcgctctgcctgctttgtgccatcgccacattggtgcgcccttatgaggcagtgctttggctctacccattggcgctggcgtggcatgaccggcgccgcatcgcggtgtgtgttgcgggcggtgcagcctcgctgggcggcacgctggtgctgatgtcgaaattttacgcgccctactttttcacgaatgtggatatgacccccatgcaggaactgctccacggtcacccggtcgaagcgctgaaggatgttgtccataagctgatgggggcgctgcagaccgttgggcagacgatccttacggattttgcccagcgcagcggcggatattatctgctgttctttctgctgctcggcattgtgctggcctgtcttgcatgggatgcccggcagcgccgccctgtgttctggaagggctgcgccgctgtgaccgcaggcatcgtttttctggcgttaatgctgatgtaccgcccgggcgagggctcgcgccatacgctgattctggatctgctgctgttggcaagccttttgctggagaaccgccgccctgccgcagccgcggctgcggtatcggtgctgctggcgctgaccggggtgctcagtctggccaagggttatggcctgccgcgctacagcgaggtttgggacaatgaggtgcagcaggtgcaggcagcactggaaaagagccaggctgcaatcaacagcgaggacccatgggatcatacggcggcatatgcctttctggatgaggttcactgcggcctgctgtacggcgtaccggacggcatgggaatccagtttgacgagaacagctatctggaggatgcagccaacccggtctatgcccggtatgtctttacaagcgcgggcagcaatacagcagcccgcctgactgcagacggctggacggttttgtatgagagcgaaaagtgcgtgctgtatgagcgcacaagatagcaggataaagggtacactatggatgtaaaaaatctcccggttctggagggcgcagctgtccggctgcggcccattgccgatgcggacaccgatctgatcgtaaaatggcgcaatacgccatcggtcgtgcagaattttatcttccgccagaccttcacgccggaaatgcaccgcagctggctggctgccaaggtcgccaccgggcaggtcgtgcagtatatcatcatcgacaaggccgatgctaagcccgtcgggtcggtctattaccgcgatatagacggccacaaccgcagcgccgagtacggtatttttatcggcgaggaaagcgcgcgcggcaagggcctcggcaccgagacggccaagctttttaccgattttggctttgccgaattgcagctgcaccgcatcagtctgcgggtgctggcggaaaacaccgctgcccgccgcagctatgaaaaggccggctttgtgcaggagggcattttccgcgatatggagctgctggacggccagtaccgcgatgtagtgttcatggcccggctggcggagaaataatgatgggaaatcgactgcaaaaaatccaaaagctgttcaaaaagacccccaacgcgctgttttgcctgttgggggcagttgtgttccttgcgggggtctattttatcagctaccgcaccgcaccgtgggcggtctggctgcctacctcaatgaataatgacgaggtaatctacaatcgtcaggtcgtcagtgttattactcacggtggtccgcaaggctattttggataccaggaaggtacagcggatattgggcggttcagtacttgggggccgttcttgatttgggcctatgcaataccgggatttctgttcggcagcagtttcaatgtagtattatgggtcaatatactctttattgcattgggtattgcagtgtttgcaggcagtgctaagctaaattggtggcagtgcattatcctgtgcggaacaatgtttgcggtgacacaaccgctttctttttgcttcagcggtgcatcggaagggcttcactatgcactgacactggtgctgatgggcggagcgattggaatggagcgaacagggaaacgcggttattttctgttgactgcggcggcttgcgcactggaaaccattgtgcggccttacgcattgctgttctgggtgttcccactcatggccgtgtggaaaaataaaaggcgttgctatgcctgttttgcacttatggctgccagcttgggcatttctctgtttgcaatggaaaagctggcggcaccctatttcagtgatggtggtatggactttgctggtgtgcagttgttgttccaagggcatcctatacaggccgttgtgtatgagctgagtcgtatctgggattacttgaagggcgcatggaaagagattgtcccgaccctgcagggcaatacgacctatattggcaatggttgtgttattttgctggcaacaacagctgtaaccgttgcctgcttgatttgggatgtgcgtcatggcagacggattcgtttaaaagctgcatccctgtgttgctcgtttattatcgcactggttctgttaggactgtataatattgacccgcgtcatctgatgatgatggtaatgttacagttggcggcagtggtaaaagaggacagcgaaccggctgctgtttacctgcctttgctgttgctggcgctgttgcctatgaatttctctcgcggcacgatgccggaaaagaatgaggttatggcggcacagatggaagttgtggcagaagcgctggatgccagccgtgcagaggacaacagcgcagacccatgggataatacactggcatattcttatggggatgatgtattccacggttatctgtatgctgtgccggacggcatgggcattgaatttgacaaaaacagctacctgtgggatgccgagaaccccatctactcccgctatgtgatgtgcggccacggtacccgcgtggaggaacgcctgctggccgaaaactggcaggagcttgtctccaccgaggatctggtcatctataagcgcagttgaacacatctggaaggataacgaagttatgcagaaaatttcttatgtgatcccctgctaccgttcccagcatacggtgggggaggtggtggcggagatcaccgccaccatgaaggcgatgccgcagtatgactatgaggtcattctggtcaacgattgctcgcccgatgataccatcggcacgatccgcgcgctggtggccgcggatgatcatgtgaccggggtggatctggccaaaaacttcgggcagcatgccgcgctgatggcaggcttccacaaatgcagcggggacatcattgtctgtctggacgatgacggccagacccccgccgatgaggtgggcaagctgctggagaagatcgatgccggctacgatgtcgtctacgccagctacgacacaaaaaggcaggccggctggcgcaatctgggcagctgggccaacagcaagatgaccgagatcatgctgggcaagccgccggagctggtcgtcaacagctactttgccgcccgccgctttgtggtggaggagatgctgcggtatgagcattgctacccgtatgtgatcggccttgtgctgcgctccaccaagcatatctgcaatgtgccggtgcaccaccgcgcgcgggaggagggcagctccggctatacgctgcggaagctgctgaatctctggatgaacggctttacctcgttttcggtcaagccgctgcgcatcgccacctatttcggcacgctgtttgcagcagcgggctttgtgtacctgatctatatcgtcattgaccacttcacccgcggcgcggccccgatgggctgggcgtccaccacggcgctgctgctgcttttgggcggcatgattctggtcgtgctgggcatcatcggcgagtatgtcggccgcatctacatgtgcgccaacgccgcaccgcagtatgttgagcgtgaggtcatccgccatgaggaggacaacgcatgaggcagcaggcaaaatggttcctcctgctgcatgttattttgggtatctatgcgggcagcagcgtgtgcagcaagctggcggcgcagcagccgtttttgagcgcggcgtttcttctgctgtacggtttgatgctggcggcgcttgttgcctatgccatcggctggcagcaggtcatcaagcatctgccgctgacaacggcctacgccaataaggctgtcacggtcgtctggggcatattgctgggcatggccgtctttggcgaggccgtcaccccgcggcaggtcgtgggggccgtcatcatcattgcaggcatcgtgctgtttgtgcgtgccgacaacgaagaggagggcggcaaatgaatcaggcacagctgccctatgtgctgctttacctgtgcagcaccttcctgtcctcggtgtcgcaggtcttgctgaagaaggccgctatgcgggagcatacctcccttgtggcggagtacaccgactggcgtgtgattttgggctacggcctttttgtggggtgtacgttgctgacgatgctggcatacaagggcgtgccgctgaatatcggccctgtgctggaggccaccggctacctgtatgtgacgatcttcggcgtgacgatcttccatgagaagatgaacccaaagaaaattgcggcgctggtcatgatcgtggcgggcattctggtgtatgcgctgtaacagaaaagcaaaaccccttactttaccataaacaataaagcacccccggtctgtacggcaagtacaggcagggggtgctttgttttacagccgctcgggcaggcgtttgcgtctttcgggcacgctttgcagcgctgtggcagcgtaatccagtgtcagggccagcagcagaccaaatacgacatcaatgacgctgtgctgcttgagcagcatcgtggacattgtgatggacacgcacagcgccatggcggccgggcgcatccagcggcggcgcggcgcgtcaaaaatgctgctgcggtaataggccagcatcagcgtgaccgagttgaaaacatggatggacgggcagacattcatcggcgtatcgctgcggtagatcgcgcgcacaagccgggcaaaaatgtcgctgcccggcacaaagcgcggccgcagcgccagcccgttcggcacgatggcgtagaaaagcagcgccatcgtcatgccggtgaacagcggcaggcaaagccgccagaaatccccgcgcggggccttgtacagcaggtaaaacagggtgaacggaatccacgggaaccacagcagatacggcacaatggcatatttgcagaaggggatcagatcatccagccggcagtggacccacaggtcgggggactggatcgtgcgctccagcagcgcgaaaaaggtcagataaaacagagcatagaacgccatgaaccagaccggatggcgtgaacaccagttgcgcatacagtttgcatcctttcgttgatgtatcattatacgccccgggcggggcataaaacaagcgaaattccgcacaagatatagccgggttttcgacagaatactgtgcggctttggctgcctgcttctgtatactaatacgaacgagggggaagtgttactgcgcgcagaatgtgaaaaagttgtaaattgatgggaagctgtcaccgaaggtgactgatgaggggcagagctgccggaatcacccggtaccgggtggctgagataacacgcccctcatccggcgcttcgcgccaccttccccctcaggggaaggctaaggcaacaccgcacaattcccgcctaacggcttaagcaccgctccggcggctgtggcccggcatctgcgttgccaaaatgctcgataatacatccagtattatctgcgcttttggcttagcagctgccgcacctcgctcgccgtatcggcacttagaattatgcggtattgccctaaaaattccgctttgccttcccctgcgggggaaggtggctgcgctcgccgcagccggatgaggggcggcctacctatggtagccctgtatcgttttgtgcaaaaatagtaacttgcgaggtgcctatgactgtattgctgaccgggctggcatcgctgctcgtgttcggcggcgttgttctggtgcatgagctgggccactttatggcggcccggcattgcggtatccatgttgaggaattttccatcggctttggcccgcgcctgtggtcggttcaaaaaaacggtacgacctattcactgcgccttttcccgctgggcggctacaacctgttcagtcaacccccagaggaggacgcggacccgccggcagaggagtgtgccccgccgtgcaaagctgcgttgttcccgctgtcggtcagtgggcagccgtttgagcaggccacggcatggcagcgcttctttgtgacgctttgcggtgcgctgatgaactttctgctcggcatggcagtgctgctggtgctggtcctctcgcaggggcggctcggcagcacaacggtggcggatttcggcgagaacgccaagagcgccgctgccctgcaaaagggggatgtccttctgcaggtggacggtaagccctgccgcacggtctacgcgctgtctgagctgttcgacggcaccgaaaagacgcataccataaaggtgctgcgcggcggcgaggtcgtgagcctgcccgccgtgacggtcagcccaacgcttgatgaaaacggccgtgtgcagtacgccacagactttcgggtggcagcgcagcccttgtcagtacacagcactctggtcatggcgggggagctgttccgctattacagcggcgcgattttgggcggcttctggcagctgtttaccggcaaggcaggcatggaggatctctccggcccgatcggcacggtgtcggcagtcagtcaggctgtgcggtacggctggcgggatgtgctttccctgatggctctgctgacgatcaatgtgggcatcttcaacctgctgcccattcctgcgctggacggctgcaagctgctctttcttgcgtgggaggggctgaccggccacccagtgccactgcgcgcgcagagctttatcaacacggcgggcatggctgccctgctgtggctcatgattttggtaacgatgcaggacattacacgattcttataaggagaactacgatgcagcgtcaactgaaaaaagaagtcaagatcggcaatctcaagatcggcggcacaaaccccatcgccgtacagacgatgctgaatgtgcccgtcaaggatattgcgggcaatgtggcacaggcgcagcgcgttgcggccgctggctgccagatcgtccgtgtgacggtgcccaccccggcggacgccgccgttgtggccgctattaaagagaaggtggacatccccgttgtggcggacatccactttgattaccgcgccgcgctcgccgcgcttgatgccggtgccgataagatccgcatcaatcccggcaacatcggtggtgatgaccgcgtcaaggcggtggccgatgcctgcaacgccaaaaatgtacccatccgcatcggcgtcaacggcggcagccttgaaaagcatattctggccaagtacggcgcccccgtgcccgaggccatggtggagagcgccatgtaccatgtgcgcctgctgcagaagttcgactttgacaacatcgtcatctcgatcaaatccagcaatgtgccccgcatgatggcggcctaccgcctgctggccagccagaccgattaccccctgcatgtcggcgtgaccgaggcgggcggcaaccggatgggcctgatcaaatccggcatgggcatcggcggtctgctgatggaggggcttggcgatacgctgcgtgtcagcctgaccgatgagcccgagaacgaggtctatgcaggctatgacattctgcgcgcggcaggctacgccgtggcaggccccgagatcatcagctgtccgacctgcgggcgcacccagtacccgatgatcgagatcgccaacgaggtcgagcgccgtctgcgggacgagggcttcaaaaagccgctcaagatcgccatcatgggctgtgttgtcaacggccccggcgaggcgtccgatgccgacatcggcattgccggcggcaaggacgaggcgctgctcttcatccgcggtgaaaagatccgtatgctgaagggcgacattgtagggcagctgctggacgagatccataagatgtaaccctctaaagccttcccccttgggggaaggtggccccgcagggccggatgaggggcgtgtctgccttgccgcccttttaccgggcaatgatggtaagcccgcccctcatcagtccgcttcgcggacagctttcccccccccaagggggaagccttatctttacacccacttgtgaggtaaaatttccttgaaacctttcgtcacccaagtctggccgcagtttacggcggaccagcagttctgtgcggcgttcggcagtgtgctggtcgaccgtgtggagctttaccgcacaaaaagacaggtcgtgatctgcctgcgcagtgctgaacctctggatcaggcgctgtgcgggcgtctttgtgcatccctctccgaggtgtttgccgggtatgagctgcagattcgcagctattttgcgtaccagagcatcaccccggaggcggtgcgccttatgctggaggagctgaaggagcggggcatgccggtcaacggctttctcgataaggcccagccggtcaccttcggggaggacggcatcaccatccatgtcaatgcgggccgccagatcttggagagcgtagagctgccccgcgtgctggcagagcttattcaggagcgcaccggcgcactgcccatcgtgcggctggccgataccggcaacacccgcaccgaggaggagtttgagcagtacctgcaggagaaagcgcctgccgtcaagtttgaggccaaggaaacgccgcccgactttacgatcgaggggctggcccttaccaataagccggtcaaggtgttctacggcaagaccttcaagccggccgacatccgccatctgaacgatttgggggacggcggcaaggtgacggtctggggcgatgtgtttgccaccgaggtcaagggcagccgccgaaagatttattttacctccatcactgactattccggctcggtcaacctcaaggtattgggggacgaggacgccgatatgtccaagtgggagggcctcaagcccggcaccaccctgattgtgcgcggcaactatatgtatgacaagtacgagcatgactttgtcatcctgccctacgatgttctgcaggtcgagcgcgagcagcggcaggacactgcgcccgaggggcaaaagcgggtcgagctgcacctgcataccaagtccagctcaatggacggcttcaacgaccccggcaagatcgtgcgtctggcgcaccgcatgggccaccgcgccattgccatcacggaccacggtgtgtgccaaggttatccggaggccatgctggccaccgatgccatccacgaaaccgacccggacttcaagctgatctacggctgtgaggcctattttgtcgatgatatgatccccgccgtttacggcgcggcgcagatgccgctgtccggctcgtttgttgtgttcgacaccgagacgaccggccttgacgccaacaccgagcggctgaccgaaatcggcgccgtctatgtggaaaacggtaagatcaacgaggaaaagaaattctgcaccttcgtcaatcccggcaagccgatcccgcagaaggtcgttgacctgaccggcatcaacgatgccatggtggccgatgcccccacgccggaggaggccatccgcgccttcaaggagttctgcggggataatatccttgtggcccacaatgcccacagctttgacatgctctttatccgcaaggcgggggagaaggcgggcgtcagctgggacgagaacacctatatcgacacgctgccgatgggacaggcgctcttcccggggctgcgcaactacaagctggacacgatcaacaagcatcttgagataccgcctttcaaccaccaccgcgctgtcgatgacgccatggcgctggcccgcatctttgaggtgatgctgaccgatctggaggagaaggacatccacgcggtcgaggccatcaacaccggccttggcggcaacaaagaggtgctgaaaaagaaatattatcacctgattattctggtgcagaatcaggtcggcttaaaaaacctctaccgcatcgtcagcgccgcccacacccagtatttcttcaaaaagccgcgtgtgccgcgcagcctgctgaaccagtaccgcgaggggctgctgctttccccggcctgtgaagcaggtgagctttacagggcaatcgtggcgggccagccctatgagcagctgctgcgcatcgccgattattacgattatctcgaggtccagccccttggcaacaatgaatttatgctccgcaacgggcaggtggattcgatcgaggcgatcaagaacttcaaccgcaccgtcatacagctgggcgaggatctgcacaagccggtcgtggccacgggtgactcccactttcaggagccggaggactggatctaccgtgcagtcctgcaggctggcaacggcttcaaggacgccgacaatcaggcaccgctctacttccgcactacgcccgatatgctggaggatttcagctacctgccgcaggaaaaggcctacgagatcgttgtgaccaaccccaacaagattgccgccaccatcgacaacaacctgcgcgccattcccaagggcacctacccgcccagcatccccggcgccgagcaggagctgcgcgatgacacatggaagcatgctgcgcgggactatggcgcgccgctgcccgatgtgctgcaaaagcggctgaaaaaggagctggattccatctgcggccatggctacgccgttttgtatgttatcgccgtgcgtttggtggcctactccaacgcgggcggctatcaggtcggcagccgcggctccgtcggctcatcggccgttgcgcacttctccggcatttcggaggtcaactcgatgccgccgcactacctgtgccctaactgcaagcacagcgagtggatcaatgacggcgtgcactttgacggctttgacctgcccgacaaaaactgcccggtctgcggcaagccgatgatcgtggagggacacgacatcccgtttgagaccttcctcggcttctatggcgacaaggagcctgatatcgacctgaacttctcaggcatgtatcagtcctgcgtgcatcgctacaccgaggagcttttcggcaaggagaatgtgttcaaggcgggcactgtctccggtctgcaggataaaacggcctacggctatgtcaaaaagtatcttgaggaacgcggccgtaccgtcaaccgtgccgaggaaaaccgccttgtcatcggctgcaccggcgtaaagcgcacgacaggccagcatcccggcggcatggtcgttgtgccggatacctttgatatttacgatttctgtgccattcagcacccggcggacgatgtcaagggcggtctgctgactacccactttgaatttaaatacctgcacgacacactgctgaaactcgatgagctgggccatgatgtgccgaccttctataaattctttgaggaatactccggcatccccattgactcggtcccgatgaatgatgaaaaggtctacagcctgctgaccagcccggccgcgctcggcgtgaccgaggagcagatcggctcgcgcaccggcaccttcggtattccggagatgggcacaaactttgtacgccagatgctgctggatgcccagccaaagaatttctcagagctgatccagatctcgggcctctcccatggcaccgatgtctggaccggcaacgcggacgagctgatccgctcgggcacctgcacgatcgcagaggtcatcggctgccgtgacagcattatgctgtatcttctgcgcaaagggctggaaccgaagatgtcgtttgacatcatggaggccgtgcgtaagggcaaggttgccaagggcggcttcaagcccgggtgggaggaggccatgcgtgagcatgatgtgcccgactggtatatcgaatcctgccgcaagatcaagtatatgttccccaaggcccacgccgtggcctacctgatggcggccatccgcctgatgtggttcaaggtctaccacccggcggtgttctatgctgtgtatttcaccgtgcgcggcgcggacatcgactatgaggccgccgtcggcggcgtccgcgtggccaagcagcacctgaaggacaatgaaaagatccccaaggacgagcgcaccgccaaggatgatgacgccttggtcagcctgcagctggaaaacgagatgctgcagcgcggctgtgagtttttgccgatcgagctgggcaagagctatgccagtaagtatgtggtcgaggacggcaaggtccgtctgccgtttacagccatccgcggtctgggcgatgccgccgccgtggcgcttgagcaggccacaatgcatgggcaggagtatatctcggtcgaggagctgcagcaggccagcggcgttgcgcagtcggtttttgacaagctgcgcgcagtcggcgctctcggcaatctgcccgaaaccagtcaggtcgatttgttcagtatgatgtaaacagggtgccaatctgcgggaaatcctgtaggggcggatgcttgcatccgcccgcgggtcgatgcaagcatcgccccctacaaccataaccaagcgcagcccccttgacaactcgcctgatttgcgctataatagcagtcactgatgcgggattagctcatccggtagagtgactgcttcccaagcagtaggtggcgagttcgagactcgtatcccgctccaaaatgtcctgatgctcttgcatcaggacattttttgttgtgaggtgcccgccatgcttgacgctttcccgatttatcactggttccataacggcaacccctattccggggccgagggcggtatgcggtatgtcatcacgcccggcaaaaaggcagaccccaacgatgaaagcggcaagaaaaagctggagtacctgactgcccggatctggcccggcccgtggagcatcgagcatacggcagaggaaaaaatcgagtccgctgagtttgacggcagccagacggggctggatgcagcggtggcctggctgcaggagcgttaccggagtgaggcggcccgctgggaaaacatcccctccatcttggactgcgagccggaccggtaagcggcggcagccaataatttccgctccgggcaacaccttttgttataaagggtgttgctttttttatggatatttgtcataataaatatatatataagaaaggggagacagcccgtggcaaagatcgctgttgtcgaggacaacgctgctgtgcggcaggagctgtgcggctttattgcgcagtacgcgcaggagagcggccagctgctggaagtgaccccctttgcggatggctcccagatcgtggagccctaccgccccgggtttgatattatttttctcgatattgagatgcctacgctgggcggcatgcccacggcggagcgcatccggctgctggaccccgatgtggtgctgatctttgtgacgaatatggcgcagtatgccatacgcggctatgaggtcgatgcgctggattttgtgctgaagcccgtcagctactaccagttcagcacaaagctggatcgtgcgctgcagcgtatctgccgccggcgcggcgggcagatcaccctgcaggtgggcggcggtgtgcagctgctggccaccgatgatatcctgtatctggaaacacgcgaccggctgctgcattaccacactacgaccgggacatggtcggtgcgcggcagtctgctcaaggcggagaaggatctgaccgcctaccattttgcccggtgcaaccagtgctatctggtcaatctgcgccatgtgcgcggcgtgcaggacgactttgtgcaggtgggggaggaacggcttgagatcagccgccgccagcgcgcagcgtttttggccgccgtggcggcgtatgtcgggggtgcgctgtaggtggattccatcctgagtctggccgtctgcgccgcaggcatctgcggcgcccagctggcctactggctgccgctgaaaaagcgggatcgcttccggctgcgcgccctgctggatcttattctggtgatccccctttcgcagctgatggtctttggcaacagcggccatctggacaccttgctgctgcttgtgatctacgccgtttattttgcctatgctgcggtatccacacatctgtgcacccggctggactgggcagccagcgcctactgcagcgtctggatcgtgttgacctcggagtcggtgtatgagctgtggcgggtcctgatctggaccgccgaggcactcggcatgcggcacctttccctgtacagcacgccgatgctgctcggccagcttggctttgtggtggtgtgctgcatcgtggtccgctttaccgtggcccggacgatgccggaggacggtacctaccacatcggcccgcgccagcttggcagtgccgggctgctgggggtcatgttcgtctttcagttctttgccctgcagacgagtctgcgtatcgggctgcgcccctcggcggtggtggcaccatcattgctgacccagttttactgtgtgacgctgctctatctgcagacggagcttttcaaaaagtccgccctgcaaaaggagatggatgccctcaacctgctgtatgaccgccagcgcaagcagtaccagatcgcgcggcagaatgtacagatcatcaaccgtaaatgccatgagctgaaggtgcagattgcagacctgcgccgcctgcagcccgatgcagccgcctcgcaaagtctggacgaggccgagcaggccgcccggatgtatgacgccaacgccgccaccggcaatgaggtgctggatgttgtgctgaccgaaaagagcctgctgtgcgaggcccagcgcatccggctgaactgtgtggccgatggcacctgtctggcggctattgagccgggagacctgtatgcgcttttctccaacctgctggatcaggctattgacgccgctgcccagcagcgggataccgaccgccgcatgatcgacctgctggtctgcaggcggcagggctttgcggtcatcaatgtcattgggccgcacccggcggagcagtcagatcacggccgccgccacagctatgagctaaaggtggcgcgccgcattgtgcagaaatacggcggcaccatggcaacggagccccgcgaggcgctgtttgcagtcaagatcgtactgccgcccccgaaagctgaatagacaaaacacgccccgcagctttgtgcagattgtacaaagctgcgggcgctttttttgtggcggaaaaaccgaatttcgcacaggcagtaccgcttttcgcaaacctattgcgaataaatttgcactcctgtacaatgcttatagtacaaaaaccaacacaggagggcgcaatgcgaagcacgatcaagctgatgaaaaactggcagttcaccgggccggacggcaaaaccgctgcggtaaacctgccccatacatggaacaacatcgacggtcaggacggcggcaatgattattggcgcggcacctgcacctatgcaacgcggttcgcagcccccgcttatgacactgaaacgcagcaggtctggctgcagtttgagggcgtcaacgccagcgcaagggtcacgctgaacggtcaggagatcatgcgccatgacggcggctattcgaccttccgcgcagaggtgaccggcctgctggcggaggagaacgagctgaccgtggcggtggacaacagcaagaacgaccgcgtctatccccagaaggcggacttcaccttctatggcggcatctaccgcgatgtcagcctgctggtcgtcagcaaaaatcacattgcgctggactatctgggcagctgcggcgtgcagatcaccccgaccgtcaacggcgcaaatgcagacatcaccgtcaagacccgcgtcgagggggagggcgagatcgagttctcgatcctcgatgccgccggggctgaggtgctgaccggcaagggcagtgacgccgcggtcacgcttgcgcatccccatctgtgggacggcgtgcgcgacccttatctctacacctgcgcggtgcgtctggtgctgaacggagccgtacaggacgaggtgcggcagcgctttggcgtgcgcagcttccatgttgacccgcagaagggcttcttcctcaacggccgcgcctacccgctgcacggcgtttcccgccatcaggaccgcaaggggctcggcaatgccatcacccgggaaatgcatgacgaggatatgcagcttatcaaggagctgggcgcgaacaccattcggctggcgcactaccagcacgaccagtatttctacgacctctgcgatgaggcaggcatggtcgtctgggcggagatcccctatatctctgagcatatgcccaacgggcgtgagaacacgatctctcagatgaaggagctgatcgtccagaactacaaccacgcctgcatcgtctgctggggcgtctccaacgagatcacgatctccaccaaagacaagcgcgacatgctggacaaccaccgcgtgctgaacgacctctgccatgagatggataagacccgcctgaccacgctggcctgctatgcaatgtgcggccccttcaacccggtggctcacatcaccgatctggtcagctggaacctgtacctcggctggtatgtgccgggcctcttcctgaatgacctctggatggactttttccatctctgctacccgaagcgcgcactgggcttcagcgaatacggcgccgagggcatgcccaacctgcacagtgagcatccccgccgcggcgaccataccgaggaatatcaggcaatctaccatgagtacatgctgcgctgctttgaacgccacagctggctgtggtcgacccatgtatggaacatgtacgactttgctgcagacgcccgcgatcagggcggcgagccgggcatgaaccacaagggtcttgtcacctttgaccgcaagaccaagaaggacagcttctatatctacaaggcatggtggagcgatgagccgtttgtgcatatctgctccaaacgctttgcggaccgcacccagagcgagatcgaggtcaaggtctactcaaaccagaagcaggtaagcctttatgtcaacggcgaaaagctggatgagcaggcaggcgagcatatcttcaaattccgcgtcaagctggacggcgagacgaaggttcaggccgtggcaggggattgcattgatgatgcggtattccgcaaggtcgagaccccgaaccccgcctacaagctgggcaaggcaaaatcctccagcgcaaactgggtataaaaggccgccgggggcggcaacgccataacaaataccgataaaggagcagcccatgagcgaaaatgcaaaggcgtcgaatgtcaaccgcgccaaactctaccagctggtactgtttccgctgaacaacggtgccaccaatgtctattatgtcctggtgctttcctacattgctaccttcggcagcaatgtactggcgctgggcaccctgtttgcctcggtcatggtcacggccatgcgtctgtgcgatgccatcaccgacccgatcatcggcgcgctgatggaccgcacaaacggcaaattcggtaagttccgtccgtttatggccatcggcaatatcatcatggccgtcagcatcctgattttgtacggcatcacccccatgatccctgataccatgatgtgggcgcgctatgccgcgtttgtggggctgtacttcgtctgggtcatcggctacacattccagaccagctgcacccgctccggccagactgtgctgacgaacgacccgaagcagcgcccactcttcacgatctttaacacggtcggctccctgctgggcatgggcgtcatgcagttcctcgcgccgattttggccaaaagctatgagggcggctactcctccgcagggttcttccgcacgctggccccggtcggcatcgccatgtccgttgtgctgaccatccttgccatcatcggcatctgggagaaggaccagcccaagtatttcggcatcggcggcgaaaagccccagaaggtcaaggtcggcgaatatatccagatcatcagggaaaacaagcccatgcagcggctgatgatcgcgggtgccggcaccaagctggcgctctccatcgccaacaacacaacggttctctgcatgctgtacggctgcatgatgggcgcttacgatgggctgtatctgcccatgatggtgctgggctatctgttcagtgtgccgttcttcctgctctctgtgcgcaccagccagaagaagggccagaaggcaagcctgacaaagtatgtcggcgtggcgctggcctgctatgtcggcgtgctggtcctgctgctgctgtggggccacggcgatgcattccacctcagcctgctgggggagaatggcctgtccatcaatctgtacacggttttgttcatcctcttcttcggcatcggctacggtgcatactacgccactgccgatatgcctatcccgatggttgccgactgctccgattacgaaacctaccgctccggcaagtatatccccggcatcatgggtacgctgttcagccttgttgataagctggtgtccagtctggctgctacggtcgtcggcatcgctgtgaccttcatcggcctgaacaacctgcccacccagtatgactcctacacaccgggcatgaatgtcgttgtcatcgtcctgttctgcgtcatcccgatggtcgcatgggcggccaccctcatcgccatgaagggctacgccctgaccggtgagaagatgaaggagatccaggctgtcaacgcctgccgccgcgatgccgttgcaaacggtatggcgctggaggctgccatggagaagtggcagacccttgaccagctgcccgaaagctaccgcgcctgatttgccattttcttttctcttcataaacagccctgcgcccccagaggaaaacctccgggggcgcagggcgttttttggcaattcgtgaataaaactttcgcagaaggcttgacttttgggtgcgaattgtggtattatatctctcgcagtcaatgcgatttgagcggaagtgctggaatcggcagacaggcacgtttgaggtgcgtgtgtctatgacgtgtgggttcaagtcccatcttccgcaccaagaaaagtcctacagtttttcgctgtaggacttttcttttttatttttatataaagaaatgaggggtgccgcaatgcaaaacctgctgtttagcctgaatgccaccatgccggtgttctttgtcatggtggtggggtatctgctggggcagacaggctttttgccgtctgcattctgcaaggcggcggataagctctgctttaaggtcacgctgcctgccatgctgtttctcgacatgggcagcgtggatattctgcatgatttccagcccggatttgtgctgttctgctttgcggctacgcttgtcggcattctggccgtctgggcaggggctaagcacttcctgaaggacaaggctctggtgggggagtttgtgcaggcgggctaccgcagcagcgccgccgtgctgggcgtggcgtttatccagaatatctacggcaatgcgggcatggccccgctgatgattctgggcagcgtgccgctgttcaacatttttgccgtgcttatcttaatgatggaatcccccttgcagcgcagcacacccagtgtaaggcagctgctgcgcggggttgccaccaacccgatcctgctgggcatcctttttggcacagtctatgcgctgctgccgttcacgctgccccagatggtcaccaagaccatgagcagccttgcgtccctcaccacgccgctgtcgcttttgtcgatcggcgcatcgtttgagggcacaaaggccatccaaaagctcggccccacggtggcggcggccttcatcaagacggtcggtctggcggcggtgtttctgccctgtgcagtagcgctcggcttccggaatgaagaactcgttgcgctgctcattatgctgggcagccccacgacccccagcgcctatgtcatgagcaagaatatgggccacgagggcgtgctgacatccagctgcatcgccctgacaacgctgctttccgccctgacgctgacgggctggatcttcctgctgcgctgcgggggatacctgtaatcattcctccggcactgccaccggcacgccgcgatgctccaccggggtcgaaaagacgatctgggtgcgggtgcggccgaactgctgcagatggttgatgaactggtccagctcctgtgttgtgctgaacagcacctcgatcagcatactgtaatcgccggtgacgcagttgcactccaccacatgggggcagttttggatataagggtaaaactccggcttgcgctgggggtccatatccagattgatgaaggccttgaccatgtaccccagcttgggggcatcgacctgcgcctgatagccggagatagtccccgagctttcgagccgggcgatgcgggctgacacagcagggctggacaaaaacacatggtcggcgatctccttgagcggggagcgggcattattttgcagaatgtcgatgattttgcggtcgatgtgatccatagcagtacctcattttaggcaaaaagctcccgtccgtgtgcgtcattgcacctgaacgagagcttttgtagctttactatgtgaagtattctaccacggaaaatcaaaaaagtaaagtggtttgcgaaataaatttaattatatatccgggaacacattccgtgcgctgatcagggcgttgttgtaatacatttcaaaatggcagtggttgccggtggcggtgccagtcgcccccacgtagccgatcagctggcccttcgtcacagtctgcccggactgcaccacaaaggacgacatgtggccgtacagcgtcttgtagccgttgccgtggtcaatctccacataatagccccagctcgcggtagggtgattgtgccactgggcagcgatgaccgtgcccgcgtcggcggcgtaaatcggcgtgccgtagggcgcggtgatgtccaccccgcggtggccatagggtagattagcccatcggctgatgcccgtataccccggcaccggccaaaggaatgtgccggtgcccagcttgccaatcatgccgtccttcagccgggtgccgcggtgtacgatctgcggcacggcgggctgcaaaagctgcacatccacggcctgcacggccacgaccgttccgtctatctcggtgatctcgcttgtgacctgctcggctccgtcctgcccgccctgtacggtctcggtcttgccaaagtccagcgcggggtcctcaacggtctgtgtttcaaagggcagcgcctttgtcacagtctcataccgcacgaccttgacctgcagcaggccgtccccgcgctgcagtgcctctatcagatcagggtagggtgtgaccgctgcagcagggtagatgccgtccaccatgcgcagcccatgcacaaaggctgtctgcacaccctcacgctgctgggggcggcgcagcgcatagaggaactgtcgcaggtggtcaccctcggtggtgatgaactgcagcgcgccgtctatgtagacggcggtcccctcggtgatctccccgccggaggcgcgcaggatggcatcggcaatttcccgctcggtcagggtgggggtatctgcgccgccccggacaagggtgtactccggctgtatctgccagtcggccaccccgttgatgcgggcctgcacatcggcgcgcgctgcctcaaaggctgcttcaccggccacatagcccagcgggtctgtgcggctgccgttcacccgcagttcaagatgcaggtgatacccgccgccggcgccgtagacattgccggtgttgcccacatagcccagcagatcgccgcgccgcacggcggtgccctccgccacggcaatgctgctcatgtgggcatacaggctgtcgtagcggcagccgtcatccgctgtgccgtggctgacctgtacgcagttgccgtagctgttcatcgcccgcgcagcgctgacgatgccgtctgcaatggcgtagatcggtgtaccgcccggcgcggcaaagtcggtgcctctgtgggggatgccccatgggtccgcctcgccgaactgtgttgtgatgcgcccgtagctgtccagcgggcaacggaaatcaagacttgtcagccgcagctctgccgtcgtgtagcggcggctttgcgcccgcacataggcatcaagcgcggcagtggcctcctcgtaggctttttttgcggcatcggtcacggtggtctgggcctgtgcggcggcctgctgggcggtcagcgtgctgttggcgtccagcagggcggcttccagctggctctgcgcggtgtgcagggcagtctgctggccctccagccctgctcttgcgtcctcagcgcggcgggcggcgtcctcggcctcggcgcgggcctgctccagtgcggcggcctcggcgtcaagctcggccagcacggcactgtttttggcgctcatctggcgcagcacggtgtcaaaggtcagcagctggtacaggcttttggcctgtgtcagcagccagagcaccccgccgccgtccagccgctgcattgcgcgcagctgctccttgcagacggcaaggcgtgcctcgtactccgcctgcttggcgtcccgggcagcccgtgcggcttccgcatcagacaaacgcgcgtccagctctgtctgtgcctgctgcacggcagcggtcaccgcctcaatctgccccgccagctcggcggcctgtccgttcagcgactggatctcgctctcggtctgggcctgctgcgcctgtagcgcggccagtgcggactgtgcagcctcatactcctgccgggtctcggtctgcttttgcgtcaattcgccctttttgtctgccgcctgtgcggcaaaacccgaaaaaagggtataaaaaagcagccccgccgccaatacagcggcggggaagtacctgtatttcatcttattactccgctaatagggcagtcccggtcaggtctgcaggcgcgccgtcctgccgtgcctcaaagtgcaggtgcggcccggtggaattgccggtgctgcccacatatcccaagacctggccctgaaccacggactgcccggcagagacgagcagcgacttcatgtgctgatactctgtttccagcccgccgccgtggtcaaggacgacatagttgcccttttcaacatcgtagtcggcggcggtcacgacaccaccggcaacggcgtaaacctccgcgccctcctcggcggcaaagtcaatgccggggtggccgttttcggggtcatagccgctgacctgcggcgggggatcgaccggcagggtgaagagatccacgccggaaagggcggcggcttcatcaacggcagtcacctggtcggaagcggcacggcgcacggcctcggccaggatttcgtctgccttttcctgcgtcagctcggcggcatcgctgccgccgtaggcggtaaaatagcgcggctccgtaaggatgtcgtttgccatcatctcaaaatggcactggttgccggttgtgttgcctgtgtgccccagatacccgatgacctgcccggcagtgacggtctggcccggctgtacgatgcacttctgcatgtgggcgtacaatgtggcccagcgcagaccgtcggcgtcggtaccgtggtcgatctccacaaaattgccccagctgtaatgctcctgcgcggccagcacaacaccgtccgcggcggcgtaaatctcggtgccctcggcagcgcacaggtcgtcgccccggtggctgttctcggtggcaaagcgggaaatatatttgtacttgaccgggcagacaaagcgcgggctgttcgcggcatcgctcaatgtcggcagggcagagggctgcaccgccggtgcgggcgcttcggctggctgggcggtctcggcggtggctgggctttccggtgcggctgttgtggtctcgggctgtgcggacagctccggccggaccatacaggcggcaaagcagaggccgaccacggctatgcagaccgccagtgcccccgcgcccaggcggcggtagtgcagcagatgcacgatgcgcccctttacgctgccctgcccgaaggtcaggctgcccggcacccgctgcccctgtacagcaaactgcagcagcgtttcgcagtaggcgctgcgctcgggcagggggcggtcctgtacggcggcctcatcacaggcggcctccatgtcgtgctcaaaaccgcggaacgccagccatgccagcgggttgaaccagtgcagacagactgcggcataaaacagcggcttggttagcgggtcaccgcggcggatgtgggtctgctcatgcagcagcacggcctgccgggccgcgccccgcagactgtccggcagatagatgcgcgggcgcaggatgcccagcgtgaacggtgcagccacacaggccccgccgtagcagccgtccggtgccttgcaggccagcgcaacgctgcggcgtagccgccaatagcctgcaaggccgcgcagcgccagcaccagcacaccggccagccagactgccgcaagtatatgccagagggtcagccgggtgtaccacggcagcgcgaccacggcggcgggtgctgccggtgccaaatccggaagcggcagcgcacccagctcctgtacggtgtcggcggcggcagccagcggggcgctttgcgggcggggcagccgcagcggaatgccccacggcagcacgaaccgtacccccacggccagccacagccagcacagcagacggctgggggcgtgggcgcggcgcagcacccggcaaacgcaccagactgccgctgcggccaccgcgccgcgtgcgctgagcagtaaaaaggaaagtacgatactgcgcataactacccctccttttgttgggcggcgtccagcagagcgcgaatctcggcagcctcggcctcactgatcggctttgagttgaggaaggcggccacaaagcacggcaggctgccgccgaaggtcttgtccaccacggcggcactctcggcctgctggacatcctcccgccggatcaggcttgtcacctgaccgtctgaattttgcagtacaccgcgctcgcagagcttcttcaagacggtgtaggtggtgctttttttccagcccagcgcggcggcggccagcgtaacaagctgcccgctgggcagcggctcattgtcccacacaaggcaggcaaagcggtattcgccatcggcaaggcggagcggttcatggttcagcatggggtaactcctttggtttactgtagtagacctatctttatttacagtctactacaatagaccaaaaatgtcaacaaaaattcccctatggtgagaaactgcggagaaaaagcaaaaccggataccgtgcgcggggctgaataaccccgcacacggtatccggttttgtgtgactgcagcgtccgcaaagataagaaaaaggctacatccaaaaccggatgtagcctttaccatggcggaaagaaagggattcgaacccttgagggctttaggggccctacacgatttccagtcgtgcgccttagaccagctcagccatctttccatattcttttgcgcagcgcctgactgcatgagctattataacaatgtgcgcgggaaatgtcaagcattattttgcggttttttaaaagtttttcgcggctgtgggcggcatgggcaaattgtatgcaaattgtgcgctcaaactgcatattttgcgcgttttatcctcttgcaaacggcggcgtatagtgctaaaactataagggcgtcatcgcgctcggcgtatcggcagcgggcattatgcggtcatgccggagagaattaccatgctgtaaggagagaggatagttcatgtattccatttttcgcgatttggcgatcattatcctgagcgcaaagttttttgcgctggtcgcccgtaaatgcaaggccccgcaggtcgtgggtgagatccttgccggcctgcttatcggaccctgccttttgaatctggtgcagaccagtgatgcaatctcgacctttgcggagatcggcgttgtgctgctgatgtttacgaccggccttggcacaaacttgaaggagctgctgcgcgcaggccccattgcgaccctcatcgcctgcatcggcgtttttgtgccgctggtgggcggcacgctgctctacagcgcattctatggcttttcggccgtgggcagcccggagttttaccgcgcgctgttcatcggcacgatcatgacggccaccagcgtatctatcacggtggccacgctgcaggagctgggccacctaaaaagcttcctcggcacgaccattgtcagcgcggcggtcattgatgatgtcatcggcatcattgtgctgacctgcgtgctgggcgccagctcgggcgagggtaccggcatcggcggtgtgctgatccagacggcactcttcttcctggttgctgtcggcatcggcgttgtcatccattttgcgatgaagtggctcgacgcccgcaacccccatacccagcgcattaccatcgtcagcattgcgttctgctttgccatggcctacatcgctgagcagtacttcggcattgccgatattaccggcgcgtacattgcgggcatcgttctttgcacgatgcaggacgcaccgtatgttgagcgccgcgttgacatcagcaactatgtcatctttgcccccatcttctttgccagcatcggcttaaagaccgacatcagcggcctgacgccggaaattttcctgttctgcctctgctttgttctggtggccctgctgaccaagattatcggctgcggtctggcggccaaggtctgccgcttcaactggggcgattccttcaaggtcggcgtcggcatgatgacccgcggcgaggtcgccctgatcgtggcccagaaggggctggaggtcaatgtggtcgatcccgtctatttcacggcggtcatcctgctgattgtggtgtccagcgttgctacgccgcttgtgcttaaagcgttgtttgccaagatgccgcctgtggcacatccgagcgaggtgcaggcgtaaaaagcaccccgaaaaccaatttactgcaacaaagaatccggcagacgccccaaaaagcgtctgccggattttctttcattctgcgttgtgcaggtgattatcgacccacttgatgagcagctccagcgcaacgaggttgcgcccgccctcgggcacgatcaggtcagccttgcgcttgctcggctcgacaaactgctcatgcatcggcttgacggtggtcaggtattggcttaccacgctgtccagcgtgcgtccgcgctccttgacatcgcggacgatgcggcgcaggatgcgcacatcggcatcggtgtccacaaagaccttcatgtccatcagctcgcacagctcgggtgcgtcaaagatcaggatgccctcaacgatgatgaccggtgcgggctgcaccagcacggtccggttgctgcggttgaggatggtgtaatcatacaccggcacctgcaccggatgcccggcgcgcagctcccgcaggtgggcgatcatcagcgccgtgtcaaagctgtcggggtggtcgtagttcagcttgcagcgctcctcatagggaagctcgtcatggcgcttatagtagctgtcgtggttgatgacgctgacctcgtcgctgccgaaatgctcccgcagcttttcggtcaaggtggtcttgccgctgccggtgccgccggcaatgccgatgatgatggtattcataagctgctgctccttatacatccagtttgatctcgcgcccggtgggctggtaggcccggcacacaacgccggtcatcttgaacatgcggcggctggccacacaggcgtgggtgtcgtgatatttgtctgaaaggtagatcagctccttgatgccgctctggatgatcgccttggcgcactcattgcagggaaagagcgtcacatacatccgtgagccgcgcaggtcgtgattggggctgttcagaatggcgttcagctccgagtggcagacatacatgtattttgtctcaaggtcatcgccctcgcgctcccagggcatatcatcgtcattgcagccgatgggcatgccgttgtagcccagcgacaggatcttgttctccgggctgacgatgcaggccccgacctgactgttgttgtcctttgaccgcatggcggaaagcagggcaatgcccataaaatactcgtcccagctgatgtagtcctgccgcttcatagatgcaccgtccttttgatttttctttattatactgtgccgtgcgggcctgtgcaagatgattgccgcaaatatttgcggcgggtggcctcgccgccgcgcagatgacgctcggccttgtttttctgcacaacagcctgtacctcggcccaaaggccgggattctggcggcgcaggcggtgctggtccttccagatcgtggatttgcttacgccgaacacggctgccgccgcccgcacggtcgcgccgctctgcacaatataccgccccaccgcagcagcgcgctcctcagggtcgcctttcatagcctgacctcctcgcatagaattttctgtcaaatcctatgtgaaaaagtgcgccgatatgccggaaaagatgggctataaaattgaagggttttagaagatcttatacacccggcagccgccgttttcgtaccacagggggtaacgctgcgcataccacgcctcgtccgcatcggcaaagcggctgtagacggaggaatcgaacacggcgtactgtacgccccagatctgcagggtgacagtgtcgggcgtttcatacagggtgcgcatggcgttgtattcatcggcgtagtccatgccgtggtagtagacatagctgcccgacccgcacaggatctgccgccccgccagtgcaaacaccggcgtcaggtggctgtcactggtcaaaaacagcgcatcgctctcggcgttttcgtcaatatacgctgccagtgcaatgtcatcggcgctccactgctgatagtcgctcagcgcctcccgcccaagggtcagcacgctgccgaacatcgccgtaaagcagcaggccgccagccccagcgcccgccagggcagggcgcgcacctttgcaaacaggtcggccagcagctgggctgccagaatacatcccagcatatgccagacatacagcagcttattgttgtcataattgttgggctggaatacaacgaattccgccagcgctacaatcgccagcccgccgccgtacagccaccgctgctttggtttggcatgtacaaacgccggaatcaacagaagatacacaaggccgatgtttttgatgtagaaccagagatagctgtccttcagggtgccgtcattccggccgttgatccagttgaagtgcagccgcagcatctgctgaccgtccagactttgcgccagcacggtcggcagcatctggaaaagccatgccgcgccgcagactgcggccagccccagccatggcagcagcgtctctttgtgtgcgccctgagtcaatgtgtaaagcccgctcaccagacagagcagcaccagcgccagtgcgctgtgcgtgtgcaaaagcggcagaggcagcaccagtaaagccagccaaagccagaggcggcgttcgccctcatagcagaaccgccacagcagatacagggcgggcagcagcacgcaccagccaaagagggtggcgcgctgcgggatcagcagatctgcgatggggttgacccacacgatgttcttctcaacaaaattggtcggcgttgtgtaaaaaccggtgaagatgcccgcaaaatccgaagcggagccgagaaaatacacaaacccaaacccactgcccataaaaaacagataaaacgcaaggcttgctttgacagcgctgcccgtcacgcggcgggccagctgccagaacatgccgtatactgagagaaaggcgggcagcatcggcagcaggtaagcggtgcgcagatccgcccccagcagaagaaagacactggagaccgtttcgcagaggaacgggtagccaaaccggtgtgcgccgcccagcaggggatagcgcggcggaaattcaccgctctgcgcaatatagcggatgaaccccagatgcatcggcatatcgccgtagcagctctgcccggtgtggagggtaccgttcaccgtgtgcagcacatgggtgtgcagcagaaacagcgtcacggcggccaccggcagcaggcaggcccagcttgccccgcggtcggggtccttcgcagccccacgcagccggggaccgcatcgcagcagcaccccgcccagcactgccgcagcggcacccgccagcccggcggccggcagggtaaagccgaacggcagggcaagcagggcgggcagtgccgccagcagggataccccaagcccgcaccccagcggaaggagaacggcgctgtctgcgtccggtacggcccggcgcgccagcagcagaccgacaaagagaaacaggaacagatagcaaacggatacaatcatgatgcaccctataccccttccagatcaaacggcggggtatactcctcccgggcgctgctcttttcctgcatgtagccatcggtcagccccagccggacggcctcgtcaatgacctgccggtactcataggtcgtgatgcgccgccctaagccgtgctcagccgctttataaaaaggtgtgaactggctcatcaggctcggaataaattccacacccgtctccgcccgcagcgctgccagccgctgcagcaccgcacggctgtccgctacatggccgggcagggccagatgccgcacgatgacgccccgctgcaggtagccgtctgcatcaaagaccggcgccccggtctgcacaagcatctcgcgcagggcggcatctgctgcggcagggtaatcctgtgcgcaggaaagctgtgccgccagcgcgctgtcgcaatacttatagtcggtaagccagatgtccacatacccggccagtgcgcggacagcctcaacggtttcgtagccgccggtgttgtagaccacaggcagggcaaagcccgccgctctggcagcatccagcgcctctgtcacccagggcagatagtgggacgccgtgaccagattcaggtttttggcgccgccgttttgcagctgcataaaaatatcggccagccgctcggcggtgatcgtcttgcctacctcaccttgactgatggggtagttctggcagtagcagcaccgcagggtgcagccgctgaaaaacaccgtgccgctcccggtggcggcattggggtcaccgctcaggcagggctcctcccagtggtgcagggcggcgcgggccacccgcagggtatcatcggccccgcagaagccccgctgccctgcggcgcggtcggccccgcaggcccgggggcaaagggtacagtggtgcggcagctgcatggcaaaaacctctttcacaaaaaacttttctataagtttaccacaaaccgggaaagtgtggtatactatatctaccaatatcccaaaataaaggagtgtgcttttatgtctacccctcataaccgcgcggaaaagggcgatttcgccaagaccgttttgatgcccggcgatccgctgcgcgcaaagttcatcgcggaaacctttctggaggatgttcgcctcgtcaccgatgtgcgcggtatgctcggctacaccggcagctatcagggccgccccatcagcgttatgggcagcggcatgggtatgccgtccatcggtatctattcctatgagctgtacagccagtacggtgtggagaacatcatccgcatcggctctgccggctcgtataccgacaaagccaagctgtttgatgtcgtgctggccaccggcgcgtattccgagagcaactatgccgtgactcagagcggcgataccgaggagatacaggcccccagtgccgcgctgaacgaggccctgcgccgcagcgctgccgcagcaggcatccccctgatcgagggcaatatccattcctccgatgtgttctaccgccagcccagcgacgccagaccgacctactgggagcgcctgcgcgatgaaaagggctgtctggctgtcgagatggagagcttcgcccttttccacaatgcaaaggtgctgggcaagcgggcagcctgcctgctgaccatctcggacagctttgtctcgccggaaatcacgaccgccgagcagcgccagaccagctttactgccatgatgcaggtcgcgctcggcgtggatgcctttttggagaagtaagcatggaaaaagctgagatccggaccctgatccgcgctgcgtttgaagggcaggggtttgcctatgcgccgtattcccgcttccatgtgggggcggcactgcgggccaaggacggccgtgtgttcaagggctgcaacatcgagaatgcaggctataccgctacgaactgtgccgaacgcacggcgctgttcaaggccgtcagcgagggtgtgcgcgagtttgacgccatcgccattgtgggcagcaaggcgggggagaagaacacccttgtcaccggcccctgcggcgtctgccgtcaggcactctatgagttcggcggccccgggctgactgtaatcatggccaaaagcgaggaggattacattgtgacgaccctcggcgagctgctgccctacggctttggcccggccaatctggaatgaccccaaaggcagggaaaccatgcccctgcaaagaaacgaataccaaggagattttcccgtacccatgaagaagttcttagcattgttcctgacgctgaccctgctggcaggcctgactgcctgcaagggcagagaagccatcgccgaagcacaggtggtgcatgtcgtgaccgccccgaccaatgacgctgcctttgtctatgagccggaggacccgacacaggtgctgccgggcgggcagaccatcgcgctggtgaccggccccgccggcacggacagcggcgaggatgccatgctgtggcagggcgtacagacctttgccaatacctaccattacacggccgtaagccagacagcggcgggcagcaccgccgatgatgccgaggcggccctgcgcactgcggccgagagcggtgcaaagcttgtggtctgccgcggcgaggtcatgggtcaggcgctctaccgcatgcaggaaaactacccggatgtgcattacctgctgtttgacgatgagccccataatgacgactacagctcctacaaaacggcaaatctggtccactgcgttctctttcaggaggaacaggcgggctaccttgcgggctatgccgctgtgaccgaagggtataccgcgctgggctttgtcggtacgcgggaggttcccggcattgtgcgctacgccaccggctttttgcagggcgcagaggccgccgccgagcagcagggtgagcgcgtgagcctgcagacatggttcgccgacacggatacagtcaacgatgccatcacgcagcggatgatcgactggtacaataacggaacaacgctgatcatggtcagcggcggtgacctctatgcgggcgctgtcaacgctgtcaaccagaccggcgccaaggcaatcacgacagactgcgaccgcacggatcagggtgaccgtatccttgccagcgccgttaaatgctacaatgcggcagtccagcgcgagctgtacaccttctttacacagggcacatggaatgcccagagcgccggccagaccgagaaggtcggctttaccaacggcgaggtggcgctgcaggccggcagcccgtggcggctggacaactttagtcaggagagctaccgcaagctgtatgaaaagctgcgcaccagcgcgctgcgggtggacacctactccgaccttgacacgctgcccgacacccccaatgtcacgctgatccgcctgcgctgacacagcccgtacagcggctttgttatgcttttgtaatgatttctttagcgttttgtcattgaataaccgccccaaatgcggtatactgaacttattacggcagggaaccgccctgccggacaactgaaaatcaacctaaggagattaaaaccatgaaaaagtttctcgcttttgtaatggctgccagcatggcgctctctctggctgcctgcgtcggttctacccccgcaagctccacggccagcaccacgacggaggctacctctgaggccgctgcttccacttccggcagcaagaccgatgttgctttcgttaccgatgtaggcaacattgatgaccagtcctttaaccagtacacttggcagggcgtgcaggacttctgcagtgccaacagcctgaacgccaactactaccgccccaccgaggactccgacgctgctcgtctggagcagatggacaacgctgtcaacgatggcgctaagtccatcgttgtcgccggctacctgttcggttctgccatcgccgaggcacaggagaagtaccccgatgttcagttcctcgcgctggatgtttccaccgctgatctgggcgacaaggcgcctacctccaacaccgcgctgatcacctacaaggaagagcaggctggttatctggccggttacgctgccgttaccgatggctacaaggagctgggcttcctgggcggcatggccgttcccgcagttatccgttacggctacggctttgtgcagggtgctgacgccgctgccaaggagctgggcgtgaccgatatcaacatcaagtactggtactccggcggctttgctgctaccgatgaggtcaagaacaagatggacggctggtactccgagggtaccgaggtcgtctttgcctgcggcggccccgtctgccagagctgcgacgctgctgcacaggccaacggcggcaagatgatcggcgttgacgttgaccagtccggtcagttcgacaccgttgtcacctccgccatgaagggtctggccgaatctgtcaacgaggccctgaccgatgccctgaacaacggctggaagttcagtgagacctactccggcaaggagaccaagctcggcgctgccgagaactgcgttggcctgccgatgtccaccagcaagttcaccaagttcacgcaggagcagtacgacactatgtatgctgccattgtggacggctctctggtcattgacgacagctttgacgccgatgtacatcccgccgtcaccaatgtgactgttgactatcagagctgatagcttaaaagtatgacttttgaccgccccgtgccttaccgcatggggcggtttttgcgtataagggcagggctgtccgcgatttgacaggcaaagcggatggaatgaccataatgtgacaactttttgtgcaaaatctcttgtacaaaaatgaaattttctgtataatatagagtactaaattgtgtacaagcctgtacacatcgaaaggggcgtgcaacggttgacagagaattatgtcatcgaaatgctgcacatcaccaaggaatttcccggcatcaaagcgaatgacgatatcaccctgcagctgcgcaagggcgagatccatgccctgttgggcgaaaacggcgccggtaaatccaccttgatgagtgtgctgttcggcctgtaccagccggaaaagggtgttatcaagaaaaacgggcaggaggtcaagatcaacaacccgaatgacgccaatgcgctgggcatcggcatggtgcatcagcactttaagctggtggaatgcttcaccgtgctggataacatcatcctcggcgtagaggacacaaagcacggcttcctgcagaaggacgaggcccgcaaaaaggtcatggcgctgagtgagaaatacggcctgaaggtcgaccccgatgcgcttgtcagcgatatttcagtcggcatgcagcagcgtgtcgagatcctgaaaatgctctaccgcgacaacgaaatcctgatttttgatgagcctacggctgttttgaccccgcaggagatcgatgagcttatggagatcatgcgcggcttcaaggcggagggcaagagcatcctcttcatcacccacaagcttaacgagatcatggccgtgtcggaccgctgcagcgtcctgcgcaagggcaagtatatcggtacagtcgatattaaggacaccaccaaggaagagctgtccaagatgatggtcggccgcgatgtgcagtttgccgttgagaaaaagcccagcgagccgggcaagccgatcctcgaggtggaaaacctcgttgtgcccagcaaggtacacaagaataacgccgtgcgcggcgtcagcttcaatgtccgcgcgggcgagatcgtctgtattgccggtattgacggcaacggtcagagcgagctgatctacggcatcacgggactcgaaaagccgaccggcggaacgatcaggctggagggcagggtcatcacgaatgcacccatccgtgagcgctccaaggccggcatgagccatatccccgaggaccgccataagcacggtctggtgctggactacacgctggctgacaatatggtcctgcagcgctactggcagccggagttccagaaccacggttttattaagaagggggccgtccttgactatgccgagaggctcatcaagcagtacgatgtgcgcagcggtcagggtcctgccaccatcgcccgcagtatgtcgggcggcaaccagcagaaggccatcatcgcccgcgaggtcgataaggagccggagctgcttgtggcggtccagcccacccgcggcttggatgtcggcgccattgagtatatccacaagcagatcgtggccgagcgcgacaggggccgtgcggtgctgctcgtcagcctggagctggacgaggtcatgaacctgtccgaccgtattctggtgatttatgagggtgagcttgtgggcgagtttgacccgcgcaagaccaccgtggaagagctgggcctgtatatggccggcgcgaaaaagcagggggaggcgaaagcatgagcaaacagaataaacagccgcttctgcagcggcccgccgtcatcggcgtgctggcaagcctgctgtccatcgtcatcggtctggtgctgggctttgtgctgctggtcgtgctgaaccccggcgcgtccgtgggcggcatgaaggcaatgctgacgaccggcttttccaacatggacaagctgggcaaggtgctgtatcaggcagcgccgctgatgatgtgcggcctgtcggtcggctttgccttcaagaccggcctgttcaacatcggcgcatccggtcagtatacgatgggtgcattctttgcactgctgtgcgccattcagttccagatgccgtggttcgtctgcctgctggcgggcgcagtcggcggtgcgatctggggcatcttcccgggcctgttcaaagcgtacttcaatgtcaacgaggtcatcaccgccatcatgttcaactggatcggcatgtaccttgtgaacctgctgctggccaacacccccactatgctggcatctgcctggggtgcgtccaactcggaccgcacggcggcgctgtccgctgcaaaccccggggctattctgcccaaggggccgtttgccgcactgttcggcaattcgagctggatcaacatttccatcatcattacgattgtttttgctgtcctcgtctgggtcgtcctgcaaaagaccaccttcggctatgagctgaaggcctgcggcctcagccgggatgccgcccagtatgcaggcatcaattccaagcgcaacatcgtgctttcgatggtcatttccggcgcgctgtccggcatcggcggcggcatctactatctggccggtacgggccagtatgtgctggaaaaatccattctgggcatgggcttcaatggcattcccgtagcgctgctggccagctccaaccccatcggcacgattttctcggcacttttcatcagctatattcaggtcggcggcgcggccatgcagcccgcctactcctcggagaccattgacatcgtgatcgctgtcatcatctatctggcggccttcgccctgctgatgcgcggcgtgatcgccaaggcggtctccggccgcaaagagaaagggggcgctgccaaatgatgatcgctgccaacattatcagcctgaccatcctgtttgcggtgccgctgctgcttgtggcgctgggcggtatgttcagtgagcattccggcgttatcaacatcgcgcttgagggcatgatgatcatcggcgcgctgttcgcctgctttaccctgcaggggctggaccaaagcggcttcggccctgcacacccgcagctctcgatgttcattgccattctggtggccggtgccaccggtatgatcttctcgctgctgctgggctttgcagccatcaatctgaaggctgaccagaccatcggcggcacggcgctgaaccagtttgcgcctgcctttgcggtcgttatgacatgggctgtgcagggccagggcctgaccaccatctcgatccccagctgggtgcgcatcacccgcgataccttcggcctcgccccggtggacggccccagcttctggaataacctcatcttcaagtatttctacctgacgaccccggttgccatcgttctgttcatcgcagcctatattgtgatgtacaagacccgcttcggcctgcgtctgcgcgcctgcggcgagcatcctcaggcggcggattctgtgggcatcaatgtctacaggatgcgctacgccggtgtgctgatctccggcttcctcggcggtgtcggcggtctggcctacacggtggcggccggctccggcttcaactccgatgtcggcggctacggctttctggcgctggctgtcatgatcttcggcaactggaaaccgctgccgattctggcgtcctcggtgttcttcgcgctgttcaaggtcattgcggcctactcgtcgtcgctgtccttcctgccgaagtttgagggtgtcaaggagatctccaacttctaccagatgctgccgtatatcgtcacgatgatcgtgctgatttttacctccaaaaactctcaggcccccaaggccgagggcatcccctacgataagggcagccgctgatacaaacgatacacaggccgcccgacgcctacagccgggcggcctgtgcttttttgaaggagacaagcttatgcgaatgtatgatattatcgccaaaaaacgcgatggcggcacgctgaaccgtgaggagctttcctttgcggtcaacggctatgtggccggggatgtgcccgactaccagatgtcggcgctgctcatggctatctatctgcgcggcatgaccgatgaggagaccgccgtgctgactgatgttatggcccgctccggcgatatggtcgatctgtccgctatcgcgggcatcaaggcggacaagcactccaccggcggcgtgggggacaagactacgctcgtcattgcgcccatcgtggcggcctgcggcgtcaagatcgccaagatgagcgggcgcgggctgggccacaccggcggcaccatcgacaagatggaggctgtgcccggcacccgcaccagcctgacgcaggaggagtttttcaagcaggtcaacgagatcggtatttcggtcatcggacagagcggtaagatcgctgcggctgacaaaaagatctacgccctgcgcgatgtgaccgccacggtcggctgtatcccgctgatcgcatcctccatcatgtccaaaaagctcgcggccggttcagacgccattttgcttgatgtgacgatgggggacggcgccttcatgaaggatctggacagcgcccttgagttggcgcgccagatggttgcgattggcacggcgcacggccgcagggttgctgcgctgatcaccgatatggacaagccgctgggcagaaatatcggcaactcgcttgaagtagcggagagcatggccgtcctgcagggcaggggcccggctgacctgaccgaggtatgcctgcagctggccggcaatatgctggtgctggccggcaagggcgacatgcccgcctgccgtaagctggctgagagcgttatcgccgatggctccgcctttgaaaaatgctgccagatgtttgccgcgcagggcggtgacatcagcgtgctgcgggatgccgacaaattccgcaaggcgaaattcagctatgagctgaccgcccccgccgatggatacatttacaaaaatgatgttgagcgcatcggcaatgccagcgtcctgctgggtgcgggccgcatcaagaaggaggacagcatcgactttgccgcaggcatcacgatgcacaaaaagctgggcgatcatgtcagcgcaggggagagcatctgcaccctctacgccgatgatgaggctctgtttgcccccgctgaggagatgtaccgcggcggtctggtaatccgcgatgagaagccggttctcccgccgctgatctacgcaagggtgaccagcgatggggtagagcggttctgattcatagccataggagagggctgaacccccgcctgtgcaaacaaaacggttcctgccgcgtttttgtgcgctgcaggaaccgttttttgttattgctttctttgtttcagccagaacaccttgaattttccgtagccgttcggcttgtccgcgtcaaattcctcggttttcacataccgcttaaaggcaccgtcaaactgcagagcgctgccgttttcctgtatatcggtcaggcggcggggaatggcggcgcgctggctgtcaaattccggttctctgtcccacagaatattgccgtctgcgtcaaagccgtgggcccatacgctgaacacaaggcaggcggcctcgccgtagcagtaccgctcaaagcggatgcgcccgtccagatagaacagcaggcaatcacggaagtgggtctcaagttctttttcatagcggcgtccgcatccggacccggcaaaatcggcagcgttggcagtcatcgtgtgcccctcctgtaataagatggaactattataccgcaagctccggcgtttcgcaaggcaggtttgcagcggctgtctgtcggccttcgcggacgctccgcagcgatggggattttttcatttcccacaaaaaatcatctggattttagtggatttttttggtataaccctgtataatatttattatacataggtaaagggggcagtgtgcccatgaaagaattgaatctgcctgccgtgaccgccattgtggtggctgcgggggcgtcccgccggatgggatttgacaagctcagcttccgcctgccggacggccgcaccgttttgcagacaagctgcgacgccttggcggcgcatccggcagtcaccgggcttgtgctggtctgcggcggcaaccggacggagtgtgaggccattgcggcccgctgcacaaagccctgcacagtcgtgcagggcggtgcgacccgcgccgacagtgtgcgcagcggccttgctgcggcggagggggagttggttgccattcatgatgctgcccgccccttcgtcagcgaggcggtcatcaatgccgcgctgacggctgcggcagcggacggcgcggcggcacccgccgtgcctgtcaaggataccatcaagatcgcggacggggcaggccgtgtagccgcaacgcccgaccgcgcatcgctctatgccgtgcagacgccgcagtgcttccgccgcagcctgtatctgcaggcgctgtcggcagttaccggcgaaaaggcaagccttgtcaccgatgattgcagcctgtttgagctggcgggcctgcccgttaccctgaccgagggcgattacgccaactacaagattaccaccaaagaggatctacaaaaggagaaaaccatgcgcattggccacggatatgatgttcaccgcttagtagaggaccgcaagctcattctgggcggcgttgagatcccgtttgaaaagggcctgctgggtcattccgatgccgatgtgctgctgcacgcggtcatggatgccgtgctgggtgcggcggcgctgggggacatcggtcagcatttccccgacaacgaccccgcctacaagggcgcggactcgctgcagctgacccgcgaggtggcaaagatcatcgccgcccacggctataaggtcggcaacattgatgcaacgatcctttgccagcgcccgaagctggccccccacatccccgcaatgcgcgagaagattgccgatgccttcggtctgccggtggacgccgtcagcgtcaaggccacgaccgaggagcatctcggctttaccggcgagggccttggcatttccgcccacgccgttgcactgattgagtgaaaccatcatcctgacccggaaagggggacgcggcaaccatgctgcccaaccagacgctcaacgctattttaagcagtttgcgcacctttgacccgctgtccgacacgctggacatcctgatcatatcgtttgtgttttaccagcttttgcagttcgcccgcaaatcccgtgcgggccagcttgtcaagggcatccttctgattctggtgttctacggtctggctgttatgctgaacctcaagaccgtcacatgggcgctgaacaatgtcattaccatcggctttatggctgcggtggtcatctttcagccggagctgcgccgcacgctggagcggatgggccaaagcacgatgtgggccaacctgatgctcggcaatcggcgcagcgacccctcgctgcgcggtgcatggcagagcgctgtcgttgcgatctgcgatgcggcagagcagctttcggacacccgcacgggcgcccttatggtgcttgagcgcaacaacaatctggacgagatcatccgcaccggcacgccgatgcacgccgatgtgatccccgaaatgctgggaacgatcttctatgagggtacgcccctgcatgacggtgccgttgtgattcgggacggtgtgatcgttgcggccggctgtgtgctgccgctgtccaacaatcttgagatgggcaaggatatgggtacccgccaccgcgccggtcttggcatgagtgagaactccgatgccatcgttgtcattgtcagtgaggagaccggcattatctcaatggccaaaaacggtgtcctgatacgccgtctggaccgtcagaacctgttcaatctgctgcaggaggagatcgttccccctgaggaggccgaggccgaaaaagcctcgccgctgcaaaagctgctgcgcaagggaggtgtactgaaccatgccaagcccgaataagcccgccgccccggggccaatgggggcagtgcccaagggaccgcgcaccttctggaacaactcggtttttatgatggtgctggcgctcatcatgggctttgcaacctggaccattgtgacggtctacatcgacccccaaggctccaagaccgtgaccaaggtgcccatcaactacaccagcggcgcctccgcctatacttctcaggggctggacatcgtggaaaagcctgacatcgagggcgttaccgtcaaggtcgagggcaacggcacgattatcggcaacatccagaactccgacatcatggtctatcccagttatgccggcgtcagcggcccgggcaaggtgacgctgcgcctgcaggcccgcgtgaccaacacgaccgacttccccggggacatcgagtgtacggtcgaaagccccgataccattgatgttgtctttgacgaggtgagcgaaaagaccatcccggtcacggtggatgcctccgccgtgccgatctccaacggctatatgctcaataagaccaccgccgtgcccgccgagatcacattgcgcggccccacgagcgaactggatcaggtgtccagcatcgtggcccctgtgcagatcgacggcgagctggccgataccacgaccgtgcccgcaaccctgcagctgcgggatgaggtcggcaatgtctttacgccgcagtatatctcgatggagagtgactccgccaatgtgacactgaccgtttatcaggtgcgggagctgccgctcaaggtggatttcatcggcacgccgaacggctttgatgtggaaagcctgcattattcgctcagccagcagacgctgcgcgtggcaggcccggcccgcaccatcagtacgctggaagctctgaccgtcaccgattttgatcttgcccgcgagtttgagccgggccgcgactaccagcgtctgatcgagttgccggcaggcatcgtttcgctggacggtgtgaccaatgtgacgctggactttgacacctccgagatgggctccaccaagctgaatgtatcgaacatccgcgccatcaatgtacccagcaactatgagctgcagatactctccagccttgtcagcggcgtcacgctctacggcccggcggatgagatcgaaaagctgaacgccgacagcattgtggcgcagatcgactgccagagcctgaacctgacagtgggccagcagacgattgccgtcagcatccagatcccgtccgcgacccgcatctttgccaccggcagctataccgtccagtgcgaggtcacatcgaaataaatactgctctgtaggggcgaccattggtcgcccgccaacttggcgcagcaacgcgctttccaagaaagctttttacagaccaaaacgggcagaggcgagcaatgctcgcccctgcaaccaccacagcaagggaaaatacatctatgcttctagtccgcaatatccgcctgccgctgacctgccccgacccggacgccgaggcggcggccaaggctttggccattctccgcgtgcccgcccgcaaggcggcgcactgcggtgtggcaaagctcagcgtggacgcccggcacggtgcgccggtgcttgtctacaccatcgcagtcacactcaaggacgagggtgaggaatcggcactggccggggcctcgccctgcgtctgtttcacacagccgcctgcctttacctttccccggggcaaaatgccgctggcacaccgcccggtggtcgtgggccttggcccggcgggcctctttgccgcgctgctgctggcccgcagcggctaccgcccgctggtgctggagcgcggccccgcccttgatgagcgtatccgcgcggtcagccattttgaaaagaccggtgagctggatccgaatgctaacatccagtttggcgagggcggcgcggggaccttctcggacggaaaactgaccacccgtgttggtgacccgctgtgtgcctttgtgacgggggcattcctcgaccacggcgcgccggcagatattgcctggcgacagaagccgcatgtcggcaccgaccttctgcgggatgtgatccgcagcattcgtggggagatagagtctctgggcggggaggtgcggttcaacacggcgctgaccggcctgcagatccgaaacggtgccttgaccggcattgacaccacggcaggcagcgttgcctgtgagcagcttatccttgccgtggggcacagcgcccgggatacctttgccatgctgcatgagctgggcctgccgcttgcgtgcaagcccttctcggtcggcttccgggccgagcatctgcagacagagatcgacaaaagcctgtaccacggtgcggcagggcacccggcactgccgaagggcgagtaccagctcagccagcatgtcagcggcgggcgctgcgtctataccttctgcatgtgcccgggcggcacggtctgcgccgccgccagtgaggagggcggcgttgtcactaacggcatgagcctgcacgcccgcgatggcaaaaacgccaatgcggcggtggtcgtcagcgtggacggcagtgactttgacaacgacccggttaaggcggtggcgttccagcgtcagcttgagcaggccgcttaccgcgcgggcggcggggaataccgcgccccggcgcagacggtcggcagctttttggcagggggcagcgcattggcgctggaccgtgtggagccgacctacccccggggtgtgacgccctgcgatctcggcagcctgctccccgccgagttgagcggtgccctgcgcgagggtctgacggcctttggccgcaagctggcagcctaccgcgcccccgatgccgtgctgacgggtcttgagacccgcaccagcagcccggtgcgccttgaacgcggcaaagaggacctgcagtgtaccggcctgaccggcctttacccctgcggtgagggtgccggttatgcaggcggcatcatgaccgctgccgtggacggtgtgcgctgcgccgccgagctgatgaagaattgggcacctgcagaatgacccgagacggcggtcagtcctctgaccgccgcacggcagcagacgataaaaacaaacagatgggacaaaccatgccagacaacaaacacaattacgaatataactacgaccttggcgatgtgatcgacaatgcagtcgagatgggcagcaggatcggctcctccgtgttgggcagcattgccgatgcgctggagcaggcgggcgatgccatgggcgtgaaacagccggacagcttctccgcgtggaagcgccgcttggagcgcaagtggaaaaacggcggccagtctgtcggcgttgcgctgacggcggtcggctggacctttacaggctgctttggcatcacggcgcttgtgctgggcatcctgacggcggtcggcgcagggccgctgggactttccccgcaggattttatagctctgccgattctgacggccgtgtttacccccgcaacgctcggctttctctttatggctatcgtgggcatgaaaaagctgacctatttcagccgcctgcgtaagctgctgcgcgctgccaatgactggacctgcgacctgcccgcgctggcccgcaaggcgcagatcaagcaggaaaatgcctatgaaaccgttgcaaaggctgtggcgaacggggatcttcccaacgccgccatttccgatgattacagcaccctctatctggatgattcgctcctgccgtccgcaccggagcccgctgccgcaccgcagacggcatcggctgcgccgctgacagaggccgagcagttccaacgcgaaggtgtggattttctgaactatttaaaggcttgctgcggcagactgagcagcgatgccgatgaagaattggtgcagatgcgcaagatctgcgcgtccattcttggctttgtgcataaccaccccgagcagcttggccgggtgcgccgcttccgcgaatattacctgcctacgacccgcaagctgctcgatacagcgcaaggtcttggcgatacggacaccgccaatgccgcggaaatacgccgcgacattaccggcattttgcacacgctgaatcaggcgtatgcaaagctgtatgatacgctgctgcaggatgtgagcatggatgtttcgaccgagatcgacacgctggaaacaatgctgcggcaggacggcctgacccatgattttgaatctgattttaacacaaggagctaaactgtatgaattaccctgcgtggcaactgaaaaagggcgatcccgccgccgaaacctcgctggcgggtgccgggtgcggcgtactgctgcgccgggtgctggccgcccgcggctgtaccgagcccgccgctgcgcaggcaatgctggggcagggcgaggggctcagtgatccgtttctgctcaaggatatggacaaagcagtcgcccgcatcgaacaggccgttgaaaatgaggagctcatggtcatctacggtgactatgatgtggatggtatttcggcaacggctattttgtacgaatgtctcaccagtcagggggcgcatgtgcgctgcaagctgcccacgcgcggctccggctacggcctgacccgcgctgcgcttgaatcgctggcacagaagggcttcaagctggtcgtgacggtggacaacggcatctctgccgtggaggaggctgcctgcgccagagagctggggctggaccttatcatcaccgatcaccatctgccgggcgatacgctgcccgatgccgttgccgtggtggaccccaagcgggccgacgatgaaagcccgtttaaggatctgtgcggtgcgggcgttgcctttaagctctgcgccgcgctggagggctgcgaccctgccgaacttttggagatgtacggcgagcttgccgcgcttggcacggtagccgatgtcatgccgctggtgggggaaaaccgcaccatcgtccgggagggactggaccttctgcaggatacgatgcgccccggcctgcacgccctgctggaaagcgccggctgtgccggaaagccggtcacggcggatacggtaagctacagtctggccccgcgcctgaacgcggcgggccgcatggataatgctgccgtggcgctcaagctgctgctctgcggggacgaggagcaggcgaccggcattgcggaccgtctggcagagatcaacaccgagcgtcagcagaccgagcagcaggtgtttgccgccgcgttggagacgctggaaaaagaccccgcccgcacccgggaccgggtgcttgtcgtcagcggtgaggactggcaccccggtgtcatcggcatcgtggccgcgcgccttatggagcggttcggccgcccggtcatcgttatttcgatgcatgagggcgaggggcgcggcagcggccgtgcccctgacccgtttgatctgcacagcgcgctggcagggtgcgcacagtatctgacccgtttcggcggccatgcggcagcagccggtgtcgaaattgaggaggacaacctgcccgccttccgtcaggccatcaacgcctgggccgctgaccacgccgcgcagcccgaggccgtcagcctgcagcttgatgccgccgttacgctgggggagctgagccttgataatgtgcaggagcttggccgtctggcccccttcggccgcgaaaaccccacaccggtgctgctggtgcagcacgcctttgtggacggcatctggccgatgggcagtgaggggcggcacacccgtctgcggctgcggcagggcagcgataccctgtttgcatcgaccttcggcgttgcaccgcaggcgtttgcctacccggtgggcagcgaggtcgaggctgccctcgaggtgtcgatcttcaatgggcgcagcgggccgatggtgtcggcgcacctcaaggccatccgccccgccgggctgggcaatacccccagcgagcaggctgcatggtttgaagcattccgcaccggcggcaccctgcctgcggaccgtgctgctgtgctgctgccggaccgtgccgacaccgtggcgctctaccgccgcatccgcacagggcaggtggctgcagcggacctgcagccggtgtttgcggcgcagggcgtgcagaacaccggccgtatgctggccagcctgaccgcgctgcaggagctgggcctgattgaggagcaggacggccgctggctgcctgtgccggttacggccaagcaggatctggccagcgcaccggtgctgcagcgtttggcgaccatggcaaaacaaggataagacacggttttatccgggattgcaggggcggatgctcgcatccgcccgcggagcgtggcagcaacggcgatgttcccgggttgatgccgggcatcgacccctacaaagggctgtgcgattttataaaaatgaagaggggaatggaccatggaaaacacaaccgtgcaggaagtaaaaatgcccatcacctatgatgacctgaaggcaagcatgatcgacagcggccgtccgtatgattttgagatgatcgaccgcgcttatgagctggccgccaaggcgcatgggaagcagcgccgccgcagcggcgagccgtatatctgtcatccgctttccgtggcgcagatccttgtggagctgggtatggacagcgagagcattgctgcagccctgatgcacgatgtggcggaggatacccccgtatcggtaacggagatccggcagaagttcggccccgaggtcgcgctgcttgttgacggcgttaccaagctgacccagatcaaattctccaatgtcgaggaccgtcaggctgagaacctgcgcaagatgctgctggcgatgagtcaggatgtccgcgtcatgatcatcaagctttgcgaccggctgcacaatatgcgcaccggtgacgcctggccggagcagaagcgccgcgacaaggcccttgaaacgatggaggtctatgcgcccatcgcccaccgcctcggcatctccaacatcaaggaggagctggaggaccgcagtctgcactatctggacccggtcggctatgagacgatccgcgacctgctgaacaagcacggggatgagtttctgcatcaggtctgccataccatcgccaagcatctggcggaaaacggcatccagaaggccaccatccgccaccgtgtcaagagcatctacggcatctaccgcaagatgtatatgcagaacaaggactttgaggagatctacgacatctacgccgtccgcatcattctggataatgtccccgagtgttacacggcgctgggtctgatccacgatatgtaccatccgctgccgaaccgctttaaggattacatctcgaccccgaagcccaacggctaccagtccctgcacacaacggtcatcggccgcgaggccatcccgtttgaggtgcagatccgcacttgggatatggaccgcatggcggagtacggcatcgccgcccactggaagtacaaggccggcatcaccggcagcggcgacaagctggatgagcggctggcgtgggtgcgccagcttttggaaagccagcgctcgagtgctgatgccaccgacctgctcagcgacatcaagagcgacctgctgccggaggaggtatttgcctttaccccgcgcggcgatgtcattaacctgccggccggtgccacgaccatcgactttgcctacgccatccattcggctgtcggcaaccgcatgatcggcgcaaaggtcaacaaccgcatcgtgccgatcgaccacaaggtccagaccggtgagatcatcgagatcatcaccggccctgaaaaccgcggccccagccgtgactggctcaacatcgtcaagacgagcgaggccaaaaataagatccgcaactggtttaaaaaggagcggcgggaggaaaatcttcaagaggggcgcgatgcgcttgagcgcgagatgcgccgcaacctcatgacgctgagcgatgagcagcgccccgtctttatggaggcactggcccgccgcaaccgctgcaacagtgtggaggagatgtacgccgccatcggctacggcgggctgcagctctcccgcatgctgcccaagctgaaggaggagtacaccaagctgcaggccaccgagccgcggccggtcacggtcgagctcaagcggatgcactcctccgagggcgtcgtggtggagggcatcgacaactgccccatcaagttcgccaagtgctgctcaccgctgcccggcgatgagatcatcggctttgtcacccgcgggtttggtgtctccatccataagcgggactgcgccaacgcccgcgagagcatgcgccaccccgaaaatattgaccgctgggtccgcgcctactgggatgacgaggcacgcgaaagctataaggcaacgctcgatatcgtctgtatggaccgcccgaaccttgtctcggatgtggcgctggcgctgggcgatatgcgtgtgcccatctactcgctgacggcgcgcgccgccgagcaggggcgtgcccggatgagcgtgacggtgggcattaccaacaccgagcatctcaacagcgttgtggcccgcctgaaaaagatcaaggatgtcgtcagcgtgacgagaaactgagtttgaaggccttcccctgaggggagaaggtgccccgaaggggcggatgaggggcaagctttccgcgataacccgtgaatgggtagctgccgcagcgccgcccctcatcagtcgcctacggcgccagcttcccccaagggggaagccttacatggaaggagcaccctatgcgagcaatcattcagcgcgtaacccgcgcaagcgttacggtcaacggcggcgagccgcgcgccatcggcccgggcctggtcattctgctgggcgtgcgtgaaaccgatgagatcgatattgtgccgaagctggccgacaaatgcgcgaatctgcgcatttttgaggacgaggacggcaagctgaaccgcagtgcggtcgaactgggctattcagcgctggtggtgtcgaacttcacactgtacggtgatacggccaggggcaagcgcccgagcttcagccatgccgccaagggggagctggcggtgccgtgctatgaaaaattcctcgatgagatggaccgtcagggcctgcaggaggtcaagcacggcgaattcggcgcggacatgcagatcgaccttgtgaacgatggcccggtgaccatcgtgatcgacaccgatgaatggaaaaagtaagcaaaattcaagggaggacgcaatgaacatccagcatatccacggcgttccgccgctgtacacgaatacctttttaattatcacgaacgccaagcacggcatcctgatcgatgccgcggccgagccgggcgtctatctgaaggcgctggacgaggcgggcgcaacgctgagccatatcctgctgacccacggtcactacgaccatgtgggggcggtggcagccctcaaaaaagcaaccggctgcaaggtctatatggacccggccgatgcggcgggcagccagctgctgcccctgacgcccgatgccatcacggacacatggccggctggtgacgagctgacgatcgatgagctgaccttcaaaatctaccacacccccggccacacgccgggcggcgtctgcctgtggtgtgatggggtgctgttcagcggggatacgctgtttgccggttcctgcgggcgcacggattttcccggcggcagcatgcgccagatgcagcagagcctctctctgctggcggcgctgcccctgcccgatgaaacaaaagtcctgcccgggcatgaggattttaccacccttgggcaggagcgccgctccaacccctatatgaatgaggcatggtattgatgcagatcattttacgcggccccgcagcgggctatgaagccgagcataccgcgcggctgtttttccccagcgcggaaaagtcagaaaatctaccgcaggatggtgattttgtgctggcgcagagccaccactgcaccgatttggccctgctgcgcctcaacggaaggctgcagtggcaaaccgccttgcgcccgcagggcgaggatgcggagtacggcctgtgccggctgctgtacggcatgctctgccaagcgaccggcatcacgccgccctggggcatgatgaccggtgtgcggccggtgcgcatcattcacgacatgcgcgcagccggtgcgggggaggacgagatacgcgcgcgcttccttgaccactttggctgcgcgccggaaaagttcgccctcgcgctcggcatcgccgacctgcaaaagccggttctggacgccgccgacccgatggactgcagcgtctacgcgggcatcccgttctgcccgacccggtgcagctactgcagctttgtctcccgcacggtgggggataaggccacccgcgcgcttgtgcagccttatgttgataagctttgtgaggagctgaccgccatccgccagaccgccgaccgcgccgggctgcgtatccgcaccttctatatcggcggcggcacgcccaccagcctgtcggctgcccagcttgcgcagcttatgtcccatattgcccgcacctttgatctggcacagctggaggaatacacggtggaggcgggccgccccgactgcaccgatgccgaaaagctgcgcatcatcaagcagtacggcgccacccgcatctcgatcaacccgcagaccttctccgatgcggtgctgggcaacatcggccgccgccacacggcgcaggatattatcgactgcttcgcggccgcgcgcgctgcagggcataccaacatcaatatggacctgatcgcgggcctgccgggggacacggtcgagggctttgcagccagcctgcggcaggccatcgcgcttgcgccggagaacatcacggtccacacgctgaccctcaagcgggcgtccaacattgtggtcgagcatcgcgctgccgactatgccgatgttgccgccatgcttgacagctgccgtatgctggccgatgccggctaccgaccctactatatgtaccgccagaagggcacactgcagaatctggaaaatatcggctgggccaagccgggttttgagtgtctgtataatatctatattatggaggaggtccacaccattctttcggccggtgcgggcgggtccaccaagcttgtcattccggggcagcgccgcggcaagatcgagcgcatcttcaacttcaaatatcccactgagtacatcgaccgctttgcggagcttcttgaccgcaaaaaggccgtggaggatttctatgcacgttacacatcgcaaacgcttcatcagtcgtgaccttgtggcgctggccgcgcgcagcccgcaggaactggcggccctgagtgagcagcattatcacgaccagatcgagagcatcgccgatgaggtgctggcggcaggccagcgcatcgtcatgctgaccggtccgtccgctgcgggcaagacgacctcggcccataagatcgccggggccatcgcggcgcgcggccacagcagtcaggtcgtcagtctggatgatttttatatcggggaagggaaataccccaaaaatcccgatggcagcgatgattatgagagccttgagtcactggatctggagcggctgcatctctgcctgaaggagctgtacaaaaccggcatctgtgaagcgccggtctttgactttacgcttcagcagcccagcggcacccgccatattgatgcccggggcggggtggttatcatcgagggtctgcacgccctgaacccggccctgaccgaggaactgcccgccggggccgccctctgcctgtatgcaggcctgcgggaggaatacgccgacagcagcgatgcctgctgcctggccacccgggatatccggctggcgcggcgcatcgtgcgggattatctgttccgcgggcatggggccgcctttacgctggggctgtggggccatgtctgcgcgggagaggaacggttcatcaagccctacaagccgcgcgccaacctgctgctggacacgacccatacctatgaggtctgcctgtggcgcaccgtgctggacgcgatgcctgccgacccggagctgacccccgtgcaggcccgccagctggaggcgctgcgcgcaaagtttgacgcatttccggcgctgggcaccgagcttgtgccccaaaacagtctgctgcgggagtttattggtaaataatgccgtacaattcacggaaaatatacatttgcgcgttgcaaaccgcgccgcaataggctataatagacctaaatcgcacggcgcagatgccgtgttcaggcaagaagaaagaggtgcttgactatgtttgaactggatattgagatgctgaaggagcagggcctgcagttggtggattccgctaaaaagacggcgcaggatctggcagacaagggcaaaaacaagctggatcttctgaaccagcaggcacgactgtccaaggcacagcgccagctgggcgctctggtctacagcctgcacaaggccggtgaggagaaccccgcactggtcgaaaagtatatcgacgccgtggcagaggtcgagaaggccattgaggagatcaaggccggcatgaccgaggacgagcgcgcagaggtcgaggcacaggaggccgctgacaccgccgaggatgcccccgagcaggagcaggaggaagaaatcgaggaggagcccatccagctgcgcggcgagaccaagatctgccccgtctgcaaggccgaggtcgatggtgacgcgctgttctgcaaccattgcggcgcacagctgtaaaaataacactacagcgaaaaaatgcagccgggcggacggccaacgcttgacaaatccgccgatttgtgtaaaatgtagcgtattgcatttctgtgagcgcggagaaggtctatgaacgcataccccgaaaaacagcagtatacggcagacgacctggctgcgatcattgcaatcctgcgggacccggagtgcggctgcccttgggacaaggtacagacccacacctcgatccggatgaacttccttgaggaagcctacgaggcagtggatgccattgatttgaacgaccccgcgcttctctgtgaggagctgggcgatgtgatgatgcaggtggtctttcacgcgcagatcgagcgggaggccggtcattttacctttgatgaggtgtgtgacggtgtctgccgtaagcttatcaatcgtcacccgcatatttttggcggggacgagagcataaaagattgggattcgctcaagaataaggaaaagggccgtctgaccctcgcagacgagctcgaaagcgtccctaaggcgctgcctgccctgatgcgtgccgctaagctgcagaagcgtgctgcccgttgcggcgtgcagacagaggcaacagccgaagcaatcactgctgcggctgcggcggtcgagaccgcaccggacaaggcccgggcggagcaggcgatgggccagctgctgtttgccgctgcggcgcttgcacgcagtgcaggcatcgacccggaacaggccctgcagaaatgcaacgctgcgtttaccgcggcgcacgccgacaacccagaaagctaagaagtgagccgagcgggacggagctttccgcagctgctttttgctgatataacactttggaggtataataccatgacgaaagttgaactgatcgccgctgttgcgaatgaagctaacctgaccaagaaggacgccgaggctgctgtcaacagcgccctgaacgccatcaccaacgccctgaaggagggcgacaaggtcgcactggtcggcttcggcaccttcgaggtccgtgagcgccctgcacgcaagggccgcaacccccagaccggtgaggagatcaccattgaggcctccaagctgcccgctttcaaggccggcaaggccctgaaggactctgttcagtaagtaatggtccgctccgccccgccgcgctcctgcggcggggcggttttgtatcgaaaggaaaacatctatgcgtctggataaatacctgaaggtcagccgtgtcatcaagcgccgcaccctcgccaacgaggtcgcggacgcgggccgcgtgctggtcaacggcaagcccgccaaggccagctataccgtaaagctcggcgacatcatcgaggtcaccttcggcaaccgccctgtcaagatccgcgtcctgtccgatgtggagcagaagggtaaggatgtcgcacgggaaatgtttgagattattgaggaataatgccccaccgcccggcgcggggttctaaacgcggtgcctgccgcatacagtatcactgtaaccaagcaggggagggaccgccatgccggaaacaaaactggagccacgcgccggccagccgcagcagcaaagccacggccttgccctgcgggaccgccgccatctggccgtgaccggcgtcagccgtgtcatcagctgtgatgaaagcgccgctgtgctggaaacgccgctcggcaatctgaccgtcggcgggcaggaactgcagatcggggagctgtccacccagagcgggcaggtgcagatctccggcaggatcgaatacctgcagtatgcggaaaaccagcagtccggcggcggtctgctggcgaggctcttccgttagatggccccgtcacctgccccgtgggcggtgctgggggatgtactgtggtgccttgggctgggctgtctgctggcgggcgtgcgggatgccgtgcgccttgcactgggggagggcgcgctgcgctgctttttccgggatatagcggcattcgccgcggcggcggtgctggtctgcggtttcgctgccggggccagtgcgggcggtctggcccgctggtatatgagcgccgcgctgctgctgggggctgcttgctggcactggaccgtgcagcccgctgtacaccgctgtgcagctgcggccgccgcctgcctgttggcaccgctgcatgcggtggagaaaaccgttatccagcccctcaaaaagcgccttgccgccgcccgcagccgccgcagagagcgcaaaaaggcaaaaaagtccgaaaaaaagcaaaaatccgctgaaaaacagttgcaaaaaccttcgaccatattatataattagctacaagtggttgtgtgtgcatttttggggaagggggcatcccactatgagcaaaaacaaggggaggtccccgcgtggattcctgccgtggtggatcaccgttccggtgtttctgatcgtctgcggctcgctgttcgtcaatctcgtgcagtatcaggtgtccattgcgtccaagcagcaggagctgcagtctgtgcagaaccaactcagcacacagcttaccgaaaacgccgagctgtccggaacgctggatcagggcgaaagcgctattatcgagcgctacgcccgggagcagggctacgccaagcccaacgagcgcgtctttgtggacatcagcggtaaataaatcgttttcagcggggacgctttgcggcagcctcctgacataaaaattacatttaaaggggtatcatagtttggcattacaagttggggatattgtcgagggcaaggtcaccggtatcaagccgttcggcgcgttcgtttctctgccggagggcaagaccggtcttgtccacatctccgaggtttcctacgagtttgtgcaggatctttccacggtgctcagcgatgggcagacggtttccgtcaaggtgatctcgatcgcaccggacggcaagatcgcattgtccatcaagcgcacccagcccgcgccggagcgcggcccgcgccagcagcacggtgagcgcgctgctggcggcagtgaccgtcgcccggccccgcgccccaagcgtgaggaaaagccccgcgtctggcagcccaagcctgccgcacctcagggcgatatgagctttgaggacatgatggcccgctacaagacccgcagtgaggaaaagatcgcggatctcaagcgcgtgacggagaaccatcgcggcggatattcccgccgccgcggctgataccggctgcgaaagccatacaatgaacggccctatcctgacggctgtcagccgccgggctggggtctttttgcaattttacaatacaaaatgtaggggggatagccattgtttcgcccctacacaattcacggcatatcaacaagaaaggacacctatgtctacactttacacgatggtcgcgccctgcttcttcggtactgaatccacgctgaactttgaggtcaagcgtctgggcgcacagaatattcaggtgacggacggccgtgtggcatttcagggcggggcggatatgatcgcggccgccaacctgaacctgcgcaccgctgagcgtgtgctgctgctgctggccacctacaaggccaccacctttgacgagctgtttgacggctgctacgccatcgcgtgggaggagctgctccccgccaatgcggccttcccggtcaagggctcgagcctgtccagccagctgtccagcgtccccgcctgccagagcatcgtaaaaaaagccatcgtcaagcggctgatgaacggccacaaggtcggcaccctgccggaggatggtgcgctgtacaagatccgctttgcgctgcgcaaggacacggtggagatctatctcgatacctccggtgacggcctgcacaagcgcggctaccgcaaaaacgccacgctggcgcccatcaaggagacgctggccgccgccatcgccgatctgggccgcgtgcgccgtgactctctcgtgcaggacccgttctgcggctccggtacgctggtcattgaggccgcgcagaaggcactgaatctggcccccggtctgcgccgccgctttgccgccgagcatttcgactttgtgccggctgacctttgggcagagcagcgccagaaggctcttgaggaggtccgcaaggatgccgcctttgagggcgtcggctatgacatcgaccccgccgctgtggcgctggccaacgccaacgccaagctggccggtgtgggggaccgctgccgctttgaggttgcggatgtccgggatttccgcgcgctcgacaatgcggtcgtgctgaccaacccgccctacggcgagcgtctgggcgatgcctccgaggcggcaagtctggcgcgcacgctgggtcaggtctggcaggcgcaccctgcgcaggggctgtacgccatcacggccgatgcggattttgagcagcacttcggcaaaaaggctgcccgccgccgcaaaatttacaacggcatgatcccgtgccagctctatatgtattttgagcagcccaagcgggagaggaagtaagccatggaagacctgaaactggcgatcctgattgatgcggacaatatctcgcccaagtatgtcaaggtgattttggacgaggctgcaaactttggcgttgcagcctgcaagcgcatctacggcgactggtccgatgcgcggctgagaagctggaaggatgcgctgctgaacaattccattatccccatccagcaatatagctacacgaccggcaagaacgctacagattccgccatgatcattgacgcgatggatctgctctacagcggcaatctggacggcttctgtatcgtttcctcggacagcgatttcacccggctggcggcccgcctgcgggaggccggcaagcttgtcatcggtatgggggagagcaaagcgctcggcccctttgtcaaggcctgcgaccagttcaagtaccttgatctgatcctcgaccacggtgatctcaatgaggcggagggcgatgccccggccgcccctgctgccgagacgagcgcccgcgccgccgcgggggacgacaccgccatcaaccgggcttccatcggccgcatcatccatggcctgatcgatgagatggatgacggcaccggctgggtgcgcacctcccgcgtgggggatcagctcatcaagcgctacccggatttcgatgtgcgaaacttcggctccaagagcctgaacaagttcctgacctcactggcggaactcgaggttgaggagcgcatccttgccaacggcaaccccattcagtttgtgcgggtaaagccggtgccgaagccggtcaaaaagcctgcggcccgccgtaccgccaagcgcacgccccgccaaaagaaataaaaccagccccagacatcacttgtctggggctgttcgcttatctctgcaaatattctgtgctgacccagccgtattgctggttgtactgcaccagcgcccagccgggggcgctggacatcgtaccgtagacgcgcagccgcagataatcgggaattttgccgatgatgtcataccctgtgcccggcccggcgcgcaggttcagccgctcgccgttggtgcgggtcgtaaaaaagattgcatctgtccgcgcgggcggggtgtcgggggcggtaatatctgtgcccagactgtccagcaaaagccgccatgggtcaggctttgtcacaccgggaatgctgtattcgtgccagccgtcagtctggctgatccatgccgtgccgccgtcccacacaaggccgtcatacacacaggggacaagctccgccccggtgctgtcgagcaggccgaatttcccgtcacggctgacaactgcgcagccattcagcagcggtgcggcccgggcaaagacccgcggctcatcggtgcagcggttgggactgtacacgccgtcgtagcagggagcggttacttcatggcccgctgtatccagatacacccatttgccgtcccgctgtgcgggggccagcggcgcgtcaaaaaagaaatctgccgcactgtaaatacattcgttcgcagctttgctgtctctgtttcgataaacatactgctcgccgccgatgtagttaaaccagccgtccccctcggcctccaactcaccgtcccggacaggcacaaggccgttgacgctgccgctgaacagcagcatgtccgcatcagtcggtgctctcagctcacccgggccaagggagccgtagtagatatgcagagcattatcctgtaaatcgacaaagctcagatacccgccgccgtcgtgggcgccacagagggtgccatcgccgcttgcctttagccgggcgttgtactctctttccagcgggtcgatctcctcccacgcaagcccgtccagatacccgtgccagtggtgttcgtcaatgtcacattcaaacagcggctccggcgcgcggcaggaaagcacttctgtaccatcgctgcgcatcaggccccacaggccgtccttgcacatcgtgtaatagtcggtgtcggggtaggtctgcatcgcgcgctcatagtcgatcagccgaatgtcgtcatagtccagcgctgccgcgccggtcggctccagaccctgcggcgcagcggctgcgggggcaggagtcggcgctgcttcggcagtttccacagtggcagccggtgcagatgcggaaatcgcatccccggatgccgcccctgcggcacacccggccagcagcagggcagacaaaacgcagagcagaagcttcatgacagaacaccgcctttttctttgattatatcacatgcgccccgcaccgggaaggtccggcacggggcgcgtgtgcagattttacaatttattcgtaggtgcgccgcccggcaaagacgcacagggggcgcttggccttgcccatgcccatcagctgcacggcggcagccagagtggcaccggcgctggtgcaggcgggtacgccgtcaaagaacagtacctcccgcgcggcacgctcggcatcggcggaggtgacggtcagcacggtgtccaccacataggggttgtaattctccggcacaaagccggggccgatccctgcgatgctgtgctggccgatgaacccgcccgagatggcggcgcactcggcaggctccacggccacgatgcgcaccatgctgttccatgcctttatgtactcggccacaccggtgatggtcccgccgctgcctacgccgatgaccacggcgtcaattgcatcgcctgcgtgctttaagatctgcgggccggtcacccggcggtgatactcggggttatcatcgttggaaaaatagtgggtgtaataaccgccgtatcgtttggcagtgtcctcggcgatgcgctccatagcgcggcggccgccgctgctgcaggcaatgatgcgtgcgcccaagtcctgcagatgcttgcgccgtgcgatgggcaggctgctcggcacgacaaggatgcaggggtgccctgtggttgcacagctgacagccagcgccgcgccgaagctgccggagcttacctccaccaccggcatgccgggctgcagcgtgccgcgctcggtcgcaaaggccagcatcgtctcggccagaccgtccttggaggtgccggtcgcaccgccgaaatccagataggcgaggatgcctgcctccaaaccgtggcggccggagtagccgtccagccgcacgaccggcgaacggtagacctcctgataataactgcgcaggatgggcacagacagacacctcactttcaaaaaacgacaacatttttattatagcatagttcggggcggtttgctatggatggagagaaaaatattgcggtgaaagggaaaagcccctccgacttcgctgcgctcattacctccccgcagagtgggggctgaccgagcctgcgaggcctgagggacttttcctgtttgccatcacggcgctgacaaaaaatctgccgtatttcttcaaaaaattgctccacagacttgacttccggcgcctgttctgttataattcataggctgatgtaaagaaaattactttacacagcctttacaagcagcaaagggggcgcgggcatggccggtaagccgcagaaaaaccttgcctactccgtcctgctggacttctacggtccggtcctgacggaaaaacagcgcgtcatcctgacggaatactatgacgaggatttgtccttagctgaaattgccgaaaatctcggcatcacacggcagggggtgcgggacgccatcaagcatggcgaggccgcgctggacgagctggaagcaaagctcggcaacgcccgccgccacacccggatgcaggccgatttggaccgcctgcgggtgctcgtcacggaggttcgctgctgcaattccggctccttcacgccggatccgcgtatcaaccatgacacgcaggaaatgctcacgatcttacaacgcttggacacgcaggaggatgccgatggcctttgagtctttaacagagcgcttgaatggcgttttcaaaaagctgcgcggcaagggcaagctgaacgaggccgacattaaggctgctatgcgcgaggtgcgtatggcgctgctggaggccgatgtcaactacaaggttgccaaggacttctgcgctcaggtttcggagcgcgcgatggggcaggaggtcatggagagcctgacccccgcccagcaggtcgtcaagatcgtcaacgaggaattgaccagccttatgggcggcaatgagccgaaatacctgcgcctgaaaaacaagggccagaccgtgctgatgatgtgcggcctgcagggcaacggcaagactacccacgctgccaagctcggcaaattttaccgcggtcagggccgccgcccgctgctggtcgcctgcgacatctaccgccccgccgccattgagcagttgaaggtggtcggcgagcaggccggtgtccctgtctttacgctgggcaccgaaaagcccgagcttatcgcccagaaggcgatggcctacgcgaaggatcacggcaatgacattgtgattctggataccgcaggccgtctgcagattgatgaccagcttatggatgagctggtgcggatcaaacaggcagtcgaggtcgatgagaccctgctggtcgtggatgccatggctggtcaggaggccgtcaatgtggccaagaccttcaatgagaaggtcggcatcagcggcgtcattctgaccaagactgatggcgatacccgcggcggtgcggcgctttcggtgctggctgtcaccggcatgccgatttattttcagggcacgggcgagaagctcgaggatcttgagccgttctacccggcgcggatggcaaaccgcatcctcggcatgggcgatgtgctttccctgatcgaaaaggcgcagagcgtccagaacgacaaggatgccgaggccgccgccaagcgcctgatggaaaacaagttcgacatgaacgacctgttggcccagttccagcagatcaagaagatgggcggcgctgcctcgctgctggcaatgatgcccggcggcagtcagatcgacgccgactccctcgatgataaggcgctgccccgcatcgaggccatcatctactcgatgacaccggcagagcgcgctaaacccgacatcatcaaccccaagcgcaagcgccgcatcgcggccggctccggcacctcggtcgaggatgtcaacaagctgctgcgtcagtttgaaatgatgcagaagatgatgaaaaaggtcaagcgcaaccccaaggcctttatgcgcggcctcgggagtatgggcggcagaggcggctttaaaggctttggccgctgattttcacaaaggtatgacccgctcggctttacggcccacgggatgtacaatatattaaagatgcccaaccaagggccgtaaacaatttttggaggaatattactatggttaagattcgtctgcgccgcatgggcgccaagaaggctcctttctaccgcgttgttgttgctgacagccgctttgcccgtgatggccgcttcattgaggagatcggctactacgatccgaccaaggagccctctgtcgtcaagatcgacgctgagaaggccaagcagtggctgtccaacggcgctcagcccaccgacactgtccgcgagatcctgaagaaggccgctgttctgtaatctgttcgctttttagggagggaacgccacatgcaggaactcttattagccgttgcccgcggccttgtcgaggacaaggaggccgtgcaggtgactgttgatcccatgcgtgaggacggcactgttgtgtaccacctcaaggtggctgaggccgatatgggccgcgtcatcggcaagcagggccgcatcgccaaggcgatccgcgttgtcatgcgtgccgcggctgtccgtcagggcgaaaaagtcatcgttgagatcgactaagacccgttacaaagcactttgccgcagggtaaagtgctttttctgtatcaggaggaatatatgcgaaactatcttcccgcctgcaagatcgtgtccacccacggcgtgcgcggcgaaatgaaggccctgccgctctgtgacggcgcggcgtttctggcaaaattcaagcggctgttcagcacggccgagggcgcgggcgagacccgtgtgctgggcgtgcgcgcacagggcaatgtgatcctgctgcggctggacggcattaccgatatggacaccgcccgcgctcaggtggggcgggtgtactatctggccaaggccgatgcccggctgcccaagggccgttacttcattgacgatctgctggattgtgaggtcgcagacgccgataccggccgcgtctacggccgcctgacgaatgtggagcatccggctgcgcaggatatctacaccgtgaccgatgcagcgggggagcagcacatgctgcccgccgtgccggagtttgtcaaggccatcgacattgaaaaccgccgcattctgatcacccccatcgagggcatgttcaccgatgctgtgaacggcgatgagggctgagcagatgcgcattgatatcgtaacgctttttcccgagctgtgcgacagcttcctctcggccagcattctgggccgcgcccgcgcgaagaacctgttcgaggcgcactgccaccagatccgcgactacacaaaaaacaagcagaagcagaccgatgactacccctacggcggcggctgcggcatggtgctgtacgcccagcccatcgccgactgcctgcgggctgtgcaggcccagtgcgccgcgcagggcagggcaaagccgcatgtggtttttctgaccgctgcgggccgcccctacaatgaggaaaaggcccgtgagctggcctcctatgacgccgttacactcgtctgcggccattatgagggcattgaccagcgggtcattgacgccttcggtgatgaggaaatctcaatcggtgattatgtgctgaccggcggtgagttggccagccttgttgtggccgacagcgtactgcgcctgcagcccggcgtgctggccgaggaaaagggctatcaggatgagagctactgggacgggctgctggaatatccccagtttacccgccctgaggtctgggagggccgcgctgtgccgccggtgctgctgaccggcgaccacaaaaaaattgacgaatggcgcggtgcccaaagccgtgagcggacccgtgagcgccgccccgacctgtatgacgcctggtgcgagagccacccgctgaccgagctgccgaagtggaaacgcggcgaaaatatgcgccttgtgaaaaatgacgaacagctcgccctctgcgccgcactgatggctgaggggcgccgcgctgtctgcgaggcagtctgtacggagcaatatctggaaatgctcacaccgcaggcccatctgcctgtgctgcaggaggataaaaagaacggctgggcgttctatctgcactataccaaggacagtgctgacggcatggtgggcgtctgccacaaaacgggggagattggccgcctgtttgtgaccgaagcggcccgcggcaggggatacggcgctaagatgctggatttcgcccgcaaaaagctgcccgagcatccccatccgaccttgggggtgctgaacaccaacacccgcgcgattgcgctgtacaagcggatgggctggcggctgaccggcagcgtgctgcaccgctatgatcccgccgatgcaaaggcatttgcggcgctgtactgtgaagaattggaaatgcgctatcagggctgaccgttgtttttgtcgtcaatccacaacgatgttgaaaataaactggcaaagttgcacaaacgcgcgcgcgaagatttggcagaattacagaatcatgccaaatttgcaattttccactgtacaaaatcgaccgaataggataaaatagagacaatcaaggcggcgtattaacacgcaatagaccgcctggaagtcgcccgcggtagatacacaggggcatattattttcaaaagtaggagagaataactatgtacgttaaagaagttaccgttgagaatcaggttggtctgcacgcccgtccggctaccttcttcatccagaaggccaacgaatacaagtcctccatctgggtcgagaaggaggagcgccgtgtcaacgccaagtctctgctcggtgtcctgagcttgggcatcgtcggcggcaccaccatccgcattattgctgacggtgccgatgagcaggctgcagttgacggtctggtcaagctggtcagctccggctttgccgagtaatcttccttaaacaatcagcggtggggtgacccgccgctttttttgtatacggcggcaccgcatacagcgcgtcgggcgcagcggcgctgccgtaagaaaggtctgtccatgacaaaagctgaactctacaaaaaagcctgcatgctgccgctgctgcccggcgtgtatatcatccgtgacaaaacggacacgatcatctatatcggcaaggccaagcgccttaaaacgcgcgtgtcgcagtatttccgtgagggggtgccccacgatgccaaggtcagccagatgatcgcccatgcgttcacctttgatgtcatcgtctgccagagcgagtttgaggcgcttgtgctggaggccagccagatcaaggcccacacgccgaagtacaatattttgctcaaggacgacaagggctacagctatgtcaaggtcacgcgcggtgcatggccgcgcatctcagcggcactgcagaaggatgacgatgacgccgactatatcggcccgttcacctcatcgtttgccgtgcgggagatggtggaaacagcgcagaattgctttttgctgccccgctgcagcaagagcttcccgcaggagcttggcaagggccgcccctgcctgaacgcccacatcggaaagtgcatggcagtgtgcagcggcaagatcagctgcgaggcctacaacgatgcagtgcagggcgcgctgcggatgatccgctacggaaaaaaggacatcgtcaagcagctgcgcgataagatggaggccgcctccgagcgccttgactttgaaacggccgccctgctgcgcgatcagatcatggccattgaccgtgtggccgcaggccagaaggtcgttatggacagcgataccgagatggatgtcattgcgttggccggcacgacccatgcggtctgcgccgctgtgctgcgctaccgggacggccgcctgaccgacaagcgggaatttgttttccacgataccaccgacatcaacaccgtgcgggaggagttcctgccgcagtattatctggacggtgagaacatccccaaaaccattgcggtggacgccctgccgcccgatgccgaggcgctgaatgaggcactgaaccaggcccgcggcacaaaggtcgagctttatgtgccgcagcgcggtgatgtggcaaagctggtcacaatggcctacaccaatgctgtggagcgccttggccgtgagagcggccgctacacccgcgaggaaaagctgctggaggaggccgcccagctgcttggcctgaaggagccgccccgcgttatcgaaagctacgacatctccaactggggcgatggctccagcgtctgcggcatggttgtgttccgggacggcaaaccccaccgtgccggctatcgccgctttaagatgcgcaccgtcgcgggcacggatgactatgcctcgctggcagagacgctctcccgccgtgcggcggaatacgaggcagcccgccgcggggaaaagcctgacggcccgcagaaccagtttgccaccctgccggatctgctgctcatcgacggcggcaggggacaggtcagcgcggtcaggcaggccctgcgcggcacggcgctggagaatgtccccaccttcggtatggtcaaggacgatcaccaccgcacccgcgccattgtggacgatgcgggcggcgagattgcgatcaaccgcaaccgcaatatctttacctttgtgacgaatattcaggacgaaacacaccgctacgccaacgattaccgcaagcgcatgatgaaaaagcgctcctacgctgccacgctgacggccattcccggcgtgggtgaaaagaccagcgccgccctgctggcacacttcaagaccgttgcggcggtcaaggctgccagcatctccgatctggaggaggtcaagggcatcagccacgccaaagcggaaatgctgtacaacgcgctgcggaatggggtataatgcgtgtgacgcactacccggtaggggccgggcctgcccgaccctcaactatacgggaaatgatatttcccggcaaggccgcgggctgcacctgtgcagcccctacaacaatgtaaaatggatttatccttatgctgattctgaccatacttctttctgttgcccttgcggcgggcttcacccttatgcccgcccgcgtccaacaccgcaagcccgcccgcgccgatggttacgccggggcgggcgtcacggcgcttgtctggctgtgggcggtctgcatctggtcccgcccgggcctgaccgctgactttgacggattccgtctggcagtcattctggccatgcaggggctttcctgcggcgttgtctgcgggttccgcctgcgcggcgcgctgccgcaaaggctgcgcactccggctgcggtcgtcctgctgctggcggccagccttggggcggagatattcatcggcaacctaagctggctggcaaccagccgctatacgccggtggatctgcgggcgcacctgacaaatgacccggaccctgctgcgccgctgacgctgcagggggacagcaccgtgctggaatttgcggatctcggctttgaggtctataacctgcagctggacgggctggtctcgctggcggacggcgatacccccgagcagaaaaatgtcctgctccagctttatgtggctgccacggatgaggccagctcggcatcccgccaaagctggggctgggaggctgcacctgcatcggggcgcagtctggtccgcagtctggacctttccggcagggccgataccctgacgctgaccgtcaccggctacaagggggagtaccgcagttacccgctgaacgcacagctgaccacggtctgtgccaatgtgcgccgcccgctggatttctcgctcctgcggttcgcggcggtctttgcgctggcactggcgggctttgcgctgcgcccggccagcgttctctggcgcgattcctattgtgcgcatgagaaaaaataccgcccggctatgctggcagcggggcttgcgctctgcgcggcagcgtttttggcaccgttcggggaccgcttcaatgcgggcgttgcaacggccttttacaatacgccggactggtcggggacgagccgcatcgactttaccatgcacatcaatgactgggcctccaacgcatcggcccagtatggtgcgctggcgcacagcctgctgaacggccgccttgaccttgagaaggacccgcccgccgctatggcggcgctgcaaaacccctacgacaccgccgcccgtcaggaggcggcccccgatgcactgtgggatgtggcctactataacggccggtattatgtctacttcgggatcgtgccctgccttttgttccagctgccctttgaggcactgaccggcatacaggatctgccgcccagcctgccgatgatcctgctggcatggctgtatattgcggcggtgttcggctttgtccggcaggcggtgcgccgctggttcccggatgccagcgccgcggcctgtctgctggccgccgtgggcgcggcttcgggggcgcagctctggtacttactgcaccgtccgtcggtgtatgaatatgccatcctctgcggggcggtatttgtgctgtgggcgctgtggcagtggctgctggcggcgaacacgccgctgcaaaagcgcggccgggtgctgtttcatttgacgctgggcagcctttgcatggcactggtggcaggctgccgcccccagatggtgctgtttgccgtgctggcgctgcccatcctgtggccgcgctatatcacggaaaagcgcctttacacccggcagggcgcaggggagtgcgctgccttcctgctgccggtcgtgctggtggcggcggggctgatgtggtacaacgccgcacggttcggctcggtatttgacttcggtgcaaattacaacctgaccagcaatgatatgacccgccgcggctttgcggtggggcgcatcgccccggcggtcgtgaccttcctgcttggaatccccggcgtgcagacggtttttccgtatctgagcgccacaaaaatgcagacgaactacatggggctgaccatcaccgagctgtactacggcggcgcgtttgcctgcctgccgctgctgtggggccttggctgcctgccgctggcccgccgccggcttgattgctgccgtgatctgcgcgctgtattccgcctgacggccatctgcacggtggtgctggcggtgctggactgccagatggccggtatgctctaccgttaccagagcgattggctcggcccgctgctgctggcggcggcgctggcgtggctgctggcggagcgtaccctgcaggggcgcgggctgtcggtgctgacaaaggcgctgcgcacggtctttccgctggcggtgctggcgggtatctgctataacttctgtgtctattttgcggcggaaccccagctgatggggcagaaccccgccttgtatgaaaatgtgagccgtctggttcaattctggctgtaaaggaaaaagagtatggctgataaaaacatctacaccgtcatcgtggccgatgatgaggacgagctgcgcgaggccgtctgcaccatgatcccctgggaggcgctgggcttccatctggtgggcagtgccagcaacgggctggatgcccttgagcttgtcgagcggctcgagccggatctgctgctgactgacattcggatgcccttcatctcgggcattgagctggcccggcaggtgcgcgagatccgccctgccatgcacattgcctttttgagcggctatgatgactttgagtacgccaaacaggccattcagtacaacatcatcagctacatgctcaagccgctgacgatggacggtctggccgccgagctgaagtccatccatgagaagatcgatgcccgctatgccgggctgcgccgggccgatgcatcgcacgcggaccgggctgcctttctcattccgctggtgctcgcacagtacgacaatgcccctgctgatctggaggaacggctgcgcagcgccgccgcagcctgcggcgtgctgcgcggcaccgatgaccgcagcacgctggtggtactggcggcctcgctggagggggcggctgactacgaggcgggctttacccagctggtggagcagagcgcaaacaagtacctgcgccattttgtcttttactgctgcggccgcgctgtggcggtgctgctgggcaacccctccgactttgaggagtatctgcacattctggcggatgagatctgccagctggcagaacgcgcgctgggccgcacggccaatgtgggtgtcagccgggagtttgcgcacctcagtgcgctgaacgatgcctaccgtcaggctgtggaggcgctgcacaccgccgctgagggggagggcggcgtcagctttacggcggacgcccgcaagaccggcagcctttgcgaccgcgcgctggagatcatcgaccagcattatatggacgaggacctctcgcttgcatccctctccgccatgctggatgtcagccccaaccacctgagcgcctgcatcaagaagtcggagggggagaccttcatcaacattctggtgcgccgccgcatggagaaggcgcaggcactgctgctgaccaccgatatgcagattcaggagatcgcccgctgctgcggctacaccgaccagcactatttcagctattgctttaaaaagtacagcggtacctcgccggtggcactgcgccgcgcccgcgctgcgggggaggtccgcacatgatgcgtccgccgcgcaccgcccatctggcggcggcgctgatctccgccgtggccgtcatggtgctgacgctctgcacaacgctctttctgcgcagctaccgcaatgcgattgtcgaggctgcccgcaccaacagcgcccaggccgtcagtcaggttgtgggggccgtcggcaattatgtaaacacgatggagagcgcagtcaccatcgttatggggcatctggacgatgccgaggagcctcgggatgcgtttctgggcgcgttcctgacggcccggcccgaggtggccgccatcaccgcctacgatgcggacggtgtgctgctggactgctgggcgcaggacggccgcaccccaaaggcggagatcctgcgcaatctttcgtttaatctgacgaccgcccgccgtctgagtcagggctatatcagtacgccccatgtcgagtcgatctttgcggggtattatccatgggtcgtttccattgtccgcacagtgcccggcaccgccgaaaagcgctggctgtcgctggatctgagctttaccgagctggccgcaaccatcagcaatgtcggcatcggccagcatggctactgctacctgatggatgagcgcggcaatatggtctaccacccgcagcagcagcttctctacgcaggcttgaaaaaggaggaggcagggcgtctggcctgccttggtgacggcacctatgtggaggataccgtcatctacagtgtccagcgtgtaccgaacagcccctggcgcgttgtcggcgtcagctacattgatgagactgtcaacgaaagcttctggcagatggtgcgcatcgctgtggcaacggcagcactgatctttgtggcggcgctggtggtgggctgggtgctgtcccgcctgctgtcccgcccgctccagcagctggagaacgcaatggaggcgtttgagcaggacgcagaccactttgtcttttgcgcggtgcgcggcacgcgggaggtgcagaacctatcggattccttcggccacatggtcgggcgtatccagcggctgatgaccaccgtgcgcgaggaggagattgtcctgcgcaagactgaactgaaggcgctgcaggcacagatcaacccgcatttcctctacaatacgctggattccatcgcatggatgtgcgagcgcggcaaaaatgctgacgctgtgcagatggtccatgcgctggcaaggcttttccgcatcagcatcagccgcggccatgagctgatcccgatcgagaaggagctgcagcacgccgaggcctacctgcagatccagaaataccgctacaaaaaccagtttacctatcactttacggtggatgaggactgcatacactgcctgtgcaacaagatcaccctgcagcccatcattgaaaacgccatcgtccatgggctggatctgatggtggacgatggccatatcgagattacggtcaggccggacggggacgacatcctgctgatcgtcagtgatgacggcatcggcatggagccggagcaggttgcggcgcttttgcagaatgagccgagcgaccgcaccggcatcggcgtcaagaatgtcaatgaccggctgcgcatctacttcggccccggctacgggctgtccatcgaaagcgccccctatgcgggcacgaccgttaccatccgcaccccgcgcgtgccggaggacagggagggcgagtatgataaaacgcattaaaatgctgctgcccgccgttttggcagcgctgctgctggcaggctgcgcggtgcagcctgtggcggccaccaccgcgcggtacagggtaacggtcgttgccaaatcccgcgagtctgaattctggaaggcggtactgtccggggccgaggccgcagcgaccgagtacaatatgcagctcaccgtccttgcccccgacaatgaggaaaactatgacgcccagaatcagctgattgaaaaggcagtcgaggacggagcgcaagccatcgtgttttctgccatcgactacgaggccaacgccgaggccattgatgcagccgccgctgcgggtgtgacgatcgtagggatcgactcggctgtacattccgatcaggtagcggcctacatcgggtccgacaactacggcgccgggcggctggcggcccgcagcgcactggaaggcacggagggaaagctctgtgtggggctgatcaactatgaggtcaacggtgccaacggccgcgaccgggagcagggtgcccgcgacacctttgcggacagcggccgcgctgaggtcgttacctcaatgcagacccatccgaatgcggccagcgcgcacagcgatgccctgcggatgctgcagcaacaccccgagatcaatgtgctggtggccttcaacgaggccaccgccgtgggggccgtgcaggctgtgcaggagatggagcgggtcgatgacctctggctggtggcgtttgactccaatgtgcagacgatcgatgcgctgcaaagcggcgcagtggactctctgattgtgcagaatacctacagcatgggctattttggcgtggagagcgcctacaggctgctggccgggcagggcagcagcgtggaaaaatccaacattaccgccgtccgggccgttacacgggacaatatgttcgccatagataagcaaaaggcactgttcccgttcgggtgaaatctgtggggcttacccctctgcgggcgggtatggaatccgcccctgcggcgcacctccctcacagagggaggttttttgtttgcaaaaatcttacaaaataaaaacaacaggaaccgttttgtcactttttatgagccttctgcacaaaaaaggcgggttctgattgggaaaggtgccctaaacggtgaaaattttccccttttgtcggtgaaatttcaccttgttttttccccgttgcccgagtattataataactgtcaacagggcccgcacctctaccgcggcccgaaaaaaacccactgcaaaaagaaggagaaacttattatgaaaaagtttgctgctctggccgttgctggctgcatggccgtatccctcgccgcttgcggcgcctccgcttccgcccccgcttccagcgaggctgcctctactgagtccgccgctacctccgctgccgagagcgcagctgagagcgttgtcgagaccactcagggcggcaagatcggcgtctgcatctacaagttcgacgatgccttcatgaccacctaccgtaatgctctgcaggagatcctcgagggcaagggctacgaagttaccatcgtcgatggcaacaacgaccaggccaagcagaacgagcagatcaacaccttcatcactcagggcgttgacgcactgatcatcaaccccgtcatgacctccgctgccgaccagatcatctccaccgtcaagggtgccgatgttcccaccgtcctgatcaaccgtgagcccaccgccgatcagatgtccgcttacgacaagctggtctatgttggctgcgacgctgctcagtccggcaccttccagggcgagctgatcctcgacactgagaacaagggcgacatcaacggcgacggcaaggtttcctacatcatgattcagggcgaccccgagaatatcgatgctcagctgcgtaccgagtactccgtcaaggctctgaccgatgccggcgttgaggtcgagcagctcgacctgcagcgtggtgactgggaccgcaacaagggccaggaaatctgccagaacgacctcgccaagttcggcgaccagatcgaggttgtcttctgcaacaacgatgacatggctatcggcgctctgcaggctattcaggctgccggccgtaccgtcaacaaggacatctacctcgtcggtgttgacgctctggacgctgccaagaacgaagttgccaacggcaacatgaccggtaccgttctgaacgacgctaagggtcaggctacgcaggctgttgcttccatggaggagctgctgggcggcaagaccttcgaggccgaacaccagagcgtctacgttgactatgtcaaggttacccctgacaacgtcaaggacttccagtaatttgacaaaagccacagcttaaaccagaacaaccggggtgcgtgtgcgcaggcgcacgcaccccttttttcgtgaaaaggttacaaaagattaaagggggccagcgaattgtcagagtaccgcttggagatgtgtgatgtcgtcaagacgttccccggcgtcaaggcactgaatcacgcacagctgaaattgaaacccggcaccgtccatgcgctgatgggagagaacggcgcgggcaagtctaccttgatgaagtgcatgtttggtatctaccacatggacgaaggcaaggtcatttatgagggacaggaggtccagatcaagggacctctggatgcactgaaccgcggcattgcgatggtgcatcaggaattgcagcccatcccggagcgttccatcggcgagaatatctatgtcgggcgctacccaaccaagaaatacggacccgtcaccgttatcgaccacgacaagatgtacgaggatgcggccaaggtcctgaaggaagtccatctgaattatgatccgcacgcaaagctgggcaccctcagtgtttcccagatgcagctggttgagatcgccaaggccgtttcggctgactgcaaggtgctgatcctcgacgagccgacctcctcgctgacggcggccgaggtcgaggcgctgttcaccattgtcgatgagctgcgcgccaagggcgtctccatcgtctacatcagccacaagatggacgaaattcttcgcatcagcgacgaagtcacgatcatgcgcgacggccagtacatcggcacttgggaggccaaggaactgaccaccgatatgatcatcaccaagatggtcggccgtgagctgtcgaacctctacccgccgcgcagcaacacgcccggtgaggtcgtctttgaggtcaaggattttacctctatcaatcccaagagcttccgccatgtcaacttcaatgtccgcaagggcgagatcctcggcgttgcgggtctggtcggtgctcagcgcaccgagctgatggagggcctgttcggtctgcgctgccacacatcgggcaccatcacctataagggcaaggaactgaccatcaaccagccgcaggacgccatcaaaaacggcatcgccatgctgaccgaggaccgccgcgccaccggtattctgggggtgctttccattgcggataacgtctccattgcatcgctgaacaagtatctgatcggcggcatcatgctggacgacaacaaaatcgaaaagctcgtgcaggataatgtcgccaagctgtccatcaagacgccgtcctccaaaacgcagatccagtctctgtccggcggtaaccagcagaaggtgctgattgcccgctggctggccaacgaccccgatgttttcatcatggacgagccgacccgcggcatcgacgtcggtgcaaagtatgagatttactgcatcatcgccgagatggccaaacagggcaagagcatcatcatgatctcctccgaaatgagcgagctgatcggcatgtctgaccgcatcatggtcatgtgcgatggccgctgcaccggctttatcgacggtgataaggcgaatcaggagaacatcatgacgctggctacccagtttgaataaggaggaatccgaaaatggagaaaaaattcgacttaaaaaaattcctgtccaataacgcgatcattattctgatcattttgctggccctcttcgtcggctgcacgacccagaacttctttaccgagacaaacggcaaaaacctgctgctgaacgttgccccgcgtttcatcatcgcctgcggcgtttcgggatgcctgattaccaagggcactgacctgtccgccggccgtcaggtcggtctggccgcctgcttctccgccatgctgctgcagagcgttgactactctgcccgcatgctgccctggctgcccgatattccgtggccgctcgccctcgtcatcgtcatggcgatcatggcctgcttcggtgccatcaacggctgcattatcgcattcctgaaggttcctcctttcatcgctacgctgggcatgcagaccatcgtttacggcctgtgctccgtcatcaccaacaaccagcccatgggcggttacaagcagagctacctgaccgttgccagcggcacgctgggccccatcccgttcctggccatctttgcgctgatcgtcggcatcttcttctggttcctgtacaataagacccgtcacggcaagtacatgtacgccatcggcggcaacgagaacgccgctcaggttgccggtgtcaacgtcaccgcgtccctgatccgcatctacatcctggcctcctgcatgtatgctctcggtggcttcctcgtcggcgcaaaggccggcggtgcttccaccaacaccggcaacggctatgagctggaagctatcgcagcctgcaccatcggcggcgtttccaccaacggcggcgtcggcaaggtctccggcgttctggtcggcgttctggtctttgaagtcctgaagatttgcctgcagttcctcggcgtcgaccccgcctacacctacattgcacagggccttgtcatcgtcatcgccgttgcccttgacctgcgcaagtatctggccaagaagtaacctatgggcgaagaaaagactactcccgagaccgaaaagaaacccgaccgccccgaccgcagccagctgaatgcctttgagaatttctacgagaatttccgcaaggtcccgctgaaatacatagacatcttcatcggcgtctgtgttgctgcactggtcatcgtagtgctggtcggcattctcaagagtaaggggatactgtaaaaaaaagaagcaccgttcacggagaaaaatctctgtgaacggtgcttttgtttgtgctttagcagagttgtaggggccgcacatctgcggcccgcaaccttgcctttacagcgcggcggccttctagccgagaggtggatatggaatttgccccaattattttttgatcgcctttttcttcttcctgacactatacccaaagctgcccagcttgcggcccagcgccagataatcgccgtggctgtacacaatgagcttcgccttgttcaggcagagcttgccgctctcatcaagcagccgctcatcgacatccacggccacacattcggccaaaaacaggtcgtggctgcccagcggaatgacctgcgtgaccttgcactcaaggtttacggggctttcctcgacaagcacggtgccgaccttggcggcaggcgcagcggtaaggtgcatggcggcgaacttatccacatcgcggccgctcttgacgccgcaccagtcgatggcacggacaaggctctcggtgggcaggttcacaacgaactcgccgctctccttaattaaatggtggctgtaccgctcgggccgcacgctgatggacagcatgggcggctgggtgcagattgtgcctgtccagcccacggtgatcaaattcggcttttcggggctgccgcagctgactagcaccggcggctccgggttcagcagggtagaccccttccatacctgacggctcattgtgcgtcctccttgatctctccgaaattcggcgttgcttcgctgatgatgtagcgcgggcgatgctttgtttccagatagatcttgccgatatactccccgatgacacccagacagataagctgtacgcccgatacaaagcagatgatgctggtcatagacgcccagccggagacggtaagccccagcgcggcctcgatgacagcccacagcacgccgataaagctgaccagcgccacaaacacgccaaagcctgtaatgaagcggatcggctttgtggacaggctggtgatgccgtcaaaggccaatgccagcattttggagagcggatagtggctttcgcctgcaatgcgctcgtggcgctcataggtcacgcaggtggatttaaagccgaccagcggcaccatgccgcgcaaaaacaggttgacctcccggaatttggcgaactcctccagcacgcggctgctcagcaggcggtagtccgcatggttgaatacgacctcggcccccatggcattcagcagcttatagaagctttcggcggtaaagcgcttgaaaaaggtgtcggtgtcccgcttgctgcgcacaccgtacacaacatcacagccgtcacggtaggcgtccaccatgccgtccatggcgttgatgtcgtcctgaccgtcacagtcgatggagatggtgatgtcgcagcggctcttggcctccatcagcccggccaacacggcgttctggtggccgcggttgcggctctggcagatgccggcatagtgtgcatcgctctcggccagctcgttgatgatctcccatgtgcggtccttcgagccgtcatttacaaacaggacccggctgtccgggctgatcttgcctgcagcggtcagatcggtgagcttttgcaggaacatcggcgcggtgatgggcagaacctcctgctcattgtagcaggggatcacgatatacaggatgggacaggtgcggtcattcatagcataaaacctcagaatataatagtggcaggcagggggtcacgggcaggccgcgcgcagccgctctgggtcaggcagcttaaagctgccgcggaacagctcgatcagcccctcctcctgcatgcggctcaattcacgggagagcgcgctgcggtcgcagttcaaaaaggcggccagctcggtgcggctcatggcggtggtaaaggtgtcggccccgcagcgctcgcgctgctccagcagccacatgcagatgcgcccgcgcaggctcctgcagcagatcagctctaaacggcggtccagcgcaaaatatttgtcgctgatggtttcaagccagttctgcagcagctttaaatgcgcactgtgcagggctgcgcaggggcgcagcagcgcatcacagggcaggtagaggatcaggcagcgctcggcggcacagacattgacggggctgcggctgcgcccgccggccagtacatcggcaaacacgccgcccggccccatgtgggcgatgaccaccgtgccgccgtcagccagcggcttgctggccgtgatggcaccctccagcacaaggccgagctcgtgggtttcgtacccggccatcagcagcagctcgcccttggcgtagcggcgcacccgcggggcaaagcaggtcatcagcgtgtccagttccgcatcggacaggccgcgcaaaaggctggtgctgcgcatgatctcatagtagggtgtgtagtccatacggctccttgcgtgggttacaaaagggtttcctgttgccggtgcaacagacaattcatctgtattatagtatagtaaggccgcaaaagcaacaaggaggataagatttttatgaaactgaaacgcgttttcgccgctgttacggcgtttgctatgtgtgccgctctggcaggctgcggtgcggaagcggccgtgagcgagtctgctgccgaatccgctgcggaatctgccgtggaggccgcaccggaaaccgaggagaccgcggatgccgccgcgacagaagccgccctgcgcatcgcgggcctgaaaggtcccacaacgatggggcttgtcaacctgatgagcgatgaggtcgcatccagctatgatttcacgatgtacggcgcggccgacgagattgttccgctgctggtcaagggggatctggatgccgccgctgtgcccgccaaccttgccgccacgctgtacaacaagacaaacggtgcggtggaggttgcctgcatcaacacgctgggcgtgctctacattgttgagaacggtgataccgtcaactcggtcgaggatctgaaggggcagaccattgtcacgaccggcaagggcgctacccctgagtatgtcctgcgctatgtcctgagcgagaacggcatcgaccccgacaaggatgtcaccctggaatacaccagcgaggccaccgaggccctgagcaaggtgcaggcaggtgaagcaaccatcgccatgctgccccagccctttgtcaccagcgcgctgtctcaggtcgagggtctgcgcgttgcactggatatgaacgaggaatggcagaaggttgccggttccaagctcgttaccggtgttctggtcgtccgcaaggatgctgtcgagaatgaccccgaagcgtttgccgctttcatggacggctataaggccagcgttgaggccgccaacaacgatgtcgagggcacggcagccctctgcgagcagtacggtgttgtcgccaaggctgcactggcccaaaaggcgctgccgcagtgcaacatcgtctttgagacgggtgacgagatgaagaacgaccttgcgacctacttcaatgttctgtatgccgccgaccccgccagcgtgggcggcactctgcctgcggacgacttctactatgtcggctaaattccatttgcatgccctctgcagggggcgatgcaagcatccgcccctgcaaacgccgttgtggcaaaaagccgccgccatccttgcatggattgcaatttggcaatttgctgctgtggggctggggcatggcgggctgtttctggccacgcccttgcagacactgggggcgctggcagcactggcgcctaccgccgcgttctggcagcgcatcgtgttcagtgcgctgcgcatagtggcgggctttttgctggcagcagcaggggggttgctgctcggtgcagcaggggcgcgctggcattgggtgcgggtattcattgaccctgccatgcagcttatacgcgccatgcctgtggccagctttgtcattctggcactgctgtgggtgcgcagtgcgaatctttccgtcatcgtcagctttacccatgtgctgccggtggtctatgcgggggtgctggccggcatcgccgatacagacacgaagctgctggagatggcacaggtctaccgcctgccgctgtctgcgcggctgcggtatatctggctgccgggcatcttcccatccttctgtgaaagctgcatcgctgcaatgggcatgtgctggaagagcggcgtctctgccgaggttatcggcctgccggatcattcggttggcgatgcgctctaccgcgccaagatcacgctgtccacaccggatgtattcgcatggacgctggtgatcgtgctgctgtcggcggcgctgtccgctgcggcagcccggctgctgcgcacggcaaaaatgcgcctctgcggggaggtacaggtatgagcattgagatacagagcctctgcaaacgctttggcgatacacccgttctgcaggattttacatggacggtcaatggcccggcagtgctgatgggccgctccggctgcggaaaaacaacgctgctgcgcatcctgatggggctggaggcaccggattccggcactgtcatgggcgtggagaggcccgctgccgtctttcaggaggaccgcctctgcccgcagctgactgctgctgccaaccttgtgctgactggccatgggctgacgcggcaggaggcagagcgggagctgcgcacactcggctttgccgatgcggagctggcactgcctgcagcgcggctctccggcgggcaaaaacggcgcgctgcgctgctgcgggcgctgctctgccgtgatgcacaaacgctgctgctggacgagcccttcaccggcatggacgccgagctggtagccgatgccgtcaacgccacaaaacgcctgacgggggagcgccccacgattctcgtcacccacgaccgcgccgctgccgatctgctcggctggccggtaaaagaagtataaaaagcacgcccgcgcgaaagctatcgcgcgggcgtgttttttacataagctctgtcagaatcgcgttttgcacgaccatcccggcgggggtcagccggaagctgccgccctcccacacagcgtagccatgggtgacgcactggcgcataaatgcctgctgtgccgcggtgaaatgcccgccgcggtgcgcatattcggctaaatccagcccgcgggtcagccgcagctgcatcaaaaggtaatcctcggcagtgcagtcaccctcggtttcttcgcgggcggtgccgctgataaaatgttgtacatcgccgggccagaagctgcgcaccccgtcaaggcagctgtgggctgccgggccaatgccgcggtacggctcgcagttccagtacagcaggttgtgccgtccctcgtgcccggggcgggcaaagttgctgatctcatactggcggtagcctgcggcctccagctgctgcacggcgtacaggtaaaaatctgcagcggcatcggcatcgggcagaccggcgggcgggttgcggtaaaacgccgtgcccggctctacttttaataggtaggcggaaatgtgggtgcagccgccattctgcagcaaggccagtgtgcggtcaaattcggcgtttgtgtactgcggcagcgccagcatgatgtccccgcaaatatcggggaaaccggcctcctgtgcccatgccagcgcccgggcggccccggcagcggtgtgggtgcggcccagccgctgcagctgtgcgtcatcggcactctgcacgccgaagctgatgcggttcaccccggcctgccgaaacccaagcagtgtttcgggcgtcaccacatcggggttggcctccagcgtgatctcggcaccgggcagggggtcagcagcctgtatcagggtgctgacctgccccggggaaagcagcgcaggggtgccgccgccaaagtacagcgtgtcgagtcggcgggtgtttttggcaagctcccgcagcagggcatctacatacgcctgcggcacgccgcgcgcgcccggtgccgagtaaaagtcacagtaccggcattttgaccggcagtagggaatatgaatataaatgccaaacggctcgtttctggacataatgcaccttttgtatgatggatttcacaattctgtgatgatttgctatcaaaatacctgtataatacatcataaagaaaggagattgcaactatgaatcgcaattattctactatttcttatgcggaaagcccgtttggaaccctttccgagtttatgtccaagagcttcggctggatgtttgcgggtctgctggttacctttgcggtcggcatcggcgcggtgatgacagggctgatctatccgctcatcagctctggcctgtttattctgacctccattgccgagctggtgctggtgtttacgctgtctgcccgggtgcagaagctgcagccctcgacagccacgggaatcttcttcggctatgcggtgctgaacggcctgaacctgagcgcaatttttctggtgtatgactacggcagcctgatccttgcgtttctggtcggcgcggtatatttcggcgtcatggccgtgtacggcaatgtcaccgaccgcgacctgaccggctggggtcccaagctgatgggcggcttggtcgcgctgatcgtctgctctctggtgggcggcctgctgagtatgttcggtctgaacttcggcattgcggacctgctgctctgcgcggtggggctgttgatcttcatgggcctgactgcctatgacacccagatgctcaaatactactactcttatttcggcggcgatgcggcaatgctgcacaaggcctccatcatcggcgctttgaatctctatctggacttcatcaacatcttcctgtatatcctgcgtatgctgggccgcagaagcaacgattaaaaaaatcaaaagttttttgcaaaaacctgttgacaatccatggcagctttgctataataacaaccgtcgtcaggagcaaacggcactgacggcggccagcatgggggattagctcagctgggagagcgcttgcatggcatgcaagaggtcaccggttcgatcccggtattctccaccacaaagacccgacagagatctctgtcgggccttttttgttgtgcgcatcagctagcatgggtgaaaaccgcgccagcaggagaaattttcaaaaaccccttgcattttgtgccggggtgtggtactatactaaagcaatacacacgcattgcgctgtttttttgtgccttttttgcggtaagacgccaaaaggttagaaaacagaaaccccgcagtgcggagggtaaaaactaaattttttggaggaaacaaacaatggcagtcgtatctatgaaacagcttctcgaggccggtgtccacttcggccaccagacccgccgctggaaccccaagatggctaagtacatcttcaccgagcgcaatggtatctacatcatcgatctgcagaagaccgtgaagaagctcgatgaggcttacaactttgtccgcgacaccgctgctcagggcggcgagattctgttcgtcggcaccaagaagcaggctcaggagtccatccgtgacgaggctacccgctgcggcatgcactttgtcaatgctcgctggctgggcggcatgatgaccaacttccgcaccatccgtaagcgcatcgaccgtatggagcagctcaagaccatgcaggaggacggcacgtttgacctgctgcccaagaaggaagttgtcaagctcgagctcgagatggctaagctggacaagtatctgggcggcgtcaagaacatgaagagcctgccgaaggctatgttcatcgttgatcctcacaaggagcgcattgctgtttctgaggcccgcaagctgaacattcccattgttgctatcgttgataccaactgcgatcccgatgagatcgattatgtcatccccggcaacgacgacgctatccgcgctgtcaagctgatctccggtgccatggccagcgctgtgctggagggcaagcagggcgttcaggacgctcccgccgccgagaccaaagagggctgattttatcctataattcagaaaggacacaagagctatggctatttctgcaaaagacgttatggaactgcgtaagcagactgactgcggcatgatggagtgcaagaaggcactgactcaggctgacggtgactttgagaaggctatcgagatcctgcgcgagcagggtctggctgctgccaacaagaaggccggccgtatcgccgccgagggcatggtttacgccgtttctttccccaactgcgctgttgttgttgaggtcaacgctgagactgacttcgttgccaagaacgacaagttcgttgagttcaccaagaatctggctgaggtcattgccgagcagaatcccgctgatgttgaggctctgatgggctgcaagatgggcgacggcactgttgacgatgccctgaaggctctgatcctcgtcatcaaggagaacatcaaggttcgccgtttcgcccgctatgagggccactgcgctgcctatgtccacggcggcggcacccacggtgtcatcgtcaagttcgagaccagtgaaggggttgctgctaagcccgagttcgctgctttcggcaaagacatcgccatgcaggtcgcagctgctaaccccagctacctctgcgagtccgatgtgcccgaggatgttctggccaaggagaaggaaatcgttctggctcagatggccaacgatcccaagactgccaacaagcccgacgctatcaaagagaagatggccatcggcaagctgggcaagttctataaggagaactgcctggtcgatcaggccttcatcaaggacggcggcatggatgtcaagaagtacgttgctgacaccgccaaggctctgggcggcgacatcaagatcgcttccttcacccacttcaccaagggtgagggtctggagaagcgcaacgaggacttcgctgctgaagtcgccgctgccatcaagggctaatctaaccgcataattccggccgcctgcgcgtttgcgcgggcggctttttgattggcggctgccgtgatatgcaacaggatatctgcaaatcgccgcgcagaatgctgcttaccttgcctcattgggtaagtaagccgctgatacaggcggaataaataaaaatccccggaccgtgattgcagcggtccggggatttttttacataataaaaaggacaggcagcgagttactgctcgcggaaggtcagcttatcatcggtcatgctgtcgacgatcgcaaggctggccagcttgtaaccggcagcacgcaactcgtcaccgcccggctggaagcccttctcaatgcagatgccaatgccgcccacggtggcgcccgcttgggcgcagacatccagcaagcccttcatggccttgccgttggcaagaaagtcgtccagaatcagcaccttgtcagcaggggagaggaacttcttggcgagggtgatatcgtaatcacggccgtaggtataagaatgtacggtggaagtgtaaacatcgccatcgatgttcttgctcttagccttcttggcaaagaccaccggcacattgaaatgccgggctgtcatgcaggcgatggcaatgccggatgcctcgatggtgaggatcttgttgatgccgtcgtttttgaaaatgcgatagaactcctcaccgatcttatccagcaattcaacatccagctggtggttcagaaagcagtcgactttgagaacattgccgggacgaacctgcccctgctccataatacgctcctccagaagtttcatctgcgctgatgcccctttcacaaatccaattttcattctattatgacaaattctgcggtgtttttcaagtcttttacataaaaaagctgcgctaaaatgacaacaggtaaagttgataatattttgtaatacaaatttgtgaaaatcccccataaaggcgggggtttgacagcggaacactgttgaattgcattattgcatttttgtgaacaaaagcttataatttagtcaatgaaacgacagggggttgtgcgaacccattactgccgcttgcatatcaggagggaatgtacatatgaaaaaactcgttagctctgtgctcgcagcctctatggtcatgagcctggccgcctgcggctccaccgcatctaccgacagcgcagcagattcttccgttgcctctgctgcttcttccgccgccaccaccgaggcagcgggggagggctccggcgcttataacggcacccccatcaagatcggcggcatcggccctgttaccggcggcgctgccatctacggtcaggccgttaagaacgcccaggagctggccgtcaaggagatcaacgccgccaacggcagcgatgtctttgagtggaagttcgaggacgatgagcatgacgccgagaagagtgtcaacgcctacaacaccctgaaggactggggcctgcaggttctggccggccctgtcaccaccaccccgtccattgccgttgccgctgagaccgccaatgacaacctgtttatgatgactccttccgcttctgcgcccgctgtcctcgagagcggcgacaatgtgttccagatctgctttaccgaccccaatcagggcgttgcctccgcagattatatcgcagacaacaagctcggcaccaaggtcggcgtcatctacgactcctccgatgcctattcttccggtatttatgagaagttcaaggccgaggccgatgccaaggggctggaaatcgttgccgcagaggccttcaccgcggacaacaagtctgacctgtccacgcaggttgccaagtgccagcaggccggtgctgatctcgtattcctgcccgtctactatcaggaggcctctcagatcctgattgccgccaacaagagcggctatgcgcctgtcttcttcggctgcgatggtatggacggcatcctgaccatcgagggctttgacacatctctggccgagggtctgatgctcctgactccgttcgctgcagacgcacaggatgaaaagacgcaggcctttgtctccgcttacaaggaggcctacggtgacaccccgaaccagttcgcggccgatacttacgatgtcgtctacgccatctatcaggctgcggttgccggcggcatcaacggcgacatggatgcctctgacatctgcgatgctctcaaggctcagttcaccagcatgacctttgacggtctgaccggcgagggcatgacctgggatgcctccggtgcggtttccaaggctcctaaggctgttgtgatcaaggacggcgcttacgcagctatgtaacccgctgcggcacaggtaaactgattatttcgttgccaaggggggactgccggacataaggttcggcagctcccctttttattattacggcatcaagcgttttctgcaaaaacatttgttttttaagggaaaacaacaaaagccattgttttggcaatggatttgtgctactatgaactcatattttcctgtgcgcttgcggcaaacaacaatcggcaggggagaaaaatagagtgaggtgtattacgcaatgcagtttttatcctatctgatcaacggcatcagtctgggcagtgtctacgcattgattgcactgggctataccatggtctacggcattgccaagatgttgaacttcgcacacggcgatgtcatcatgatcggcagctatgttgtcttttttgccttcggctctgcaggcatgaacccggtgctggccatcgtcctgtcgatggtggtctgcacgctgctcggcgtcacggtggagcgcatcgcctaccgccccctgcgcgaggctccgtctctggctgttctgatcacagcaatcggcgtcagctatctgctgcagcaggtggcccagctggcatggacctccaaccccaagagctttacctccgttgtcaccggtctgaagccgatcagcctctttggcgggcagctgaccatctcggttgaaacggtcgtgacgatcattgcctgcgttgtcatcatggcgatgctgatctggttcgtcaacaacacccccgccggtcatgctatgcttgctgtgtccgaggatcgcggcgctgcccagctgatgggcgtcaatgtcaacgcaacgatctcgctgaccttcgccatcggctctgcgctggcggctgtggccggtgcgctgctctgttcctcctatccgactttgcagcccaccaccggtgccatgcccggcatcaaggcgttcgtggcggcggttttcggcggcatcggctcgatcccgggtgcgttcctgggcggtatcctgctgggcatcatcgagaacctgagcaaggcctatatctcgacccagctgtccgatgccatcgtttttctggtgctggtcgtggtgctgatcgtcaagcccaccggcctgctgggcaagaaagtcaatgtgaaggtttgaggtggcagctatgttgaaaaatatgaaaaagtccaccaagagcaatctcgtcacgctgggtatcgtggtcggcttttatatctttatccagattctgggcggggtggggctgctgaccaactccttctccggtcagctggtgcccatctgtgcctatgtcattctggcggtctcgctgaacctgaccgtcggcatccttggtgagctgagcctcggtcatgcgggcttcatgagcgtgggtgccttctccggcacgctggtctatgtggtgctgcgcgagaccgcaccgcagccgctggcaatgctgctggccttcgtggtcggcggcgtggtagccggtctgttcggcttccttgtcggcatccctgttctgcgcctgtccggcgactatctggccatcgtgacgctggccttcggtgagatcgtcaagaatgttatgaacgcctgctacctcggtctggattcccgcgggctgcacttctcgctcaaggattcggcctcgctgaatcttgaggcggacggcaaggtacttatcaacggcgccatgggcattaccggcatcaaaaaggcgtccaccttcaccattggtatcgtgctggtcatcatcacgctgctggtcatcctcaatctcgtcaactcccgcgcgggccgtgccatcacggccatccgcgacaatgagatcgccgcccgctcggtcggcatccccatcacgaagtacaagctcatggcctttgtgacctccgctgtctttgcgggcgtggcgggcgtattgtacgcgctgaactattcttcgctggtcgcaaaaaagttcgactacaacacctccatcctgattctggtgtttgtcgttctgggcggcatcggcagcctgcgcggctcggtcattgcggccacggtgctgacagtcctgccggagctgctgcgcagcatgaacgattaccggatgttgatctatgcaatcgtgctgatcgttgtgatgatctttaaccagagcccgcagatgatcgccctgcgcaagcggctgacggcacgcttccgcaaggaaggcgcggacacaaaagcagcaaaagagaaaaaggggggtggcgtaaatggcactgctggaagtcagtaacctgggtattgcgttcggcggcctgcaggccgttgcgcagcttgacctttcgattgaaaagggccacctgtacggcctgattggccccaacggcgcgggcaaaaccacggtctttaatatgctgaccggcgtttacaagcctaccgagggcaacatcattctggacggcaaggacatcaccggccagaaccccgagcttatcagcaagtccggcattgcccgcaccttccagaatatccgtctgttcaatgagatgacggtgctggacaatgtcaaggtcggtttgcacaaccagatcaaatacggtatgtggaccggcatcctgcgtctgcccgcctacaaggaaaaagagcacgagatgaaccgcgaggcaatgaagctgctcaaaatctttgaccttgacagggaggcatattacaaggccagccagctgccctacggtaagcagcgcaagctggagatcgcccgcgcgctggctacaaacccgaagctgctgctgctggacgagccggccgccggcatgaaccccaacgagaccgaggagctgatgcacaccatccgcagcgtgcgcgatcagttcggtgtggccatcctgctcatcgagcatgatatgaactttgtcatgggcatctgcgaggagatcacggtgctggattacggccgtgtgattgcccgcggtgacggcaaggccatccgcaacaacccgaaggtcattgcggcatatctgggaggtgactgacgatgggcgagatgctttctgtcaaaaatatcaatgtttactacggctcgatccacgccatcaaggatgtgtccttccatgtcaatgagggcgagatcgtcacgctgattggtgccaacggcgccggcaagacgaccacgatgcacgcaatcagcggcctgctgaagctgcagagcggtgagatcgactattgcggccagaccatcagcaagatggaggcgcacaagatcatccgcctgggcttggcgcaggtgccggagggccgccgtgtattcagcggcctgaccgtgcagcagaacctgcagatgggtgcctacacccgccgcgacggcaaggaggccatccagaacgatttcgacatggtgtttgacctgctgccgcgcctgaaagaacgccgtaaccagcccgccggtacgctttccggcggtgagcagcagatgctggccatgggccgggctctgatgtgcaagccgaagatgctgctgctggacgagccgtccatgggtctgtctccgctgctggtcaaggagatcttcaagatcatccgtcaggtcaaccgcaacggcgtgaccgtgctgctggtcgagcagaacgccaagatggcgctggagatcgccaaccgcgcctatgttctggaaaccggcaccatcaagatggagggcgaagccaccgagcttgccaataacatcgaggtccgcaaggcatatctgggctgcgaataaaatagcaataaaaaatcctgtgcccacgaaaagggcacaggattttttgtcactataaaggcttcccctgagggggaagctgtccgcgaagcggactgatgaggggcaaaccttgccgtggcagcccattcacgggcaatcgcggcagccccgcccctcatccggcctcggtcggggccttggccaccttcagtctacgcgctaagagccgcctacggcggttgcgctccgacacgcgcctgcgggcgcagcccctcgggggaaggcaaaacgccttaatattccttccgcttataaatccccacgcataccttatagctcacaaaatacaccgccagcagccctacaaacgctgcaaccagccccgtcagcaacacttcgtcggaggcattgaacagctgcatcaaatcgggcgagacggaagcgaccagcccaatacaaccgccgagcacaccgaggatcagaaacaaccagctgcgggccttgacactgttgaaccgataggacagcggcagcaaaagcgcgaccaacagcagcgccatgctgccgcaggccagcagggttgccagacactcgaggggcggtaccttatacacagtgtgccggaacagcaggggcggcagcacattgttcagcgccacgatcagcaccgtacacactgtgcccagcaccagcccgcacagcccaaacaggtatttgctgcccacaagctgcgcgggtgttacgggcagcgtgcgggcgtagatgtcccaatgggagttctcgtcaaacgaaatcgtggaggtgatcagaatggaaaatacaacgagcaatgcataggccatcccggtctgcccggtcagaatgctgatgccgccgtagaggaacgcgataaaaaatgcagactgtttgtaggaacttatcagagtggcccattctttatacaaaagccctttcattgtgcatccctcccgctgtaaaaccgcatgatgtcgtcaagcccggccgcatcgcagatggcgtcgggcaaaagctcccgcaccgcagcacgattcttgacgaggctttcacacccgaacgccccgcgcttggtaaagatcaccaaatcagcaggcagggaagggagcacactctcgctgcagcgcagcacgccgtagctttgcagcagcgcgtccttgttctcgtggaacagcagctgcccattgtgcaggtaggcaatagaatctgccacctgctccagatcggcggtgatgtggctgctcatcagtatgccgtgccgctcatcctgaatgaactccaaaaacagatccatcagctcaccgcgcaccacagggtcaagccccgccgtggcctcgtccagcaccagaagctcggggtcatgggccagtgcggcggccaggctcaacttcagccgcatgccgcggctgtattccttgagttttttgccggcgtccagcccgaaacgccgcagatacgcggcaaaggcttcatcgcgccaccgcgccccgaacacgcccgcaaggctgcgcccgacctgtgcggcgttcagactttcatagaaaaaagcgtcctcaaatacaacgccgagcttggcgcgggtggcggcgtcggcaggggagccgcccaacagctccgccgtgccaccgtcggcccggttgacgccgcagagcagctttaacagcgtggttttgcctgcgccgttctcgccaatcagcccgacaatgctgccggcaggcacggtcaaatcaaccggcccgagcgtaaaattcttgtagtgcttggtaatgccgcgcagtgcggcggcgtttgctgccataggtcagccctcccacaaaaggcgcagggtctctgcgacctcgtcgtagccgatgccgcccagccgcgcggcgtccaccgcgccctgcaggcagtcctcgactttttttaagtgttcttcccgcagcagagcgggattctgcgcagcgacaaagctgccccggcccggctgggtcaggataaagccgtcgcgctcaagatcctcatacgcacgctttgttgtgatgacgctgatgcgcagttccttcgccagcaggcggatgctgggcagcgcgtccccggggtgcagcgcaccggacaggatctgctgcttgatctgccgcgtgatctgcgcgtagatcggctcctgcccggaattggaaagataaatctgcatggtaggaagctccttcatctcgaactgtacatattcgatatttacagtatatacacactatacacagttgtcaagggggtggcacaaaaaaatcccccgcacccgtatgggtgcaggggtaaaaggcttccccagagggggaagctgtcaccgcaggtgactgatgaggggtggacttgccgttacgacccatttatgggtaatagtgataacgccgcccctcatccggcgcttcgcgccaccttccccctgtgggggaaggcattacagcagcgcagccggcggtctgtcatcctcactgccgggctgggtcagcatatccatcagcttggggtagatgtcgctgccgtgggcgataaagttgtttttgatcatctcggcggtcagcttgtcgggcatggccagctccatgcggaacacatcactgcccatatcgccgatggagcagacaacgctgaacttgccgtccgtctcctgcacaacggcgcggttggaggcggcgcggtggttccagctgcggatctgcataacggcgcggatggcactctcccgcacggtgcggggcaggtcgtaggccagtgtgtcggccacggttgcgcccttgcgggtgatggtataccggccctcactgtccacggtgacaagcttctgcttttccacctcggcaagcgcatcggcaaactcaaaatagttgacaagctgctcctgcaaaagcgcgccctgcagggtttcgtgctttaccgggcctgccactttgacaaggtagcagagcaacatacggatctgcgtgtcgtctgtaaggccgccggggcgcacaccggcggtaaatgcttctgccatcgggatcacttcctcaagaaattttcgtttaccaatattatacacgcccggccgggctgtggcaagatgcgaaaaagccaaagtgacaaaaatcggacagttaaaagaccgtttcgatctgcttgcggctctgcggggtcgagtaggtccaccgcttgagccgcccgcgcgtcacaaaatagtgcggctcaaaccgcaggggctggttcagatttttgttcacgaccacaagcttgatcttcatcttgtccggcaaaatgttcttgatgtacacgctcacggcctgcccggggcgcagggtggaatctgcctcagccagaccggcaaggttcggcgctatctcgataaaaacaccgtaatcctcaacgctgcgcacaatgccgacaacggtctccccggcggcaaagcaggcagcgttctcgctccaggttcccaaaagctcccgcagggtcaggacgatgcgcccctgtgcatcgcggtttttaatcgcgcagagcaactgctggccgacctgcacccggtctgcaggcgaggcaatgcggctgaccgacaggcagtcgatgggcaggagcgctgcaatgccgcagccgatgtcgcagaacgccccgaagttttcaatgtgggtcacggtgcagggaatgacgctgcccgcctccagcgtgtcaaggtactgcgcgcggcagcggcgctgtgcctccgcgcgggagagtaagtagtattcctctccattctcgtcagtctcggtgccaagaatgacaaagcaggtcgggcggcccacccgggtcagcacggcaatgtccttgaccgtctcgccgggcgcggcgtctacacagtcggcaaagggcatgatgccccgcatgccgcccaactcaaaccgcaggcggcggtcggtatcgtaggcaagggcggtgctttgcagcacctcgccgccggcgatgcagcggctcagctcctcccggctcaggtggttcgcattgcggcaaagaccttcggctctgaattccaacattttcggttcctcatttcttgtgtattttgtggtggcttagtaaacttttatgcgggatgtttgcaaaacaataccggctgtactataatagacatgatattctgaaaagaaaggcggtgtgccgtatggacatacaggtcggggatgtgatccagaccaagaagccgcacccctgcggtgcgaaccgtttcgatgtgctgcgcgtaggcatggattttaaaatcaaatgtcagggctgcgggcatgagatcatgctgccgcgtgccaagatcgagcgcaacatcaaaaaagttctgcgcgcgggggagcagtagcgggctttgcacaatgtattggcaaccttttcgggcggatatggaatccacccctacaaaatgaccctgtgcaaaggagaacctatgcagaactttaccgagctttacgaggtcgagcgccgctatgaggagctggcccacaagatgtccacgcctgatgcggcggccgacgccgaggcgtatgcgcagatgatgcgtgactacaaagaacttacccccttgatcgaagaataccgccgctataccgacctgcagcagcaggagcaggacgcgaaggaactgcttgccgcagagtcggacccggcgtttgctgctatggtacagcaggagctctgcgaaattggccggaatctggcgcagagcgaggagaatctgcgcctgctgctgatccccaaggacgcagatgacgaaaaaagcgttattctggagattcgcgccggtgcaggcggcgaggaggccgccctgtttgcccacagcctgtggcgtatgtacacgatgtacgctgccaggcgcggctggcagtgcagcaccatcagcgccaacgagacagagctcggcggcgtgaaggagatcgtattctcagtggaaggccccggcgtatacagccgcctgaaatttgagagcggcgttcaccgcgtgcagcgcgtgccggagaccgagacgcaggggcgtatccacacctcgaccgtgacggtggctgtcatgccggaggctgaagaggtcgagctggaaattgacccgaaggatctgcgcatcgacaccttccgctcctccggcgcgggcggacagcacatcaacaagacctcatccgccatccgggtgacccatctgcccaccgggatggtcgtggaatgtcaggaccagcgcagccagcgggaaaataaggagcaggcgctcaaggtgctgcgcagccgcctgctgcagcaaaagcaggacgcctacgatgaggcctacaacgcccagcgtcaaagtcaggtgggcagcggtgaccgcagtgaaaagatccgcacctacaacttcccgcaggaccgggtgacggaccaccgcatcggcttgacgctgcgcaacctgcagggcgtgctggacggcgatctggaccgcgtggccgagccgctgattctggctgaccgggaagaaaagctaaagcaaagcaaaccgagtgaggaagggaaataagcaatgaatacacaggttttgcccatcacgccggagagcatcgcgctggcagccaagctgctgcagcagggcgagctggtggcgctgcccaccgagacggtatacggcattgccgccgatgcccgcaacggcgaggcggtcaagaaaatttttgaggcgaagggccgcccgcaggataaccccctgatcgtgcatatctgcggcatggagatgctgcagggcatcgtgtccgaggtgccggagcgcgccaaaaagctggcggcggcgttctggcccggcccgctgacgatggtcatgccccgcggcgaggaggtcagtgcggtcacctgcgcagggctggataccgtgggcgtgcggatgccgtcccacccggtcgtgcagcaggtcatacgggagagcggcgtggcctttgcagccccgtcagccaacctttccggcaagcccagccccacgaacgcccccgacacactggccgacatggacggccgcctgccgctgatactggacggcggcgaatgcactgtcggcgtggagtccaccgttgtggccgtgacaggggagcatccgatgctgctgcgccccggctatgtcaccaaggagcagatggaggccgtcctcggcgaggaggtcctcgtcagcccggccatccttgaaaagctcaaggatggcgaggtcgcgcgctctccgggcatgaagtacaagcactatgcccccaaggcgcaggtgacgatcctgcgcggtgacttcgcacgctacagagcctatgtggagcagcacgccgcccccggcgtatgggcactctgctttgacggggagggcgcacagctgccggtgccgttcatcgagtacggcaaaaaccacgacggtgtgacccaggcgcaccatctgttcacggcgctgcgcgatttggataaacacggcgcacaggtcgtctacgcccgctgccctgagcaggacggcgtttcgatggccgtctacaaccgcctgatccgcgcggcggctttccgggtggtcacgctatgagggtggtaggcatcacggggcggtccggctgcggcaaatccagtgcgacaaatttcttgcgggagcaggggtatccttgtattgatgcagatctggtcgcgcgggaggtgctgctgcccggttcggcctgtatcccgcagctgcaagcagcgttcgggacggatatagccgatgaaaacggtgaagtccgccgccgcctgctggcagaccgggcgtttgccacgccggaggggacggccgcattgaccgccatcacccagccggagatcctgcgccgtattgatgctgcgctggcggacgccgagcgggcaggggcgaagattgcctttgtggacggtgcagtcattatcggcacgccgtttgaaaagcgctgtgatgcactgattcttgtcacggcaccttatgaaaccagcgttgcccgcatctgcgcgcgggacggcatcgcaccggaaatggcccggcgccgtctggatgcgcagatgccacttgagcgtctgcgcgcagcagccacagcggagcttgtcaatgacggcacaccggagcagctgcgccggaaactgcaatctatcttgcatggattggagaaggaggaacatgcctagacagagcaaaaaacaaaaacggtctgcatgggtgccggtgacggctgtcctgctggcgctggccttggcgggtacggtcctgttttccgcctttcgggagaagatagaccgctgggaatacccgcagcgctatgaggcgtatgttgagtattacgccgggaaatacggcatagatccgatgatcctgtacgccttcatccgcaccgagagcaactttgacccggcagccgattccgatgccggggccagagggctgatgcagattaccgaggttacctttgactggatcaagaccaagatcgccccgacagaggtcctgaccttcgatgatctctacgacccggaaacgaacatccggttcggtacttattttgtcagctattgcctgaagcggtatgacaatcatctgcctacagcggcagcggcctatcataacggtgtgggcgctgtggacaccctgctgaccgaggcgcagtactcgtcagacggcatcacgctggaccggtatccatacccgcagatgcggcaatatgtaaagaaaatcaccgagagctatcaacgctactcggagatatataatggagatatataagtaagaaaggaaattcaagatgaaaaccactgaggaactcaaaaaactactctataaaaacgagactgtagcggatgctgctcccgatgccatcgccgctgcgcaggacttctgcgaggggtataagacctttctggacaatgccaagaccgagcgcgaggccaccgcttacagtgaaaagctgctgctggctgccggctaccagaaatttgtgcccggcacgaactatgcccccggcaccaaggtctacaccatcaaccgtgaaaaatgcgtgctggctgcgaccatcggcaccagaggtctggagcagggcttccacctgaacattgcgcacatcgactctccgcgtctggatctgcgcccggtgcccgtgtttgaaaagtccggcatcggctacctgcgcacccactattacggcggtgtgcgcaagtaccagtggcctaccatcccgctggctttgcacggcgttatctaccgcgccgacggcacccgcgtggaggtctgcatcggtgagaaggacgatgacccggttttctgcatttccgatctgctgccgcatctgggcgcaaagcagagtgccaagacactggctgagggcatcaccgcagaggatctgaatgtcatcatcgcgtccctgccaatcgaggacaaggacgccgagcagcgcgttaagctgaatgtgctgggtatgctcaacgagacttatggcatcaccgagcgggacttcacccgcgccgagatcgagatcgtgcccgcctacaaggcccgcgacatcggtctggaccgcgccatgatcggcgcctacggccacgatgaccgtgtggatgcctacccggccctgatggctgagatcggcatccaaaaccccgcctacacctccgtctgcgtcctgaccgataaggaggagaccggctccgatggtgtcaccggcctgaacagcatgtacaccttccacttcctgcagcagctttgcgcaacacagggcgcggactacatcaccgcctgcaaggctgccaagtgcctgtccgccgatgtgacggccgcctatgatccgacctttgccgatgcgtttgagcctgacaacggcacctacgcaggcagcggcgtggcaatctataagtacaccggctcccgcggcaagtccggcaccagtgatgcctctgccgagctggtcagctacctgacccgcctgatggacaacaacggtgttgtctggcagatcggcgagatgggcaagctggatctgggcggcggcggcacggtggccaagtatgttgccaatcaggacatcgacaccattgatgtcggtgtgccggttctgtcgatgcattccccgtttgagatcgtctccaaggcggatgtctacatggcatacctgaccttcaaggccttctgcgaggatgccgagtaagcacttttatatttgggggcaggacagcaataatttttgcggcagggtattgacttatcttgaaaattctgtataatattattgttgtcttgcgtgctggtgtggctcagttggtagagcagctgattcgtaatcagcaggtcgccggttcaagtccggccatcagctccaagaaaacgccgcagagcgatagatttcgttctgcggcgttttatttttgcgcctttgccgggctgggcggtccggttgtctgtaaacaaatacggcggccgtgcagaggaatctgcatggccgccgtactattttattctgtttcagtcggcttcggctcggtgggcggggtgctgttgttcgctaccgggataaagcgcttcgcaaatttgttcttgccgcggctgcatacatagaaatagccgatgatcgagaaggtcagtgcgccgataaagttgacgaacagatcctccatcgtatccagcagaccaatgtcaagatatccgcccagacccagcgcggtctgggtgccgtcggcctgaataaggatgatatcggtgatgtccttcagtacaacgggggtgttgccgccggtggggtccagcatgacggaaccgatcgtgctgatgaccgtgtccttctgcatatcgaggaagaacaactgatccatcgtacactcaaaaaattcccagataacgcccaccgtcatcgagaagcagaacgctacgatggccagatacaagggggatagatgaaaccgcgcttcgctgtggcggttcagaatatccagcagggaaaagccgatggcagcgcacaaaaagccgttcagcgtgtgcaggactgtatcccaataggggtagtttacatagtacgcgccgatctctcccatgatctcggcggcgtagatgaacagcaggatgatgatttccagtgtgtttggcagggcaatatccagcttgcgctccatcaggctcggcatcataaagagcagaagcgtcagcacgcagagaaacacattctcgaagttgcggttgaagatctgcgccagcatcaccagcacgaccgaggtccgcagcagaatatataccattgtgaccgagcgcttttcgcgccagctttttttaaaggaatcggtttttgggtggtccatggcttctccttctcaatcgtccagcgtaaagtccttgggatccagctcgggcagaacctgacggcggggtacacgcatcaggggatcatagctgaatttgcggcagcagtaatagggggagacaacacccttgtgccgacacaggatcattttggggtcggcggcgggggagccgtgcaggcaataggcacaggcaggggcaatgtgcgcgccgtagtagctctttttaaacattagcctcacccctaaaaacaaaaatatactgttatttattataaaggttttgtcgaaccttgtaaagtgctgcacacagaaagacaaatcccagcagcgctgcatcgggcggcagccgggaaattggcacgacccttgccgaaaggctgctgcagacagccagactgcccggcaaaaagcgcacgcagagccggatcaacccctgcaaaaagaaaaagtgcagtacccggctgagcagcagggcacgcgggcagaacgcatccccggaaaaaagctgtatctgggaccagaccgaaaggccgagcagactcaaaacggcgcagcagccgtagagtgccgcctgcccgccctgcgcggcagcgtccgcgcagccggcgctgatttccagcgcagcactgagcagcaggggcggcaccggtaaaaacgcccggatgaccgcacccacgatgcggaaaaacaccacgcacccgcagacagacaggcttgcactgacggccgaggagatggcgcggggcagcccggccgtctgcggcggggcgggcggtgccgggcggacggcggaaaaagcgcggcttgggcagtcggaggcagaaaaaagatccagacaggccgttgccgcgaggtttgccgcaagctgtgcggcgtacaataatacccccagctgcaggcggcccagcagcagcccgcctacgcagcctatgacaaagcctggcccggagcagcagcccagaggaagcagcctccgggcgtcccggcggctgatgcgatgcgcgccgtatagccgaccggccagctgcgccgataccgcatacccgcccagccatgacagtgcgacggcctgcgcggtctcgggtgcttccagccccagcagccgctgcagggggcgcagcagccgggcaggcggcggggcagccgtcagcagctcgcacaccacaaaaaatgggaacagtgcgggcagcacgctcgcaaggcagagtgctgtgccggaggcaaagccctccgccgcagcctccggtgcggccagcagcagtacgcccagcacccccgccgccgctgccgccgcgcgctgttggtttttgcagttgttcatattgcgcacctcactgcgtatatttgggtaacagttttgcgcggggagggaacagccatgaaaccaaaaaagccgcatccccgcaagcaccatgagcgccccgacctgcgccgtatgctggccccgccgccgcagggcttttaccgcctgccggagatggagctgcggggcggcagcctgctgacagacggctgccgccgggtgctggatttcaccccgcagcgcatctgccttgatatgggggacactctggtaacattgtatggcgaggagctgcggatagaatcctttgcgggcaaaagattgattctggccgggcggtttgcgcgggtcgagctgcgcagcaagtgggaggtgacgcagccgtgaaactcaggctttgggctgcggataccttccgcttttcggtgcagggaccagagatccaccggttcctcaaccatgcgtctgcagcgggggtgcgcctgcgccgcgtccgctggcagaaggacggctgcagtgcagccgccgatggcatagaccgccgcaagctggaaaaaatcgcggcggacggcggttgggtcatcacagtgacagcgcgccgcgggcccggccgccgcgccgaggccctgctgcagacccgccccgggctggcggcgggcatgattttgtttttggtgctgctgaaatttctgggcgggtttgtctggtgcgtggacttcggcgcgatggatgccgacctgcagcccatgatgcgtcagctgctcgccgactgtgctatccatgagggaacccgcctgacaaagccgctgctgcaggcggcacaggcgaaggctttgcgccgcagtgagaccttcggctggatcagcctgaattttatcggcggctgcctttctatcgaaagcacccccgcccagacccgcactgtccgggaaccaccgcccacggcggggctgtatgcgagggcggatggcgtgattttggcggtagagatcgagagcggctttgctgcggtggagccggggcagacagtgacggcgggtcaaccgctggccgccgcagaaaagctggaccgcaagggaaatgcggtgatccaaggcgcgcaggggcgcattgtggcgcgggtgcagcggcagtacacggccagtcggccgctgacggtcaggacttgtgcctatacgggccgcagcacagagcagacaacgctgtatctgcccggctatacccgcacggaggaaaccggtacgccgctgcgcagcgcagaaacgcagacagcatggcagcccctgcgtctgggacgcttggcactgcccggctgcctttgccgtgtgacaagccgggagcgggctgtgcagacgctgatctacccggagaggaccgccgccgcgctggcgctgcgcgattgccgggcgcagcttctgcaggagtttcctgatgccgagatagaggcggagcagcgcgaaatttccgcgcaaaatcagacggtgcaggcctgtgtgacctacatttttacggcggacattgccgcgcggcaatgattcaacattttttgcgtagtgtgacgaaatcgccggtaaaattttgtgcaacattcacagtttcttttgcagaaaactgtgatataatctaaatgtatagctgtggcattaccgcgtcggcgcatagagggatgcggcaatgcccaatgatcgggaggatataaatttggcagaacgatctcttgagctggacagtattgagctggcagcggccatcttcggcagcggggaccagaacatccatctgctggaaaaggagttccgcgtcacagcggtctgccgcggctcagtgctgcgctttacgggggagcagcgtgatgtggacgccgctgcccgcgctgtggacggcatggtgaccctgatggagaaccacaccccgcttgaggagcagactgtgcggtactgcatcagtctggcccacggtggggaggaaaagcgcctgcgggagctgacggatgatttcgttgccgtcacagccaagggacgccccattcaccccaaaacgctggggcagaaggaatatctggccgccatccgcaaaaatgccatcaccttcggcgtggggcctgccggcaccggcaagacctatctggccgtggccatggcggtcaaggcgttcaagtccaaggatgtcagccgtatcatcctgacccgcccggcggtagaagccggggagaagctgggcttcctgcccggcgacctgcaaaataaggtggacccctatctgcgtccgctctatgacggtctgttcgacctgctgggtgcagaaacatttcaaaagctgtttgaaaagcaggtcattgaggtcgcgccgctggcctatatgcgcgggcgcacgctggacgatgccttcatcattctggacgaggcgcagaacacaacgcccgagcagatgaagatgttcctgacccgcatgggtgttggcagcaaggtcgttgtcaccggtgatgtgacccagatcgacctgcccgacaaggtccgcagcggtctgattgatgcactgcatgtcctgcagggtgtcgagggcatcgcgcaggtgcgtctgaccgaaaaggatgtggtgcgccaccggctggtgcagcagatcgtaaaagcctatgaaaaagccgccgaggagaagacccgcggcgaagcaaaccataaataaaaaaacggaggtcgatttccatgtccaataaggtattgatcacgaacgaccagaatgtggtaaaggtcccttccggcctgcgcatcctgatccgccgcagctgtaatgcggtgctggatttcgagcattttgacggcccggccgagatcagcgtgacttttgtggataacagccgcatccatgagctgaatcgggagtatcgcggtaaggactccgccaccgatgtgctcagcttccctctgggggaaaacggcgagtatgatattgacgaggacaacggctgcaagctgctgggagacatcgtcatctcgatggagcgcgcgatggagcaggccgagctgtacggccattccctgcagcgcgaggtcgcgtatctgactgtacattccatgctgcacctgctgggctacgaccatgaggccggcggtctggaggctgtgcgcatgcgcgaaaaagaggaagccgtcctgatccagctgggcctgccccgcacggtttcgtatacaagcgatgaaatttgagaagctggcgcattttgcccggggctttgtctatgcctacaacggcatacgcgccgccatacgggaggagcgcaatttccgctttcatctgtgtgcggcgctctacgcctttgtggcggcctactgggcgcagctgcctgcggtggaaacagccctgatcgcgctctgtgtggcggcggtgctggcgctggagcttgtcaactccgcaatcgaacgcgcggtggacaagcccgataccacccactggtggaccgcaggcgcggccaaggatatggcggcaggcgcagtgcttgtcatggccatcggcacggtcattgtggcggtatgcctgttctggccgcggctggacattctgtgggcggcctttaccgcgcggccgacacgcctgctgtggcttctgctcacgctgattctattttacaaatttattttccgttcttccaattcaacagagaaaggcaaacaaccgaatggcaaaaccgattcctgaaatgccctccagcgtatttgtggcgctggtcggccgccccaatgtgggcaaatccagcctgaccaactaccttgtgggcgaaaaggtcgcaatcgtgaccaaaaagccccagacgacccgcagccgcatcaccggcgtcattaccaagggcccggtgcagtatgtgctgatggatacccccggcatccatgcggcccgcaacaagctggacgcccgcatgacccagaccgccgccgccagcctcaaggatgttgatgtgacgatgatgctgtttgagccggcgggggagtttaccgatgcggagctgacgatggtcaaggcgctgcagaagggcggtcccgccatcgccgttatcaacaaggtggacctgctcgacagctttgctgcgctggaggcccgcaaaaagcagctggaggaatttggctgctttgaccacatcgtcacgatctcagcgaaggacggcacaggctgtgagggtctgtttgccatgctcaagccctacggcaacgagggcccgcactactttgacgatgatgccttcaccgatatgccggaaaaggagttggtggcagagctggtgcgcgagaaagcactgctcttcctgcgggaggaggtgccccatggcattgccgttgtggtcgagcgctttaaggagcgccctgacaaggacctcatcgacattgatgtggacatctactgcgaacgcaagagccacaagggcatgattatcggcaagggcggccagatgctcaaaaaaatcgcctccgccgcccggatggatattgaggagctgctcggcgtcaaggtcaacctgcagtgctgggtcaaggtccgtgaggactggcgcgacaacgagctgcagctgaactcgctggggtttgcgaagccgtaacaaaatgccgcggctgctgcggcggtcaggggactgaccgccctacaccggaggcagcccctgtagggcggccagtcctctggccgccgttgggggcatcccgatatttcttccgacaccgtattccgccaacatccccgtccaccctctgctaggatagaagcagggggtgacaggcgtggaaaatctggcgggaggctggctgcgctttgcgcagtctggcagtgtttatgactatttagcgtacaaattgcagcaaaacgcagcgcaggagggcatgtatgcagacggcaacgacaggacttgtgctgcgtcaggtcaaggtgggggaggcggacaggatcatcacgatcctgacgcctgagctgggggtcgtatcggcatcggcccgcggcagcctgcggatgaagagcgccctgttcagcgcaacagggctcttctgctattcggaatttaccctctccagcggccgcagccactattttgtggacaacgcgcaggtcaaaaaggtgttccacggcatctccgccaccatcgaggggatggcgctggccagctatatggcggagatcgccatggagcttgcccccgcaccgccggaggcggacgcccagctgcggctgctgctgaactgcctgtacatgctcagtgagcgcagctacccctgctgccaactgaaggccatctatgaactgcgcgcattgacccttgcgggctatatgcccgatgtgctggcctgtgccggctgcggtaagtatgagggcggggacttctacctcgaccctgtggagggccgcctgctctgcgcggactgtgccgaaaaagcgcggcatatcaccaatctggataacggtgcgctctatgccctgcgccatatctgccttgcggaggataaaaagctgttcggcttcaagatctcaccggagagtctgaaagagctttcccgcacgagtgagcagtatacgctcgcccaccttgagcatgggctgaaaagcctggactttctcaaaactgtacttgaataaggagaccaagaccctgtatggataccgcctataaaacaacactggaactggacaaggtccttgcccgggccgtgcagctctgcgcctgtcaggagacgaaggagatgatgcaggcgctggagccggcccccaccgtggaggatgagcgctacgacctggcccagaccaatgccatcaatgcactgcttatcaaaaacggcagcccccgctttggcagcgtgcacgaggtgcgccgcattgttgcccacgcccgcaaggggggcatcctctcgatgggggagcttttggagatcgccgcaacgatgcgcaatttttcgggcctgtcccagtggtacggcctgagtgagcatgagatgctgcccacggacgatctgttctttgcgctcgcgccccagcccgtgctggaaaagcagatcgcagagagcatcctctcgccggaggaaatggccgacaccgccagtgtaacgctccacgatctgcgccgcaaaatccgtcagacggaggattccatccgcaccaagctggataatatcatccgcaactccaccaccaataaatttctgcaggacgcggttgtctcgctgcgcaacggccgctatgtcgtgccggtccgtgcggagtaccgcggagaggtcggcggtgttatccacgatgtatcctccacgggcgcgaccgtctttgtggagcctaccgccgtggtcgaggccaacgcccgcatcatgcagctgcgtgcgcaggagcaggaggaaatcacccgcattctgacctccttctcgaatcaggtcggctcgcttgagccgcagtttacctacagctatgaggcaatgctcaagatcgacctgctgctggccaaggcccggctggcggtggagcagaacgcctttatgcccgccgtcagcgacaaggtctatttcaagctgaacaaggcccgccacccgctcatcgacaagaaaaaggtcgtgccggtggacattgagctgggcagcgactatgacaccctcgttatcaccggccccaacaccggcggcaagaccgtatcgctgaaaacagccggtctgctcaacgcgatggcgcagtacgggttcctgatcccggcgcatgagagcagcatcgtctgccattttgacgagtaccttgtggacatcggcgatgagcagagcattgagcagagcctgtccaccttctccggccacatgaagcggatcagcggcattctggagctggccggcccggcgaccctgacactgctggacgagctgggcgcgggcaccgaccctgccgagggtgcagcgctggccgtcagcattctggaacggctgcgccgtcagggcagtctgctcatggcaacgacccactacgccgagttgaaggtctatgcgctggaaacgcccggcgttgtcaatgccagctgcgaattcaatgtcgaaacgctgatgcccacctataaattgagcgtcggcgtgccgggcaagtcgaatgccttcctgatcagcgcaaagctgggcatcccgcaggaaattatcgacgctgcgcgcaatcacatgtcgaacgatgacaagcggctggacagcgtactgtcccagctggacgatttgaaggtccagctgaaggaggcgcaggccgaggccgagcaggccaagtatgatgcagagcatgcccttgaaagcgccgagaaaaaacgggatgacctcatcaaaaagggtgaggaggagctggagaacgcccgccgtcaggcccatgacctgatgcagcaggtgcagaacgaggcctacagcctgaccgatgagctgcgccgtatccagaaggacgaaaagaccagcgcggcccagcgcgccgtgcgcgcccgggaaattgcccgaaaggacaccgagagcctgctcaagcagaccgatgcgaagccgaagcctgtcaaagagttcgtcccgctcaaagaagtgcagatcggtcaggaggtcatcattgccgatctgggccagacggccaccgttacggcgcgccccgaccgcaacgacatggtggaggtccgcgccggcatcatgaaaacaaaggttccgctgtccaacctgcgtgcccctgacaagatggaaaagcgcaagccggccgagccgcggcgttccacccgcgtgcagttggataagtcccgcaagaccagcatggagctgaacctgctgggttacacggtggacgaggccctcaacgaggtggacaagttcctcgacagtggcatgctgcgcgggcagtccaccctgtatatcatccacggaaacggcaccggcgccctgcgcaccgccatccagaagcatctgcgcacccacaaggcggtcaaaagcttccggctgggtcgctacggcgagggcgagagcggcgtgaccgttgtggaattaaagtaaaaattcaaaacaatccgccctttttgtctatagcaatccttggctgcatctgctatgctattcatagaatgtatgagtgtctgcccttgaaatgaaatgaaagcgagtgaacgctttgccaatggactataacagtacacgcagctttacgatgacgctggcgcaccgcgcggtaggggacatccgccgcgggggcttccggcaactgcgcaattatgtggacatgtgtgccacgctggcaaaaaagccgcagcaaaaagacttttttgcctacgcacagaaggccctgcagcgcaccgacagctgctattacagcctgatccaccgcctgctggataccgtggatgaggatcgcatctgcacggtcggtgtcaatatgggcttcggcggcctgatctacggtgcaagcgaactgaaaaagaaggccgatgcggacggccagcctacttcttgggtcacagcggcacgctgcggggacgaacgcctggcggagatgatccccgaggcggcaaagcacggcagttatgtctggctgctggatgccctttctactgatccggcacaggtcgtgccgctggcaaaggccaaccctcaaacggccttcggtctgctggcagaccccgccgccttgaccgaggactgcgttgctgcgctggcggcctgccgcaatctggtggtgatgccgctgttgaacacgccggagctgaccaccgaggcctgccgcgccgcccgccgtatgaaggcgcagaacatgttctacgccctgaccgttctggtcgatgacgacaccgtggacgaggtcatgcaggacgactggcttgagagcatcgcgcaggagacactgttctgcgtttgcgcccgcaaaaacggcatctcggacgaagcctcccacagactgcgccgcagcattgtggagggccgcatggagaccggcaagccggttctgctgctcgactgggacggcgatgtgagttacctgaatcagcgtatctcggagcacatggttttcggcaatgcgctgccgcagggctgctccttccccctgcagctgggctgaaaccgcaaataataacaaaaaacgaccctgtaccgatggtatcatcgttacagggtcgtttgcttttcaggtatcgccgcgcagcagcttttgcaggatgtcatggttgaacaccgggatcgtcaggtcagagatgacaaggccgttggtgcgcataccgccaagcacccacgggatcagtatccccatcagcgcgccggaaaaaaactggccgatggcgcatgtctcactggcgctgatgtcagggttcagctcccgggcattctgctcaaaaatagagcacaggtaatcaaacatgtacttctgcaggctgttctggccgttgtaggccaaagcgttgcagtagaacaccttgttttccaaaaaataatccttgatagctgccagcagggaatcccagctggtgtaggcgccgcgctccacaaggaactgtgtgatgccgctctggaaataccagttgacgaggtcgtacttgtcctcaaaatggtagtagaaggtgttgcggcccacgcccgcatgatccacgatgtcgttgaccgagatcttttcaagcggggtcgtgaccatcagctcctgcaggctttcggccagcagatgtttggtttgattggaacgaggcatagtgatcctcctgcaaatggggtggtaaacagcgtacctgcattataacacattttctgcgtcaagtgcaaatgattcgtgaaattccccgcaggacctgcgctgtgatttgtatgacaaattatcccgagtgtttggttttgcccgccgtggccgggaacagggctttcttattgaacattcgccggcttttgtctatgtacactgcggcgaaaaagagcctacaatagggcatactctaacggagagaaaaggagtgcaatcaactatgccgatgaataaagtagtccatgccgcccagcgcgcagcgttcagcgccgcccttgactctgccatcaaggcagtgcgcggcaagggccctgaaaatatggccgagcaggccgtcaagctcgtcaatctggctcagcctctgctggcccaccgttaccccgatgctgactgggataaggtccgcgcctttgtgtccgaccccaacagcaagtggatggggtatgcctacagggcaatcaacgagatcgacccccatatcctgaagatgaacgccctgaaccttgtgtatgagggtatgttcgccggttacaactatgtcatggagctgcgcaagcagtacgactgcaatatgccgtggatcctgctgttcgacccgacctctgcctgcaacctgcactgcaagggctgctgggctgccgagtacggcaaccgcctgaacctcagctttgaggatatggaccgcatcgtcaccgagggcgaggcgctgggcatccactggtacatgtgcaccggcggtgagccgacctgccgcaaggaggatctgttcaagctggctgccaagcaccagagttctgtgttccatctgttcaccaacggcaccctgatcgaccaggccttctgcgaccgtgtcaaggaagtcggcaacatggccttcttcatctcgatcgagggcatcggcgatgccaccgatgcccgccgcggcgagggcgtctatgaccgcgtcatgcacgccatggatttgatgaaggagaacggtctgctgttcggcacctccatctgctacaccagcgctaactacaaggccgtcaccagcgatgagttcatggatatgctcatcagccatggtgttcgcttcaactggtacttccattacatgcccatcggtgacggcgcgaatgtcgatctgatgctcaacgccgagcagcgcgagtacatgatccaccgcgtccgtgagatccgcggctttaccggcggcaagccgatcttctgcatcgacttccagaatgacggcgagtacattgacggctgcattgccggcggccgccagtatgcccatatcaacccggcaggcgatgtcgagccctgcgtctttatccactactccaacgccaatatccatgacaagagcctgctcgagtgcctgcagcagcccctgttcaaggagtaccacaagggccagcccttcaacaacaaccacctgcgcccctgcccgatgcttgaaaaccccgagctgctgggtgagatggtcaagcgcagcggtgcgcacagcaccgatatgcagcagccggaatccaccgatgatgtattccgccgctgccgcccctacgctgaccagtggacgccctctgccgagcgtatctgggcagaggagcaccctggctgcacctcctgtgcgagctgctccggctgtgcatccaagtaaaacagcataagctcctgcgccccgctgtattttgcagcggggcgctttttgtttggtttggcttcccccgtgggggaaggcattcatcttgtcagcttttcgcacatcccaccgtccgcggattttctcttccaccagcgcatatagtggtagcatggcggcaaaaaggggaggtgggcgtatcaaaacggtggtatatctcgatgtgctgctgctgaccaattttctgctggcctattttcagctgctggcggcgggggcgctcagcggccagcgggcgggctttggccggatgctggcgggcagcggtctggcggcgctctcggccctttttctgcttgccccgccgcagccctacccggtgcaggctgcctacaagatcgccacggcactgggcatcacggcggcgacctttgggcggcgcagcctgcgccgtctgctgacagcggcctgctggtatgcggcactcaacattgcgctggcgggggtggtgatgctcgttatgctgaacaccggcgcgcggtggctggacgcagccaacctgacggtctacctgcacatctcgccgctgctgctgttggggctgtgcggggtgtgctgtgcggctgttgagctggggctgcggctccttttccggcgggagccgcctgtaaaaacggcggggctggagtttgagctgtgcggccagcttgtccgcctgcgggcagcgctggacacgggctgtcatctgcaggacccgctgacctgcctgccggtgctggttgtcagctacccagatgcaagagcacggctgcccgccgctgcggatgccttcctcgcgcagtggtttgcagggcaggatcgtgccgagccgccgcccggggcccggctgcggctggtgccctgcggcacggcggcagagaaggggctgctgcccggctttgcagtacagggcatcagccttatcaccgagaagggcgtgctgggtctggggcgcagcgcggtggtgtttgcgccgcgcagcttcggcagcaccgactatgaggcgctttacggcagtgatttcatgtaagggggaaaacaagacatgcgcaaagaactgtaccgcctgtggctgtggctggcggcaccgcagcagctgcattacatcaatggggccgataccctgccgccgcccctgccgcccgagcaggagcgcgaggcgctggctgcactcgcccgggggcagaccccggcacgggatctgctcatcacacataatctgcggcttgttgtgtacattgccaaaaagtttgagacaccgaccgccggcatcgaggatatgatctcgatcggcacgatcgggctgataaaggcggtcaacacctttgagcctaccaaaaacatcaagctggcgacctatgccagccgatgcattgagaatgagatcctgatgtatctgcgcaaaagctccaaccggcggcaggatgccagcattgacgagccgctgaataccgacacggacggcaatgagctgctgctgatggatgtgctgaccagcgatgacccgcaggttggggaggaactggagcgcagcgccgagcgcgccgccctgcggggggcggtcggccggctttccccacgggagcgccgcattatggagctgcgcttcggcctgaaccatgaaaaggaacatacccagaaggaggtggccgatacgctgggcatctcgcagagctatatctcccgtctggaaaagcgcattatccgccgcctgcgccgggagctggaggcggtgggctaaaaaatctgcagcttcgtaggggccgggcatgcccggcccgcggcctgcccgtcagcaggagtccccggaaagccgcgggccgcacatgtgcggcccctacagggcaatgccttctacaccgccggctctacccgggtgtttgtcacaaacggcacggccagcccggcaatcatattcatctcgggctgcagggagtagagcagatactcatagccgtcccgcacccaggagacgctggagatgcgcccggcgttctgccgctgggtgacggtgatgccgtcaatatcgtactgctggacatcctcaaaggcatattcaaagaagccggtggggtaaagcatctgcccctgctttgcagtgcgcaggctcatgcggcggcctggcacaatgtcgtagtcaatctccgacacccgctcctcgataagccagcagcggtagggcagaatgacctcgctgctgggggcggaggccacccggaacccggctgtctggccgtagtcgggatgcaaatattccgtgcgtgtctcgcgtgcggggcaggtttcctcccgccgaaggatcagcaccagcaccaacaccacggacacgaccgccagcagcaccagcgtcaggacaaaccatagggaatctaccataacaagccctccttttccgtatgctatgccagaccggcagggcgtgtgcggtgctgcccaaaatttgccggtttgccaacgcacacagctgcctatactcccagcaaggaaatgcttgatttgggggttgaaaggatgtatgcaggaaaagtcgagatatgcggtgtggatacagcccgcctgccggtgctgagcgagacggaaaaaagccggctcatcaaggcggcgcgggcgggggacaggcaggcccggcaggagatggtgcagggcaacctgcgtctggtgctgagcgtggtgcagaagtttgccgggcgcggcgagaacatggacgatctgtttcaggtcggctgcatcgggcttatcaaggccatcgacaactttgatccggcgcagaatgtgcggttttccacctacggcgtgccgatgatcgtgggcgagatcaagcgctatctgcgggacaacaacgccgtgcgggtcagccgctccatccgcgatctggcctgccactcgatgcgtgcgcgggaggagctgcaaaagaaaaacggccgcgagccgaagatctccgagattgcggcacaggtggggcaaagccccgagaatgtggcgatggcgctggaatccgccgtgacgcccacaagcctgtatgagccgatctactcggacggagaggacagctttgccgtggtcgatcagctgcgggacgcaaccggcgaggaaagctggatcagcgatatgatgttccgtgacacggtgcgggcgctctctgcgcgggaacgccgtatcattgcactgcgctatctgggcggcaagacccagacccaagtggcccgggaaatcggcatcagtcaggcacaggtcagccgtctggaaaaggccgcgctcagccgcatcaaggcgcagatatgcagccaataaaaaagcggcatccgccgggatgccgcttggaacaaagcagtggaacagaaaatcagtccacctcgatcccgcacgcgcccagcgcacgggtaaaggatttcgggtttttgtacaagatgcccgtgatgcccaggttgtacgcggcctgggcattggcctttgtgtcgtccacaaagatcgtctcgtcatacgcaaggttgcaggtctgcatcagcgtggtgaagatctccggctcgggcttgagcagatggacatcacaggaggcaacaccgccgtcaaacagtgagaaccactcccgctgacgcagctcgtccatcatatcggatgccatattcgtcaggtaatacaggcggtagcctgcgcttttcagcttgcgcataatctgcacggtggtcttttttgtctgcatcatggcagcccactcctcgatgcaggtctgcacctcaaacacgcggttggcgcgggcggcgttttccagcataagctggttggcctgctcccggctgatgatgccgcggtccagatcgagccattcctggctgccgaacaccagcgcgtaggtctcctcctcggcacggcggttcataaagtgatccatcaaaaagtccttgggggcaaaatccacaacaacgccgccgaaatcaaaaataatatttttatacataaaaacctccggtaagggtctgctttgcttttcatccttattatacacgcaatccggcaaggaaacaattccttttttgctgcataggatggcagagaaggggggcgctgccatgacgctgcgtgaattgagcggtaaggatgtcatccagcttaaaaacggtgaaaacctcggccgcatcgacgatctggcctttgacgaaaacggcggacggctgcagtccgtcatcctgcgcgggcgcgcgcactgctttggcctgctggggtgcgatgatgatcttatcctcccgtgggagagcatccgcagcatcggcaccgatgtggttatggtcgatgcagaccccttgccgggaaaacaccgccgctaaagcaagaaaatcgtatattttgtgtaaaatcccgcaaaagcggatgctttttttagcgcaatgtgctataattaaaattcaatggaaggcggggaacaggcaatgcagacaacgcggaaacagattctggcggctgcgctggcggtggtgcttatcgcggccggcgcgctgttcctgatcgcccctgtgtggcagccgcagcgcccggccgccgcctatcttccggtcacggcggcacaaaccccagcgccggagccggagcttatcgacatcaatacggccacggcagaggaattgaccgcgctgccgggccttggcccgcggaaggccgcagcattggtggcataccgcgcagagcacggtgcctttgcatcgctggccgatgcagctgcggtcaggggcatatccctgcgcatgacagaaagctgggcgggacttgccgccgcaaaataaataggaggagatccatttggaaaaaaagccggagagcatcttcatcaaccgtgaactcagctggctggattttgacagccgcgttctggcccttgccaaagaaaaaacggtgcccttgggggagcgcatcaaatttgccgccatcttcggcagcaatatggatgaattcttcatggttcgtgtcggttctctgtatgaccagacgctgctgaaaaccaacaagaccgacaatgtcacccacatgacggcggcggagcagatcaatgccatcacgccgcgcgtggcggagctgcaggccaagtgcgacaaatacttccagcatcttgtgtcggcgcttgcggagcagggctaccacaaggtggactttaccaagctcagcaagcagcaggagcatttctggaaaacctacttccagcgtgagctgctgcccctgctcagcccgcagatcgtggactcccgccatccgttccccttcctgaacaacaaggatatctactatattgcccagctgcactccaaaaacgagggggtcagctacggtattgtgccggtcagcagccagtttgagcgggtgcttttcgtcaaggacggcgagacggcctgcttcgcttttgtggaggagctgatcgcccactacgccgctacgatctttacagccagcaccgtgcagaagcagtgtctgttccgtgtgacccgcaacgccgacattacggtggacgagggcatgatggaccacgatgtggacttccgcgatgtcatgagtgagctgctgaaaaagcgccgcaagctggctgccgttcggctgcagttctggcccgaggccccgcaggaggtcgtgaaattcctgcgggacaagctggtggtcccggcggaccgctgctatacccagacctcgccccttgatgcaggtgcgctgttcaagctggcagggcgcatctcgggcgacagcggccatgcggacctgttctacccggcggccaggccgatgcaggccccggcgggctatgacctgtataccgaggtccgcaagcatgatgtgctgctggcctatccgtaccagagcatccgtccgttcatcaagatgctgctgcgtgcggctgctgacccggatgtggtctcgatcaagatgaccctctaccgtatggccagcgattcccagatcgtcaacgccctgattgccgccgccgaaaacggcaaggaggtcgtggccatggtcgagctgcgcgcccgctttgacgagcagaacaacatcgactggtccaagcagctggaggatgcgggctgcaccgtgttctacggctttgacgattacaaggtccattccaagctgaccctaatcaccagccgggtcaacggccagtataagtacttgacgcagatcggtaccggcaactataatgaaaagacaagcgagctgtacaccgacctgtccttcgtcaccacccggcaggaaatcggcgaggaggccagcagcgtattcaacaacatggccctgcagcgcctgacgagcgaggctgatacgatgctggtggcaccgctgcgcttcaagagcgttttgcttgaggagatggaccgccagatcgcgctggctatacagggcaagcctgcgtccatcatcctgaagaacaactccatcaacgatccgcagatcattgataagatcagcgaggccagctgcgcgggcgtgcgggtggatatgatcgtgcgcggcatctgctgcgtgcgggccggggtgccgggccgcaccgagaatgtgcatatccgcagtctggtgggccggtatctcgagcattcccgcatctactgcttcggcagcggtgaggcgatgcgcatctacattgcgtccggcgacttcctgacccgcaacaccgagcgccgtgtggaggtgggtgtccgggtggatgaccccgccatcgcaaagaagctgcgcggcatccttgacctgcagctgcgcgataccgtcaatgcccgggaaatgcagtcggacggcacctataccaaggtacaccccgccgaggggcagcccccggtggacagccagatggcgatgtttggctatttcaaggatggctttgagatggcaccggaaaagccaagaccggagccgaaagcagacccaaagccccagacggcagccgccagggctgtggtaaaacctgttgtccggcagcgtgcagccctgcgccccaagcgcgcaagcctgctgcaaagtctgttcggccgagggaaaaagtaaggagaacccgaaacatgaaaagctgtgtagtgaccgcaaattttgcctgtgaccccatgaaggtctggctttacctgaccaagcctaccctcaacggctggtgcaaagatgtcagcgcctatgaggagagcagcgacggtatgacggcaacggaaaagcataccgatggcagcgaaacccagatcacctttacccgcaaggaaaagccccgctgcctgagctgcagcttccagcggggcaagatcagcggcagctttacggcgctgctgctgggcggcggtgactccaccagtgtggaatgtacgctggatgtgaacgggctggggctttttgccaagcccgccaagctgctggaggcacacttcgatatgctgcgcaagaccctcggcgcgtaagcggcggtaagctgcgcgctgccaataacccggctatccgccccgcagatggggcggatattttttgcccctcccgcatacggttgaaaaaaggggaggtgtatgccatgtgggaaaatgcagccccgccgccgcagccggaggaaaagccgcggccctgccgcccaaagagcgaggaggatctcgttctgtgggcgcaggtgctgctttgccttgcggccatcggctttgtgctggcagcaagggcgctggaatggccggtctacccggagcttcgccgtgcgtttgccgctgcgctgcagccggagcaatcgctttttctgggggaggagcgcggcctgctccgatttaccgagcagacggcgcaggaactggcggatgccgcccgcagcatgtgggaggatgtgaccgccacaccggagacggcccgcacgcgccacagccagccctccccgccggcctatgccagcgaggaaagctatgagccggcgtttgccctttgctttccgctgcccgggcagcatgaccgcaggacctccggctacggctggcgcaccgacccgatgggcgggctggaggaggatttccacatcggtaacgaccttgcggcagctgaggggacggcggtgctggcggcggcggacggcgttgtgcggatggcaggacgccacaaaagctacggcaactatctgcgggtacttcatgccgatggcgatgaaacgctctatgcccacctgcagtatctgttcgtgcgggcgggagaggcagtcagcgccgggcagacgctgggcacggtgggccagacgggcaacgccacaggcccccacctgcattttgaaattctgcacagggggctgcggtatgatccggcggcagcgctgcagcatgcctcgtaggcccggcgggctgcgctggcgcaggccgttgatggtgctgctcggtctgacggtactgctggcgctggacggcagcggcatcctgcgggtcgggctgggctgtgcgctcctgcatgagagcggccatgcgctgatgtaccggcttttgtggcatcactggccggaactggagatctcgccgctcggcatctgcctgcggctgcgcgggctgcttatgacgcctgcgcaggagctgctgctggccgccgccgggccgctggccaaccttttggtctgtgcggcggcgcttgcctttatgcggtgggcagggtacagctgcggcgggtactggtttgcctgctgcaatctgctggtgggcggcagcagcctgttgcccctgcccgggctggatgggtggcatgttgcggcgtgtctgttgcattttctgcgaaaataagatacaatcaaatatatacctttacaataaacagcggccccaacggggcggcgaaaataacacggtaaggatggttcaccaaaatggcggaattttccccaaaatttaaagaggccctgagtctggtacaaaagccgggccgttacacgggcggcgagccgggctgcatctacaaggataaatccaaggtggatgtgcgcatggcgttctgctttccggatacctatgagatcggcatgtcctttctgggcgagaagatcctgtacgatattctgaaccgccacgaaaactggtggtgtgagcgcgcctttatgccatggacggacatgaaggtccagatggagcggctggacatcccgctgtactgccttgaaagcaaggatccgctgacggattttgacattgtcggcttctctcttgaatatgagctgtgctatacgaatgttctggcaatgctgcgtctgtcgggcattccgctgcgggccgccgaccgtgatgagcggtggccgctcatcatcgcgggcggcccctgtgtatgcaacgccgagccgatggcagacttctttgatgtcatgcagcttggcgagggcgagcagatgctgcaggacatctgcgcagccgttgagcagggcaaaaagcagggctgggataaagaacagctgctgttggagctggcaaagctccccggtgtctatgtgccgtccttctacgatgtaacctacaaggaggatggccgcatcgaggctgtcacgcccaaccgccccggcgtgccgccgcgcgtgacaaaggccatcgtgcaggatatggacagctttaccccgccggaaaacttcgtggtgccgcttgtgggtgcagtgcaggaccgcgcctgtgtcgaggtgctgcgcggctgcgtccgcggctgccgcttctgtcaggcgggccagctctaccgtcccttccgagagcgaagccccaagcttatcagcgacagcgcgcggatgctctgccgcaacaccggctatgatgaactgagcctttccagtctttcgacctccgaccactcccggctggaggatattcttgacaacctcaactcttgggcggagtccgaccatgtcagcctttcgctgcccagcctgcgtgtggacaacttctcgcagtcccttgtggaaaaaaccaccaaggtccgcaagagcggcctgacctttgctgccgaggccggcacccagcgcctgcgcgatgtcatcaataagaatgtcacatgggagcagatcgagcgcggctgccgcatcgccttctctgaagggtacacctcggtcaagctttactttatgatgggtctgcccaccgaaacgatggacgacatcaagggaattgccgacaccgcccagcaggtggtggacctgttctataagatccccgaccgcccgaagggcaagggtgttcaggtcacgatcagtgtggcctgctttgtgcccaagcccgacacgccgttccagttctgcgcgcaggaccgccgcgagtccctgcaggaaaagcagaaatacctgctcagctgcgtacattcccgcaagatcaaggtcaactaccacgacagcaccaccagcgtgctggagggcgtgtttgccaagggtgaccgccgtctgggccgtgtgatcgagactgcatttgagaacggttccttctttgacacatgggaggagtatttcaactacgaccgctggatcgaggcgttcaaaagctgcggcattgaccctgatttttacaactaccgcgccctcggtctggacgaggtcacgccctgggatcacctcgatgtgggcgtgacgaaggcccatttggtgcgtgagtacaacaaggcgctggaggccaaaaccacccagccctgcaaccgccagtgcagcgcctgcggtgccaacaagctgatcggaggaccgtgctttgactacagtaagaatcttctttgaaaagtgcggtgaggccgcctacatttcgctgctggatctgcagcgcgtattccatcggatgcttaaaatgagcagcctgccggtgtactatacgcaggggttcaacccgcatatctacctctccttttcctgcccgctgtctctggggcaggaaagcctctgcgagagctgtgaggttaagactgaacaggagagcatcgaaccgcagcgctggatcgatgccctgcagccgctgatgccgcgcggcatcgtcatcacaaagatcgccccagctaaggaaaaggtcggcgagatcgagaccgccgcctatgagatcaccatgccggcaagcagtgccattgcgctggatgcctacaacaatgcagagcatgccgaggttacaaaaaagaccaagcgcggccagaaaacgctcgacctgaaggcatacctcgaccgcattgcctatacggtcgagggcgatacgctgcattttacggccgtgctgccctgcggctccggcgaggcactgaacctgaacccggcgctgctgactgacttcctgcgcgagcagggcgctgcccctgtctggcagtgccgcgtggtgaggacgcacctttataataaagcaggcaaagacttcgaatgagaaaagccttcccccgcggggaaggcaaaaagcaaaaaaatcttcgattttctgttaaaaccccttgccaaacgcccggtacaatgctataatactaaagcgttaatgccgccgagccatcggcgggataatgacacatcattatacaggcggtcctctgacgaaacatcgtgtatgaacgtcgcaacaaaatggaggaattcataacatggacgcaatgaagcattttaccgagggtatgatcaaagagaacaagccccagttcgaagtcggcgacaccgttcgcgtctccgtccgcatcaaggaaggcgacaaggagcgtattcaggctttcgagggcaccgttattgccaagaagcatggcggcatcgctgagaccttcaccgttcgccgcacctcttacggtgtcggtgttgagcgtgtgttcccggtcaacagcccgtttgtcgagaaggttgaggtcgttcgccgcggcaaggtccgtcgtgcgaagctgttctacctgcgcgagcgcaccggcaaggctgccaaggtcaaggcacgtatctgagcatactgagaaaaggggaggacggttggcgttctcccttttttcgtatttttccaaaaggtgggataagacatgggtgcagcattcaaggcgcgctaccgccgcaacaaggaaacactggaatggtatgacgcgctggccatggctgtggcgatcattgcactggtgtttaccttcggtgtgcgcatcgtgaaggtcgatggacactcgatggatcacacgctctccgatggagagcgcatcctcatcaatctgctcaaggcgccggactacggcgatattgtcgtggtggacggctatactgactacggcaagccgctggtcaagcgggtcataggcatgggcggggataccatcgacatcgactttgaggccggcatcgtctaccgcaacggtgctgcactcgaggagccatacaccgccgagcccacctatttgtttgaaagcgtggaatttcccattacggtgccggacggctgcctgtttttgatgggggataaccgcaataactccaccgacagccgcgatgtcagcgtaggctgcgtggatgaacgcgatattatgggcgcagccgtgctgcgcgtactgccctttggcaagataggagcggccgaatgagccagagcgacattatcaacagccgccagatccagtggttccccgggcacatgacaaagaccctgcgcctgatggaaaaggagattcgcaacgtcgactgcgttttgcagatccttgatgcgcgcatcccgctttccagcctgaaccctgagatcgagcgcatcaccgcgggcaaaccgcatctgtatgtactgaacaaggccgatctggctgacccggagatcaccaagcagtggctggcctactttacgagtgccggcgccggctgcattgcgatggactcgaagcagcgtggccgtgccacggccaccaagagtttgattgaaaaagaactttccgccctgatggagcgccgccgcaaccgcggcatggtcggcgcggccatccgtgtcatgatcgtgggcatccccaatgtgggcaagtccaccttcatcaactcctttgcgggcacgacccgcgccaaggctgccaacaagcccggcgtcacccgcggcaagcagtggatcagtgtcggcaatttcgacctgatggatatgcccggcgtgctgtggaaaaaattcgactcgctggaaacggcatcgaatctggcattcatcggctccatccgcgatgacattttggatattgaggaactggcctgcggcctgctttccagcgtgcggggcatctatcccgcccagctgctggcccggtataagctggaggagtcggcgcttgcgctgccgccttacgaccttttgcaggccatcggcgccaagcgcggtatgctgatctccggcggcgaggttgataccgagcgtgcagccaagatgctggtaggggaattccgcgccagcaaatgggggcggctctcgctggagcgcccgccgcagcgcgcggtacaggaagaacgggaagaggtgacggacgatgccccgcaggacgactgggacgacgagcagtaacgaagcgctttacgcctttgacgccgcaaagcgtgccgagcatggtgtagtctgcggcgtggacgaggcagggcgcggcccgctgtgcggccctgtctgctgtgcggcggtcatcctgaaccccgatgatcccatcgagggagtcaacgactccaagaagctgaccgaaaaacgccgcgaagcactgtttgaggaaatcataaggcgtgcgctggcgtacaaaattgtctttatcacaccgcaggaaattgatgaacgcaatatcctgtgggctaccatggacggcatggcgcaggctgtggccgggctggaaataacgcccgattatgtgctgatcgacggcaaccgctgcccgccggggctgatacagcccgccgaggctgtggtcaagggggactccaacagcgcctccatcgcggcggcctccattttggccaaggtcagccgtgaccgctatatgctggagctggacaagcaatacccccagtaccagctggctaagcacaagggctacccgacgaagctgcactatgagctgattgcgcagtacggcatccagccgttttaccgccgcagttttttgaaaaagcagggctactggcatgactgacaccggccatatcggcgaagcgattgccgctaagtattaccagcagcgcggctggctgctgctcaaccataattaccgcacccgcatgggggaaatcgaccttattttatataaggaaaacacgctggtgtttgccgaggtcaagacccgcgcaggaaccatgctggaccgcccggcggctgcggtggatgcccgcaagcagcagcggctgattttagccgcccaacagtatctgcagcgcagcccctatggggaggctgacattcgttttgatgtggtggaggtcacgcccgcaggcggaggctggcaggtgcattgcatgcccggcgcatttgagtgctgagaaacactggcgtcaacgcatgaaggtcgcccgcggaacccagcagcaaggccgatgacgggcatcgacccccgcaacccgtaggggtggattccatatccgcccgcatcagcgccccacacaacggtatagcgccaacaaggcttatacacatagaggaagagaataagagaaagggtgtacagtatgcagtattttagcaccagagattccgagctccgcgtttccgcacaggaggcgatcgtccgtggtctggcgccgcagagcggtctgtttgtaccggaaactttcccgaaggctgatctggagggctggaaaaacctttcctatccggaactggccgagaaggtgctggcgggctttctgaccgattacagcgctgacttcctgcacaatgccaccgccgccacctacggcgcagcctttgatggcaaggcgggccgcacggtcaaggtccgtgagggcctctattcccttgagctgtggcacggtcccacctgcgccttcaaggactacgctttgcagttgatgccgaagctgctggtcgaagccaagaagatgctgggccgcaccgagaccacccgcatccttgtggcaacctccggcgataccggcaaggctgcactggccggctatgctgatctggatggcatcgagattgaggtgttctacccgaacgacggcaccagcgagatccagcacctgcagatggccacccaaaagggcggtaatgtgcaggtctacgccgtgcagggcaactttgacgatgcccagaccggcgtcaagaaggtctttgccgatgcagctgtggccgccgagctggagaagcgcggcatccgcctgtccagcgccaactcgatcaactggggccgtctggtgccgcagatcgtctactacttctacgcctacttccgcctggcggagcagggcgcagtggcatggggcaagcctgtggacttctgtgtgccgaccggcaactttggcgatattctggccggttactatgccaagcagatgggcctgcccgtgggcaagctggtctgtgcctccaacaagaacaatgtcctgaccgatttcctgacgaccggcacctacgatgcccgccgtaccttctataaaacgacctctccgtcgatggacatcctgatctcctcgaacctcgagcgtctgctctgccatgtcagcggcagcagtgaaaaggtcgcgggctggatgcaggaactgaatacgaccggcaagtacacggtggatgccgagacgctggaaaagatccgggagaccttcgctgcaggctatgccgatgacgccgagggggccgctgagatcaaggcccgtttcgaggaggatcactatctctgcgatacgcacaccgccgtggccttccgtgtggctgaggctgtgcgcaccaaggcaccgatggtggtgctgtccaccgccagccccttcaaattcccgcgcgatgtgttggcggccttggggcagcaggccccggtcagcgatttcgctgccatggctgcgctgaccgacaagaccggcgcggaggcaccggcctccctgcgcgagctggacaagcaggaggtgcggttcaagacggtgctgcagcctgctgagatccgcgccgcggccctgaaataagcaacaacaactagaaagtgaggctgtatggccatctttgcaatcggggacatgcacctctccctgggaacagacaagccgatggatgttttcccggggtgggagggctacctgccccgactggaagccaactggcgcaagctgataggcccggatgacacggtcattctggcaggcgacaccagctgggccatgaacctgaacgacacaaaggcggattttgcctttatccaaagcctgccgggccaaaaatggctgctgaagggcaaccatgattactggtggactacgacccgtaagatggaaaccttccttgccgccaatggctttgacaccctgcatatcctgcacaacaatgcctgcattgtggacgatacggcgctgtgcggcacccgcggctggccgtttgacgatctggctgcccaaggtgaaaagctgatggcccgtgaggccggccgtctgcggatgagcctgcaggcagccggggatgccgcgcagaaaatcgcattcctgcactatccgcccatctacccgggcgcggcggcgcaggagcttgtggatgtgctgcacgacttcggcgtgacagagtgctactacggccatctgcacggaaaatccatccgctatgccatgcagggtgagcgtgacggcatcacctaccggctcatttctgccgatggtctggcgttctgcccgtataaaataaggtgaaaacgcacaaaagcgtaaaattgcatgacttttttgcccaaaacctgttaaaatttttgaaataaggctggtattttctctgcaggcatggtataataacttgtatttttatgtacatctatttttggaggaatttataaatgaaactgatttcctgtgaaaagctcgaaaagagcatggtcgaactgcagttctccattgacgcggagaccttcaaatctgctgtcaataccgctttcaagcgtgagggcaagaagtacgcaatccccggcttccgcaggggcaaggctcccaaggccatgatcgagaagatgtatggcaaggacctgttccagtatgacgccatcaacgatctgttccctgagaactatgaggccgctgtcaaggaggccggcatcgaggttgttggccgtcctgagcctgaggtcgtctccatgtccgaggaggagggcgctactctgaaggtcaaggttgccgtcaagcccgaggtcgagctgggcgagtacaccggtttaaccgtcaacaaagatgtcaagactgttgatgaggccgatgttgacgctgagatcaagcgcatgcaggaccgcaacggccgtctgctgacccgtgagggcgaggcccagaacggtgacaccgtggatatcgactttgagggctttgttgatggcgttgccttcgacggcggcaaggctgagcactactctctggtgctgggcagcggctccttcatccccggcttcgaggagcaggttgtcggccacaaggccggcgaggagtttgacgtcaatgtcaagttccccgaggagtatcaggctgaggagctggccggcaaggacgccaccttcaagatcaagctgcatgaggtcaagtacaaggagctgcctgagctggacgatgatttcgccaaggatgtcagcgagtacgacaccctcgatgagctgaaggattctatccgcaagggcatccagaccaaccacgagaagcaggctgagcagagcgttgagaacgacctgatcgatcaggtcgtgaacggcatgaaggccgacatccccgatgctatgatcgagagccgcatcgaggagctggtgcaggacttccagtaccgcatctcccagcagggcctcaagattgagcagtacctgcagtatatgggcatgaccatggatcagttcaaggagcagttccgtgagcaggccgacaagcaggtcaagatgcgtctggctatggaggccatcgttgccaaggagtctatcgaggctaccgaggaggagttcgaggctgagatcaagcgcattgccgatgcttaccagatggaggctgacaaggtcaagagcctgatcgacgctgccgctgtcaagaaggatctggctgtcaacaaggccatcgacttcgtgaaggagaaggctaacatcgtcctgggcgctgccgaggagaagaagcctgccaagaagaccacccgcaagaccaccaagaaggctgccgccaagaaggacgaggagccgaaggaagaggagaagggcgagtaatcgcacctttccgtaaacattgagtaaaagggccggtacggttgtgcagctttgccgccgtatcggtccctttatcataaacccgcttttctgcaagctatcaaggagggaaacctgaatgagccttgtaccttatgttgtcgaacagactgcgcgcggtgagcgcagctatgacatcttctcccgcctgctgaacgaccgcatcattgtgctgagcgaggatgtcaactcctcctccgccagtgtgatcgtggcacagctgctctacctcgagggtcaggaccccgagaaggacatctacttctatatcaacagccccggcggctccatctctgacggcatggccatccacgacacgatgaactacatcaagtgtgatgtctccaccatctgtgtcggcatggcggcctccatgggctctttcctgctggccagcggtaccaagggcaagcgctttgcgctgcccaactccgagatcctgatccatcagccgctcatcggcgggcagggtatctccggccaggccaccgatatcaagatccacgctgaccacatcgtgcgcatccgtgagcggatgaacaccctgctgagcgagtacaccggccagccgctggagacgatccagcgcgacaccgagcgcgacaactatatgaccgcgcagcaggcaaaggagtacggcctgatcgacgatatcctctataaacactgattcgggggaacaacatggcaaatcaaacgtccggtaaggacggaaaaggacgcgagcttatctgcagcttttgcggacgctcccaaaacgaggtagagcagctggtcatcggtcccggcgtcaatatctgcaaggactgtatcgaaatgtgctgcaatgtgctggaacgcgatggtgagcgtccggctccgccgcgcgccggtatgccgccccgtgaccgccgccgtcaggcccagaagcccggcgcggattacggcgccgatccgctcgagagcatccatatcctgacgcctgccgaaatcaaggcgggtctggatcagtatgtcatcgggcaggatgccgccaagaaggtgctggctgtctcggtctacaaccactataagcgcatcctgtccggccagaacagcgatgtggaactgcaaaaatccaatgtgctgatgctgggcccctccggcaccggcaagacgctgctggcccagacactggccaagatgctgaatgtgccgttcgccattgcggacgccactacgctgaccgaggccggctatgtgggcgaggatgtcgagaacatcctgctcaagctgattcaggcggcggattttgacattccgcgcgctgagatcggcatcatctatgtggatgagatcgacaagatcacccgcaagagtgagaacccctccatcacccgcgatgtgggcggtgagggtgtgcagcaggccctgctgaagatcgtggagggtacggtcagcaatgtgccgcccaacggcggccgcaagcacccgcagcaggagttcatccagatcaacaccaaaaatatcctctttatctgcggcggtgcctttgacgggctggaaaagctcatccagaagcgcaccgacaatgcctcgctgggctttggcagccagctgcgtaccacgctcgacaaggacgagacccgccagaagctgctgaaaaaggtcgagccggacgatctggtcaagttcggcctgatcccggagctgatcggccgtctgccggtcgtgacggtgctggacccgctggacgaggaggcgctggtccgcgtgctgcttgagccgaagaacagcatcgtgcgccagtacaaggagctgctgcacctggacaatgccgagctggtctttaccgatgcggccctgcacgccatcgccagaaagacggtggagcgcaagagcggcgcgcgcggtctgcgcagcgttgtcgaggaactgctgattccgatcatgtacgacatcccgtccgatgctaccatcaccaaagtgacgatcgacgccgacacggtcgagggcggccagccccatatcgagcatggtgccatgcgcccgcgctataaaagtttgacggaacagcaataaaaattatctgcaccggagccaatgcgccccggtgcattttgttcacaaaaattttatatagaaaacacttgatttttcggtgcaaagtggctattatatatttagcactcagatagattgagtgctaaatcaaaaaatcataaaaaagagaaatcttttataaggaggaactttcactatgaaaatcaaacctcttgcagaccgtgttgtcattaaaatggtcgaggaagaagaaaccaccaagggcggcctgatcctgtccggctccgccaaggaaaagccgcaggttgctgaggtcgttgctgtcggccccggcggcaatgtggatggcaaggatgtcgagatgatcgtcaaggttggcgataaggtcctgaccagcaagtattccggcaccgaggtcaaggtcgatggtgaggagtgcaccatcgtccgccagagcgacatcctcgcagttgtggaatgatttgatttttcagtaatttctttcagataaaaggagagatctattatggctaaacagatcaagcagggcgaggacgcccgcaaggcgctttgcgcaggtatcgaccagctggccaacaccgttaaagttaccctcggccccaagggccgcaatgtcgtgctgagcaagaagttcggcagcccgctcatcaccaatgacggcgtcaccatcgccaaggagatcgagctgaaggacgagctcgagaacatgggcgcacagctcgtccgcgaggtcgccaccaagaccaacgacgctgccggcgacggcaccaccacggccaccgtgctggcacaggccttcgtcaatgagggcatgaagaatgtcaccgccggtgccaaccccatggacatcaagcgcggcatgcagaaggctgttgccgccgctgttgaatccgtcaaggagcacagccagaaggtcaacggcagcaaggacattgcccgtgtcggcaccgtttctgccggtgatgccgagatcggccagctgattgctgacgcgatggagaaggttacggccgatggcgtcatcaccatcgaggagaacaagaccactgccgagacctacaccgaggtcgttgagggcatgcagtttgaccgcggctatgtgaccccctacatggtcaccgacaccgagaagatggagaccgtctatgacgactgctctgtcctgattaccgacaagaagatcagcgtctttcaggatatggtccccctgctcgagcaggtcatccagtccggccgcaagctgctcatcatcgccgaggatgtcgagggcgatgcactgtccaacctcatcatcaaccgtctgcgcggcggcctgaatgttgttgccgttaaggcgcccggcttcggcgatcgccgcaaggagatgctgcaggatattgctaccctgaccggcggcaccgtcatcagcagcgacctcggctacgagctgaaggacgccaccatgcagctgctcggctccgcccgtcaggtcaaggtcaccaaggagaacaccaccattgtcggcggtgccggtgacaagcaggccatcgctgaccgcgtggcccagatccgcagccagatcgcaaccgctacctctgactttgaccgtgagaagctgcaggagcgtctggccaagatggccggcggtgttgccgtcatcaaggtcggtgctgctaccgaggtcgagatgaaggacaagaagctccgcatcgaggacgcgctgaacgcgaccaaggctgctgtggaggaaggcatcgttgccggcggcggcacggccactatcaatgctattccggctgtcgataagctggttggcgagctggagggtgacgagcgcaccggcgctaagatcgtccgcaaggctctggaggctcctctgcgccagatcgctgccaatgccggtctggagggcagcgttgttatcgacaacatcctgaaggccaacaagcccaactacggcttcgatgcccagaaggaagagtatgttgaggatatgatcgaggccggtatcgttgacccgaccaaggtcacccgttccgctctggagaacgccgccagcgttgctgcgatggtcctgaccaccgagagcctcgttgccgacctgcccgagccgccggcaccggctgccccggcccctgacatgggcggtatgtactaatacggtacccccaaaagcaactacaaggtcgaagtcttggcgacaaggcttcggcctttttgtataaggcgctgcgggcatagacctgtggcgggaaggcgtgctataataaaggaaaggcgcggccgcatggctccgactgcttatacagcagttgcgcaacggtgcggcgataataagcaaaaacagcgggggagccgccatgaagaaatacgcaaaatatatggcgctggccgtgacgctggctctgctgggactgattttctatttttccgcccagccgggggcggtttcctacaaggtcagtgagaccgtgatgaacacagttcaatccggcaaggcgaaggccatcacgccgcaatggttcagcaccaccaacctcaatgccaatgtccgcaaatgggcgcatgtttatatctactgcgcgctgggggtcagcatggcggtgacggtgcatctgtggacggtcagccttgccctgtggcagaaggcactgctgtctgcggcactgtgtatgctgtgcgccgccggggacgagctgcaccagttttttgtcccgggccgggccatgctgctgagcgatgtcggcatagatgcaatgggctttctgccttgcatcgcggcggtctttctctgcatccgggtgtatcgtggctgccggaagtgagcatactccccgtggggggatgctctatgtctttgcgccgcttttacggcctgtgtgcagtgcttgtgctgctggcgggcatcgtgctgtgccgaacctattgggtggggcagcagacggcctatgcggccaacgcgggcgggcagaccgtccagacggtggcgctgccgcgcgcgcggggagatttttatgaccggagcggccgcaggctgaccggcacggcgcagcgctattatgcgctttgcctgcccggtgaggcaggctacaccgcgctgtttccctatgtttcctatgaggcgcagggccttttgtatgagcggcgcaatctttcggccccgtttttggtacagaccgaccgggacctgacagggcagggcatacccacctgtacggtgccggagcatttcaccggtacgactgccgcccatctgctggggtatcttgacggggaaggcagcggcgttgccggactggagcgtgcctatgacgacctgctggtggcctgcggcgataagtgcagcatcacctgcatcatgacggcgcaggggcgtctgctggcagacacagcccctgccgtcacggttgaggagaccggcacggggcagggggtacagctgacactggatgccgatctgcagcgcgcctgcgaggcgctggcggcacagatcatgccgcgcgggtgcattctggtcatggatacagccacgggtgaggtgctggccagcgtaagtatgccaacctttgacccgcgaaatattgcagccagcatccgcgcagatgacacctctcttatcaaccggccgctgcgcgccttcagcgctggctcggtattcaaggtcgtgctggcggctgctgcctatgagagcgggctggactggtatacccacgactgtaccggcgaggtggagctggccgggcagacctaccgctgcgcgcagggccgtgcgcacggcacagtgaatctgcgcggtgcgctggaacagagctgcaacacctattttattgaactggggcagctgctgggggctgcgcgcatcctgtcaacagcggaaaaattcggctttggtacagcggtgcagcttgccccgggcctgcggagcgcggcggggacactgcccgatgcacagacccttgcaaatgacggacagctggcaagcttcagcttcgggcagggggcgctgacggtgacaccgctgcagatcacagccatgatgaacaccgtggccaatggcggggtgtaccgtgcaccggcatttgtgaaaggcattgccgattcgaccggggcgcttgcagagccgctgacactgcccgcgccgcgcacggtctgtgatgcaaaaacagcgaaggtcctgcgcagtatgcttgtgtcggtggtgacggaaggcatcggtgccgaggcgcggcccgctgcaggcgtggcgggcggcaagaccggcacagcgcagaccggtcaatatgatgaaaacggtgaggaactgctgaactactggttcagcggcttctacccggcgcaggcaccccgctataccgtgacggtgctgcaggacggcatattgaagcctgcgctgtcaagcgcggcgatttttgagaagattaccgagatcctgcatgtctgggacgcggccttgtaaaagacggcgggataggattttcggctttcattttgctgcagggtattgcacttttgtcttaaaaaagataaaataataactatctatagaccgtaacgaatccgtgctgaaagggacaggccaatgcagcatatctttatcataaatcctacggcgggcaaggtggatgccagcgtggcgctgatcccccagatccatgccgccgccagccgcgccggtatacaccccaccattgaggtgacccggcgcgctggacaggcgcgggatcttgccgcaaaatatgcggcctccgggcaggaggttttcctctatgcctgcggcggcgacggcacgctgaacgaggtcttgcagggggctgccggctatgacaatgcggcggtgggctgcgtcccctgcggcagcggcaacgattatgtgcgcaacttcggtacgcaggcgcaattccttgatctggatgcccagctggcggcgcgcccctttacggtggatatgatccgcacgctccagggctgtggcattgacatctacgccgcgggcattgacgctcaggtggccaacggcatccccaaatggagacgggtgccgctgtgcggaggcactacggcctacacactgtcgatccttgaggcggtgtgcagcaccttccgccatcgtctgcgcatcacggcagatgaccggcagatggaggatgtctacatgatgctggcaatctgcaacggccagcagtacggcggcggctactgtgccgcaccccacgccagcatgacggacggtctgctggatgtcgtccttctcaagcctgtgccgcgcttgaagctgcccgggctgctgggtgcttataaaaagggagagcatctgttggaggacgatgccgtggcggagaaattcaagccctacatgacctttttccgcacaagccaaattgatatagaggtgctggacggcaacccgctcatcacaacactggatggcgaatgctcgccccagatgcacatgcatgcggaagcggtgcgcagtgcggcgcacattctgctgccgcccgagctggccgccaatgcaaacgagacgcctgttctgcaggctatgggagagtaagcaatgtctgaaaaagttaaaatcaaaatcgcccgcaatgtggtgcatcttccggccatcgccctgcgcgggctggtggtgtttcccaacaatgtggtccattttgaggtgggccgcaccaagtccatcgcagcaatcgaggctgccatgcataataacagcagcgtgttccttgtggcccagcgcgagatggatgtcgaggagcctgcactgcgggatctgtacggctacggtgtgattgcggagatcaagcaggtgctgcgcgtctccgatgagcttgtaaaggtgctggtcgagggcaagacccgcgcgcgcctgctggagctggacagcgaggataaatacctgcaggccacggtgcgcccggtgccggtgcgcggcattgccgccgataagcgcacgcaggtcgaggcgctggtccgcagcctgaaggactgctttgaggagtacctctcctacagcccgcagatctccaaggatgttgtctataacattatttcgtcggattcgccgctctacctcagcgagtatatgcccgccaatctgctgctcaagtatgaggacaagcaggtcattctgaacgagtccacgctgctgggccgtctggaaaagctgctgaccctgctgcggcaggagtgtcaggttcttgagatcgagcgcgacttggacgacaaggtcaatgcccagatggacaagggccagcgggaatactacctgcgtgagcagatgcacattatcagcgaggaactgggcgattccgaggatacccgcgccgaggccgatacataccgcgagaagatccgggcgctggcgctggatgaggaatccaccgagaagctgctcaaggaatgtgaccgtctggcccgtatgcagggcagcagcgccgagagcggtgtgatccgcagctatctggatgcctgccttgccctgccgtggcataccgcgaccgaggatgaccttgatcaggcccatgcccgcaaggtgctggaccgtgaacattacggcctgcagaaggtcaaggagcgtattctggagctgctggccgtgcgcaagctgaatcaggatgtcaagggacagatcatctgccttgtcggccctccgggtgtcggcaagacgagcatcgcacactccattgccgagtgcatgaaccgcaggttcgcccgcatgagtctgggcggtgtccatgatgaggctgagatccgcggccaccgccgcacctatatcggcgctatgcccgggcgcatcatcagtgccattacaaccgccaagtccacaaacccggtcattctgctggacgagatcgacaagctggcaggcgattacaagggcgacccctccagcgcactgctggaggtgctggaccccgagcagaaccgcaccttcaaggacaactatctggatatcccgtttgatctgagcgaggtgctgtttatcacgacggccaacgatgcctcgaccatccccggcccgctctatgaccgtatggatgtgatcgagctgcccagctatacccgcactgaaaagttcaacattgccaaacgccacctgctgcccaagcagctgaaaaacaacggccttgacggccgcgtgaccctgacggccagcgcactgtacgccatcattgacggctacacccgcgaggccggtgtgcgcaatctcgagcgcaccatcacggctgtgctgcgcaaatgcgcccagaaggtcgccgccggggaggaggaaaagatcagcgtctccgccgccacggtcaaggcgctgctcggccccgaaaaggtcaagccgacctttatctcccgcaaggatgccgttggtatcgcaaatggtctggcatggaccagcgtcgggggcgagatgctgcccgtggaggtggctgtcatcccgagcggcaccggcaagatcgagatcaccggcagtctgggcgatgtcatgaaggaaagcgcccaactggccgtgacctacgcccgcgtccatgccgaggaatacggcatcgcggcggataaattcaaaaacactgacctgcacatccacgccccggagggcgctgtccccaaggacggcccctctgccggcgttacgctgaccacggcattgatctcggcgctgtccggcatccccgtgaaccacgatctggccatgaccggggagatcacgctgcacggcaatgtgctgcctatcggcggcctgaaggaaaagagcatggccgccttccgcgagggtatctccaccgtgctgattcccagagacaacgagagcgatctgtatgaggtggatgccgaggtgaaggagaagattcattttatcccggtcggcagcctgtccgaggtgctcaagcatgcgctggtgcgccccggccgcacccctgcccgggctgcccgcagcgtgccgcaggcaacctccctcatcgccaatgaaaagcccgcagatgcccgcaaggagcctgctgcggtgatgtaaaacgcggccctgtatacattataataaaggaacacccatgaactataataacagcgagtttctcgcgtcctacggcctgtcccgtcagctgccggtcagcgaccggccggagatcgttttctccggccgctccaatgtgggcaagtcgagccttatcaacaagctctgcaaccgcaaaaagctggcccgcgtcagtgctacgccgggcaaaacggccaccatcaacttttaccgcgtagataccgcctatcttgtggacctgcccggctacggctacgcaaaggtctccaatgtggagcgtgagcggtgggatgatctgatcaacagctattttgaggcggaccgctcagtctgcctgctggttcagctgctggacagccgccatgccccgagcgcggacgatctgcagatgctggagtacctgcattaccaccgcattccgtttgtagctgcactgaccaagggcgacaagctgaaaaaaagcgagatggccgcctgcaaggaagaatttgagaagatctgcgcaccctacggctgccgggctgtcgtgctgaccagtgctgagaacggcttgggttgtgacgagctgcgcgccctgctggaagccagcatggccggggagtgagccatggcctacaatgagtttgcctatttttacgatgagttcaacggcgaggccgattacgatgcgctttaccgctacatcacggcagagctgcaggctcacggcatccgggacggcattctggccgaccttggctgcggcaccggggatctgacgctgatgctgactcaggcaggctatgatgtcatcggcatcgaccggtcggaggagatgcttagcgtcctgcgtgaaaaggcggatgagctgggcttgaccgggcgtctgctgctgcttcggcaggatctgctcgagctggacctctacggcaccatccgcgcggcggtatccacctttgatacctacagccacatcggcccgctggatagctttgaaaaggccatacgcaaggcggcctattttatggagaggggcggcgtgttcctttttgatttgaacacgccctataagcaccgggaaattctggcggggcagacctttgatattgaggccgaggacgccgactgccattggtctaaccgctatgcggaggacgcgcagcgggtggatattaccatcgacattgactaccatgaaacgggcgagcatttccgtgaacaattcagcgagtacagctacacgctggacaccgtgcgcgccttgctggaaaagtacggctttgccgtggcaagggtcgctgacggcgaggatttcggccctgtgcgcgccgacagcccgcgctggatcattacggctgtcaagcaatacacacaagaggatgaaagcaatggaacagaatcataacatgctgcgcggcatttctgagaacggcggcattgtattttacggcgtggactctaccgagatcgtccgcgatatggagcgcctgcacaagacgagcgcggtcaccacggcggcgctgggccgcctgctgacggctgcctcaatgatgggcatcatgctgaaaagcacgcaggactcggtgacgctgcagatcaagggcggcggcccggcgggccgtctgctggcggtttctgacggcacaggcaatgtcaagggctatgtggagcatccggtcgtagagctgcccccgcgggcggacggccatctggatgtaggcactgctgtcggcaaggacggcacccttgatgttatccgcgaccttggcatgcgcgagccttatatcgggcaggtgccgctgacctccggcgagatcgccgaggatgtaaccacctacttcgccatcagcgagcagatccccacggtctgcgccctgggtgtgctggtggataaggatctgagtgtccgctgcgcaggcggttttgtcgtgcagctgctgcccggtgccaccgaggaggagatcgagcatctcgaaaagaacatcaaggccatgcccagcgtgacaacgatgctggagcagggcatgagcgtgcgcgatatgctggagctggcgctgcagggctttcagccggatattctggacagctaccatgtgacctataagtgtgactgcagtctcgagcgcgttgaaaaaatgatccgcagccttggcaaaaaagaggtcgaaaaaatgcgcgatgaggaccccatcgcggaggtgaactgccagttctgcaacaaaaattacagggtcgatctgaatgatgtactcaaaaactggccggacatcgttgaaagcgaggatgccaaaaaagtttgaaaaaacttgtaaaaaacgcttgacttttctgctcatatagtctataataacacctgtcgcccggagagagcgactgagcaaaacctctccaacatgcggccgtagctcatctggtagagcgccaccttgccaaggtggaggtagcgagttcgagcctcgtcggccgctccattagggggaagtttagctcagctgggagagcatctgccttacaagcagagggtcagcggttcgagcccgttaacttccaccaatgtggcccggtagttcagttggttagaacgctagcctgtcacgctagaggtcgtcagttcgagcctgattcgggtcgccatttgcctctgtagctcagtcggtagagcaggggactgaaaatccccgtgtcattggttcgattccgatcggaggcaccagtttcttgtatgttcttcgtaaagaatatacattatgcggccgtagctcatctggtagagcgccaccttgccaaggtggaggtagcgagttcgagcctcgtcggccgctccaaaaaatagtgaaaaatcggctcaataagccgatttttcactcatatggtgacgtggccaagtggtaaggcaaaggtctgcaaaaccttcattcaccagttcaaatctggtcgtcacctccataagcctgtgatagtgattctatcgcaggctttttgtttggcgggaatataccttcttcaacgggcagtttgtatgcagactgccggcattgctgtttaccttgcaaattgcgaggcggcatggtatactaacttgcgcaacactttatatacaaaaaagctacagagggattggaattcaatgatcgagacgattgcggcggtcaatcaggctgtcaataattttgtgtggggcgtccccgccatggtgtgcatcatcggcgtagggctgcttctcagtgtgcggacacgctttttgcagatccgcaaatttccgtatgccattaaaacgaccatcgggcggatgttccgcaaaaaggatgcctcggatggctcaatgacgccgtttcaggcggtatgcacggcgctggcgggcacggtgggcaccggcaacattgcgggcgtggcgggcgccattgccatcggcggtccgggggctgtgttctggatgtggtgctcggcactgctgggtatgtgtaccaaatttgccgaggtcacgctggcggtgcatttccgggagaaaaacgcggccggggaatgggtcggcggcccgatgtactacattaaaaacggtctgggtaagcactggcagtttttggcggtgctttactcgctgtttggtgttctgactgtctttggtaccggcaacgccacgcaggtcaacaccattgtggcggccatcgacacggcgctgctgcagtatgaccttgtgggcagtggggcgctctccaccctgaatcttgtagtgggcatcgcagtggccatgctggtggcgatggtcctgctgggcggcatcaagcgcatcggcagcgtcagtgagcgtctggtgccttttatggcgctgttttacattgtactggctgtgggcgtggttgcgctgaatctgccgcgctttccggcagtgatagagtcaatttttgccggggcgtttaatccggcagccttcaccggcggtacggtcggcagtctctttatcagtatgcagaagggcgtttcccggggtatcttctccaacgaggcgggccttggcaccggctcgatcgcccacgcctgcgccgacacgaaaaagccggtcaagcagggcatgtttggtatctttgaggtgtttgccgataccatcgttatctgcacgcttacggcgatggtcatactgtgcagcggcacggcagtcagctatggcacggctgccggggccgagctgacaatctccggctttactacgacctacggcggctgggcctccatctttacggcggtggcgctgtgctgctttgccttctccaccatcatcggctggggcttgtatggctcccgctttattgcatttctctgccgcagcgataaggtggtgcgccccttctttgtcgtctattcttttatagcgattctgggcgcaacgatggatttgggccttatgtggagcattgcagagaccttcaacggtctgatgagcatcccgaacctgattgcgctgctgctgctctccggcacggtggtgcgcctgacaagggactactttgccgcggacaaacaaagctaaaacaacagcaagcgccctgccgtgatggcagggcgcttgctgtgattttattgtaaggtgccgtccaaaatctgctggtagtaccacggcttttcggcgtgaaagacccgcccggccagatgggcaaagcgcgggtcagcgatctgggcaggaaaccgcagctcccacgcgcagagggcttggtatttgaaccgcagttcccggttggcggcgttgtttccatacttggaatcgcccagaatcgggcagccgatgtgggccagatgggcgcggatctggtgggtgcggccggtcacaagctcaacctccagcagcgccagacggccgctgacagccagtgtttcgtagccggtgatgacctccttcgcaccgcctgcagtcgtgtcggtgatgcgcacgatgccgcgctcggcgtccttcaaaagataatcccgcagcagggcggcgggcggattcgggcggccgaaggttacgcagagataccgcttttcaatggcgcggctcttgatggcggccgtcagaaaggcttccgcggcgctgcttttggccaacaggaccagaccactggtgccggtatccagccggtggcacagcacagcatgggtcggtttccccccggcggccagctttgcctgcacgcggcgcaccagcgtgtcgctgtcggggccgtctaccgcaatgcctgcgggcttattggcgatgatgatgtcatcgtcctcgtatacaaacaccgcggcaggggtggggcggttctccagctgctcatcagtcaggaagagcctgatgctgtctccgttctgtacccgggtggagaggggctgttttttgccgttcagcttgatcttgttctcccgcagggctttgttcagccgccccatgctgagggcgggaaactgatccatcagatatttgtccatccgcacgggcagcaggcattttacatgcagttctttcattttgtcgtcaactcctgatcccacaaaatcgtggcgtcgtcaatatccaaggtgaccatcagccagccggcgtcgtggtcatccacatccagtatcgggtattcctgcccgtctgcacacagcgctgcggcatccgttaagcgggcacgcgcaaagggagaatcggcaaagcagacggtcttttttgtggcgtccagcacgccgcggttccacagcgcatcggtgtaatcggccagccgcagggggtagctttcgttatagggggtgcagagggcatcaaaggtctgcccctgcaggccgggtgcaacgacataccagacggcaccgtccggcccggttacctgtccgcaccaggcgaggctccgcacaggctccacggcctgcaaaaaagccccctcatcagcaaacagatagagcgtatcgccctccggtgcgccggcagccaaggcatccagcgcggtctggcgttgggcggcgagggcgctttcgtcatagcgggcggcgaagggatcgttggtggtcatgccgttgtcggcggcccacagcgccagatgcaggcagtcggcctgcaggccctgcaccgagaggatgtgccggtattgtcccgcggcctgccagaagtcgctgaccatctcagtcgggaaggctgccgttttctgcgcgcttatcatcgcttcatgccgtgcagccagtgcggggctgatgtcccacagctgcacggcagccagcagtgcggcccagacggcagcacggggcaggtgtgtcagccctgcaaaggcagacagtgtcagcaggtcgtacacaggccagaacagacgcccgccggagcggaaaacggaaaacagcttgatgagggacggcggcagcggcagaacggccagcgttgccccgttggcggtgatgacattgctgacagcaaagccggtcagcacacagcagacaaggcagagcgcccagtgccgccgcacagcggccaatatgtgccgccgcgccgctgcgagcgtgatcggcagggccgccagcacaccgagacccagataggcaaaggcatcatagttgccatcgatctgattctgcgcaggcagcaggcggctgtagagaacaccgttcacccccacggggttccacagtgcgttcaggttcatggcaaaataaccgtacagcgcctgcccgccgctggtggcggtgccgtagaaaaagcccagcacccagcccagcaaaaccgtgcaggccatattggcgccgaggaaaagcgccgggcgcaggtattgccgtttttgcacggcgtattccagcagcagcgccagcgtaatggcgtaggtcatgggcaaaaaataggggtggatgcccacggcaatcacattgaggaaaaacagccccggtgcagcgtaccgcccctgccgccgcagcgagaaatagcagtacagcgctgccaaaacaagccactgtgcgcctaacgaggtgtgtcggaacgcgcgctcaatcagaatggggcttgctgcaaacagcagggcaccggccagcggtgctgccgtccccgccgcgaacaggccgcagagcagcgcaccaaagccaccctgcagcaaaaagcagaaaaatgtaaaccagccgaaatactgaaaggtgccgccgcagagtgcagccagcgggcggcagagcaccgccagcagggggatagagtcggtgtaggccacgctcacgccgctgggggcgttgacggcggggcttacgcccagcggccagcgcagggcgctgtcacggtaaaaaagccaaccggcgtaatgctgctgaatatccttttcaacaaagccgccgcggcagaaggcatcgtttgccacatccagcggcgcgatgccgtacacaagcaaaaacacggcggcccccagcagggcccccagcacaaacaactgcgtcttgcgcgaggattgaatctttgacatggcttcgcctttctgatgcaaaaaagcccagacagccgttggactgcctggactttggttccatgccgctgaccgggatcgaaccggtacggtatcgctaccgagggattttaagtcccttgcgtctgccagttccgccacagcggcataatatggttattgtagcgcaaaaaggcggaaatgtcaatcttcccgcggggtgtttttgcacaaaaagggcaagggagtatcccgctgtccccgaaggcgagaaattttctgcctgtgcagatggtttccgctgaaaaagcacaaaaaattcaaattcttccgcttgtgcttttggctgcgatttgctatactgatatggtatgtttggacaggtgcgcccattttacagtatgcgggcgttttggataaggagaatttagttggaaaagctgacctatacccataatgatgccgcagccaaggcgctggcatcgtattacgagaccccgccgctggcctatgtccgcagctacggctgccagcagaatgtcaatgacggggaaaagatcaagggcgttttgcaggatgtgggctacggcctgtgcgatacggccgagcaggcggatctgatcctatttaatacctgcgccgtgcgtgagcatgccgagcagcgcgtattcggcaatgtgggggcgctcaaaaagctcaaggaagaaaacccgcggctgatgatcggcatctgcggctgtatggcccagcaggagcatattgtggaaaagctgcgccagagctacccatatgtcgatttagtgttcggtgtggacggcattgatcgcctgcccgccatgctggcggagcgcatccgcaagggtaagcgctatctggaaaagccctccgagcgcaacgccgtggtcgaggagatgcccatccgccgcgattccggcttccgcgcctggctgcccatcatgtacgggtgcgataacttctgcacctactgcatcgtaccgtatgtccgcgggcgggagcgcagccgtgagccagccgccattctggcggagttcaggcagctggtggcgcagggctacaaggagatcaccctgctgggccagaatgtcaacagctacggcaaggggctggaaaatcccattgactttgccgatcttttgaacctgctgtgcgaggtccccggtgattaccagatccgctttatgacaagccacccgaaggatgccagccgcaagctgatcgacacgatcgccgcgcaggagcatctgtgcaagcacattcacctgccggtgcagtccggctctgaccggctgctcaaggagatgaaccgccattatgatgttgcgcagtacatggagcttatccactacgcgaaggagaaaatccccggcgtaaccttctccagcgacatcattgtcggcttccccggtgagaccgaggaggattttgaggccacgctggagcttatccgcaaggtgggctacatgcagctgttcacctttatctactccaagcgtaccggcaccccggcggccaagctgccggaccccacgacccacgccgagaaagctgcccgcatggaccgcctgctgaaaacgcaggaggagttcgcctttgcggctaccgccgccatggcagggcagaccgtccgtgtgctggtggaggccgccggccgcaacgagggaaccgtcaacggccgcctcgataacaaccttgtcgtggagttcacagcccccgaggcgctcatcggccagtgggccatggtgcgcatcacaggctcccgcgccgccctgctggtcggcgagcttgccgagtaaaccggtatcaaacctactatatataataaggagaatatctaccatggattgcattgatctttttaagaaagccgccgccgccctgcagaccgacccccgctatctggagctggacgctgcccgccgtgagaatgacgctgacgaggagctgcagcagatgatcggcgaattcaaccttgcccgtctggacctgaacaacgagagtgccaagcccgagaccgatgcggcccgtgtggccgagctgaacgagcgtgtcaacagcctgtacagccagatcatggccagcgagggcatggtccgctacaatacggccaagaaggaatgtgaggagatggtcggccatattgacgccatcatcaacactgccatgaacggcggcgatccgatgagcgtcaaggcacccaccggcggctgcaccggcagctgtgccagctgcggcggctgccactaaagcgtgaggcgcggggcagagaggccgtaggggcgcattctatatgcgcccgcagcactgtacgcagccgcataccttccgggcggatatggaatccgcccctacaagaacaacataccaactaggatcaacaggagtgtgaaacatggccgagcaagcagtatcgcccatgatgcagcagtattttgaaattaaaaaacagcatccgaacgagatcttgttttaccgcgtcggagacttctatgagatgttctatgatgacgccctgacagcctcgcgcgaattggagctgacactgaccggaaaaaactgcggcaaggaagagcgcgcccccatgtgcggcgtgccgttccactcctatgaaacctatatggcgcgcttgattgccaagggctacaaggtcgccatctgtgagcagatggaggacccggcgctggcgaaggggcttgtcaagcgggacatcatccgcgttgtcacccccggcaccgtcattgagagcagcatgctcgcggaggataaaaacaactatctggcaagcatttactgccgccgcacccgtggacgctggcgcgcgggcgtctgctttgccgatatatcgacaggcgaggcctacgccacggagctgaacgccgagaagatcggcggcgcgatcatcaccgagctttgccggtacatgcccagcgagatcctgatctgcccgccgatgctcgacttcaaggatgtgacgacctacatcaagcagcacacccacgctttggtggagctgcgtgaggatgcctgcttcaaggacactgttatggagtccacgatggcggaccagttcggcacggactggcgcgagacgctgggctatgagaaggacgccctcgtgccttacgccgtggccgccttgctcaactacctgcacgagacccagaagcacggtgttgagcgcattaagaccgtgcagaactatgccgatgcccagtatatgaggctgtcccctgtgacacgcgccaatctggaattgaccgagacgatgcgcggccgcgaaaagcgcggcacgctgctctgggtgctggataagaccgaaacctcgatgggcaagcggctgctgcgctcttggatcgagcagccgctggtggatgccgaggccatcaatgcgcggctttgcgcagtgcaggcgctctacaccgccaacatggcccgcgctgatttaaaggaggcactcggccatgtgttcgatatcgagcgcctgaccacccgcatcctgtacggctccgccaccccgcgtgaggtcaaggcactaggggacacctgcgccatgctgccgcaggtcaaggcgcaggcggccgcctgcggcgcgccgctgcttgtgcagctggcggaccagatcgacctgctggaggatgtgctgcaaaacatccgcacggcccttgtcgatgatccccccgcgaatatgaaggacggcggcgctatccgcgcgggcttcaacagcgaggtcgatgagctgcgcgacatcatgcacggcggcaaggggtacctctccaatctcgaggcccgctaccgcgaggagaccggcatccccaagctgaagatcggcttcaacaaggtgttcggctattatattgaggtcagccgctcctacaccgattctgtgccggacagctttacccgcaagcagaccctgacaacgggggagcgctacatcacaccggagctcaaggagctggaaaataagattctgggtgcgaacgagcggctgctggtgctggagcatcagctttttgctgatctgctgtcggcgatttcggctgaggtcatccgcatccagcgcacggcatcggctgtggcgcagctggatgtgctggcaggctttgctgaggctgccctgcagaacaactatgtcatgcccaccgtcgatgagagcggcgtcatggagatcagggagggccgccaccctgtcattgagcagatgctcaagggcagcctgtttgtgcccaacgatacgctgctcgatgagcaagaaaaccggatgctgctcatcaccggccccaatatggccggtaaatccacctacatgcgccagaatgccctcatcgcgctgatggcgcagatcggcagctttgtgcctgcagccagcgcccgcatcggtgttgtcgatgccatttttacccgcgtgggtgcatcggatgatctggctgccgggcagtcgaccttcatggtcgagatgaccgaggtggccgagatcctgaaaaatgccacgaaggagagccttgtcattcttgatgagatcggacgcgggacttcgacctttgacggcatgagcatcgcccgcagtgtggtagaatttatctgcgagaacatcggctgcaagacgctgttcgctacccattatcatgagttgaccagcatggagcaggacattcccggcgtaaagaactataacattgccgtcaaaaagcggggcgaggacatcaccttcctgcggcgcatcgtggcggggcctgctgatgacagctacggcatcgaggttgcaaagctggccggtctgcccggcagcgtgacccggcgcgcccatgcagtgctgcgccagctggaggccagtgcccccggccacagcagcacgatgcagctggattttgagacggtggaggcctacaataacccgagcgttcccagcgaggtcgtcgataagctgcacaaggtggacattgagacgctgaccccgctggaggcgctgaacttcctgtatgaactgaaaaacacccttgacaaagactaaaggcaggtgaaagcaatggcggagatccgcgtattggacaagcatacggcagagctgatcgcagcgggcgaggtcgtggagcggccggcctctgtggcaaaggagctgctggaaaatgccattgatgcgggcgcgacccaaattacgctgtccgctgtccgcggcggcatccaacagctgcagatcgtggacaatggctcaggcattgaggctgaatatatcgacaaggcgtttatccgccatgccaccagcaagatcgccacggcggaggatctcgggcatatccacacactgggcttccgcggcgaggcactggcctcgatcgccagcgtggcccgggtcgaggtgctgaccagaaccgaggccgatgagtacgcctgctgctaccgcattgagggcggcgagccgctgggcatcgagccgggcgcgcggccggtaggcacgacgatcacggtcaacgacctgttctacaacacgcccgcccggatgaaattcctcaaaaaggacgccagcgaggctacctttgtggcggatacagtgctgcacacggcgctgtcccaccccgagatcagctttcggttcctgcgggacggcaagcagcagtatgtgacccccggtgacggggatctgcgcagtgctgtctatgccgtgctgggccgtgagtttgcccgtgacctgctggccgtggacggcgggagtgaattgtaccatgtcaccggtctggtcacgccgccccgtgcctgccgcgccagccgcggggcacagcatttctttgtgaacggccgctatgtcaagaaccgcacgatcatggccgcgctggaaaatgcctacaagggcacgatgatgcagggtaagttccccggtgcagtccttatgctggaaatgccgcccgacatggtggatgtcaatgttcacccggccaagacggaaatccgttttgcacgggagagcgatgtctttgacgcagtgtaccgcgccgtgcgcgccgcgcttgcgacccccggcagcggggagtgccgctttgcgatgggccacacggcccccgagccagaggaaaaaaagcctgcggaggcgccgcagccgtcggcgcggccaaccgctgccccgcagaaaaaaggcggctttactacgctttctgcggcggagtatcgcgcaatggctggcctgacggcccccgttcccgtcagacctctgccggatgttctggaggcacagtccccgcgcccggcttatgaggccggccctgcgccgaagccgctggcacctgccgcgccggtgacgcctgtgaccgctggtgcatctatccccgtgccgcagccgatgccctacactgccctgaccgatgacacggtgctggatgtgatgcccgatatgccggacgaagcacctgccgaagcagcagccattccaacggtggccccggcacaggcgtccgagcctgactatacagtagacgcagaaaacgaaccccgcgccctgagcgccctgccggatgtcgctgtccctgagcagacaacactggcgccgccgccccaaagcgagccgctgcgtcttgtcggcgaggtgttcaagacctacatcattacggagcgcggcggcgagctttgcctgatcgacaagcacgccgcgcacgagcgcattttgtttgagcagcttgccagagactacggcaatgtgccgtcccagatgctgcttgtgccggtgcaggtcaacctgaccgctgcggaaaagcaggctgtgctgcagaaccttgatctgctgaccgatgcgggcattgaggccgaggactttggcggttcgaccgtggttgtccgtgctgtgcccgccgatgtggcggtggacgatgtcgaggatatgcttgtggagctggccgcaaaactggcggacggcggccgcgatgccctgcgtgaaaagaccgagtgggtgctgcattccatcgcctgccgtgccgccatcaaggcgggggaccgcaccaacgctgccgagatgctggcgctggcccagcacatcatggacggaacggtcccgccgttctgcccccatgggcggccctgtgtgctgaaaatcacccggaaggagctggaaaagcagtttggccgacttgtctgaactccgcgttatcgctgtcggcgggccgacagccagcggcaagaccgcgctgagcgtggcgctggcaaagacctttgacggcgagatcatcaacgccgattcgatgcagctctacaaagggctggacataggcacggcaaagccgagcccggaggagcagcaggggataccgcatcacctgctggacttcctgccgcctgaaactgcctacagtgtggcggatttcaccgctgcggcagacccgctgatccgtgagatatcgggccgcggaaggctgccctttgtggtgggcggcacggggctgtacattaccagcctgctgaacggcatgagctttgcccctgaaaagaccgaccccgccatccgcgcccggctgcaggcacaggccgatgcaggagacggcgcggcgctgtatgcaaggctgcagcagattgaccccgactacgcagcgattgtccacccgaataacctgccccgggtcatccgggcgcttgaactgtatgagtccaccggccgcaggatgagtgccgagcgggtgaatgcccgcgcagccagaccgccctaccgctcgctgtgtctctgcctgacctgccgcgaccgtgctgtgctgtatgaccgcatcggccggcgggtcgatgcgatgatcgaaaacggtgtgctggacgaggcccgccgggtgtatgagcatcgtgaaacctaccgcacggcggcgcaggccatcggctacaaggagttctttccgtattttgcgggggagcagagccttgcggactgcactgaaaagctcaagcaggccacccgcaattatgccaaacggcagctgacatggttccgccgccagaacgaggctgtctggctgtatctggacgaagaggatgtcgcagcccgtgcctgcgcgctggtgcgtaattttttgcaagagtaaccgaaaggagcgtgtacagtgagagaacggcaggaccgcccggcggccaagagattttttcaggctgtcggcctgctggcactggcgcttgtctcggtttatatcattgtgcagtgctttgtcatcttccgccagtcctacaagaccgagacagccatccggtacacgatggccgagagcgtacgcctgaacggcgttgtcgcgtttgactcagtggatgtggcgggcagcggcaatctggggtatctggtgcaggacggcgagcgcgtgacgaacggcaccgtggtcgcagagtgctataccaacgatgagcagggcgttcagcgcgaacggcttgaccggttggcgcgcaccatcacgctgctgaccaagtcccagaattcaaccggcagtgagctctctgtgctgacaaaccagacaaggcaatccctgtacaacctgcttgacaagctggacacagcccagtacggcggcatctctgaggcggaggataactttctgctggcccagaaccggctgcagatcagcaccgggcagacggcgggcttttcccagaccatcgcggccctgcaggaagagtatgacggcctgaaaagccagcttgacaccctgcagacgatcacggcggcaacgaacggctatttcagcagtacggcggcctcgccgctgatccgggccgaccggcagacgctggatgacgctgaccccgccgcactgcagaccatgctgcaggagggcttcccggccgctgacaccggccgcgccgggcagatcgcaacaggcttcagctggaaattctacgccgtctgcgacctcgataccgccgcccgctttgaaaatgtcggcacagtgaagatcagcgtgcccggcaagcagaacaccccgctttccgccacagttgaggaggtgcagactgacaaggacggcggcattgccaaaatcgtgctgcaatgccagaccatcaacgccgatattctgggcttcggtctggaaaccgtgcagatcgacctcaaaacctacgagggcatccgcatcgacaagcaggcgctccacatcgtggacggccagcgcggcgtctatatcaagtacggcaacctgcagcgctttctgcggatcacgaccctgtatgagaacgacagctatatcctgatccccgataacggcaagatcggcaccgataacgaggtgcggctgtatgacgagatcatcgtgcagggcacaaacctgcaggatggcaaactattataacgaaaatacgggcttttgtattgacaagagtaccaaaaaagaagataatatttaatgtatatcgctgtagcagtgtactgaccgtgaacagtgcatagtttttaaaggagttttacgaccatgtccatgtttgacagtttgaaaagtaaactcggtatcgattccgaagcagattcctatgtggacgataccgaagacgaaatcttccccggcgggcagggcggcgctgcggcgcagggctacacccagcaggaggtcaagcagcacagcaataaggtcgtgaatatcaatgcaacgacccagctgcaggtcgttctggtcaagccggaacgctttgaggatgcctccgccatcgcggatcagctcaacgccaagcatacggtggtgctgaatctcgagtccaccggcaaggaaatctcccgccgcctgatcgactttttgtccggcgtggcctacgccaacaacggccagatcaagcgtgtggcgaccagcaccttcatcatcacgccgtacaatgtcgatattatgggcgatttgattggcgagctggagaataacggtgtattcttctgatacagccgacacaattccggcagtccgaggctttgtgccgccccagaacgatgatgagcgccgtctgatgcgccgcgttgaggagctgtgccgcatttgcgaaagccgcggtatcccgcgctatacgggctttctctccgaccgggagcagagtctggcgcaggccgcctgcaacagggccgggtgcagctgcatccgcttttggggcgggtttgacggcgcggagcgaaaagtcctctgcatagagccgcccgaggcatggcaggaggagccgctcgcgtatctgcagtttaccgcctgcggcgataagctgccgacacaccgcgattatctcggctcgatccttggtctggggctggagcgcgcctgtgtgggagaccttttggcagacccggaaaaacccgataccttttacgccgttgttctggcagataagcaggcgtttattcgcactgagctgacgagcgcgggacattgcaccgtacacaccgaatgtgccgacgcgctgcccgcccatcttttggaaagccgcgagcgtgccctgcagcaggccactgtgccgtccctgcgggccgatgcggtgctggccgtgatgctgcatacctcccgcacccgcgcggcagaatatattgctgcaggccgtgtggagatcaaccatctgccgttgagggccgcccacgagaccgcctatgccgaggatatcttcacggtgcggggcgtgggccggttcaggctggcggccatcggcggcaaaagccgcaaggaccgcctgtttatatccttttatcaatactgagcgcatgatctgcccgcggaacgccgcgggccgggaataacggggcgcaaagctccgcatacaggaggaaagtcatgatctcatctgaggatgtccgccgcgtaacgtttgaaaaagcgtttcagggctatcgccgcgacgatgtggacgattatctcaagcaggtggcccagagcatggatgagctggccgcccagaacgatgatctccagaaaaagctggtcgtgctggcccagcgcatcgaccagtaccgtgctgaggaagatacgctgcgcaccacgatgatcaatgcccagcgtctgggtgaaaacgtcatccgtgaggccaagcagaaggcggccgagatcatacgcaccgccaacatcaaggctgaggaccgcgagcagcgctcccgcgatgatgtcgagctggccaagcaggagatcgtcacgctgaaaagcgaggctgacagcttcaagcgctcgctgatcgagatgtaccgcaagcatatcaaccttatcaataagctgcctgattacaccccgcagcccgaggatgcgccggttcgcccggtccagcctgcggccgagcctgtgcaggcaccgatccagacggcagccccggttgagcagcctgccatggcggcggagcctgtttatacaccgcccgccacccagcctgcggctgagcctgccccggccccggtgcaggagacggcgtactatgaggagcctgccccgcagcctgcagccgagccgctgcgccccgcggcggaaaaggtggatacggtggagtttgccatcgcgccccaccccgaggagccggaggaaccggacccggtgcccgaaatggcagccccggccatagaggagacgcgctttcaggatgtctccggcctgtatgatgagccggagaccaagccggtgcgccgtacccgcaagacgggcactgcggccaaacgcaccacccgcaaaaaagtaagtgccgaaccgcaggaggagttgaactccccggcgttcgataactttgaaggcgttgactttgacagctgacgctgaaagaatccatagggggcagccccgcgcaatgtcagcccggcgggcgttaagcagcgcttcaccagcgcttgacagcaggcgggattgccatcaatccaaaaaatagaggagagtaggaaaccttggcgcagaactacaacgacacgatccataagatgcagaccccgtttgaaatgcgggccggtctgccgaagaaagagcccaagatgctcgaggactgggagaacaaccatgtctatgagcagatgatcaagaacaacgagggcaagccgcagtacatcctgcacgacggccctccgtatgccaacggcaacatccacatgggcaccgcgctcaacaagatcatcaaggatatcatcatccgctataagaatatgaccggctttgaggcaccctatgtgcccggctacgatacccacggtctgcctatcgagctgaaggcgctgagctctctcggcgataagaaggcgggtgtctccaagcttgagctgcgcaagatctgcaaggagttcgccaccgagcatattgatgtgatgaactctcagttcaagcgtctgggcgtgcagggcgactttgagaacccctacctgaccctgcgccccgagtttgaggcccgtcaggtcgaaatcttcggcgagatggccagaaagggctacatctacaagggcatgaaggcagtttactggtgccccgaggatcgcaccgcgctggccgaggcagagatcgagtatgctgaggacgagtgcgattccatctatgtccgctttaagctgaccgatgaccccaacggtgtgctggctaagcacaatgtcccgctggacaaggcctggatcgtgatctggaccacgaccacatggaccctgcccgccaatgtggctacctgcctgaaccccaaccttgagtatgccttcgtcaagatcggcgatgcttaccatatcatggctgccggtctggtcgagtccacgatgaagggctgccatatcgacgagtatgaggttctgccggagactgttctcggcagtgagctggagctgatgcagtaccagcatcccttccttgaccgcaagggtctggtcattctgggcgaccatgttacgctggagggcggcacaggctgtgtccataccgcgcccggccacggcgtggaggactttgaggtctgcgtgaaccactatccgcaggtccctgtggttgttcccgtggatgacgccggccgtctgaccgccgaggcaggcgagaagttcgcaggtctcaaggtctgggatgccaacaaggtcattctggagcatatcaaggagagcggtcacctgatgggcgtacagcatatcacccaccagtacccgcattgctggcgctgccaccaccccatcatcttccgcgcgaccgagcagtggttctgctccatcgacgccttcaaggaggatgtctacaaggccattgataatgtgaagtggcagcccgcctggggccatgaccgcatggccggcatggtccgtgaccgcagcgactggtgcatcagccgccagcgcgtctggggcgtgcccatcccggtgttctactgcaagaagtgcggcaagtaccacatcaccgatgcctccatcaaggccgtctccgacctgttccgcaaggagggcagcgatgcatggtacaagtatgatgccaatgacatcatgcccaagaccgaggtctgcgagtgcggcgccgctgactgggagaaggaccccgacatcatggatgtctggttcgactctggctccacatggagcgctgtctgccgcgagcgtcccgagctgcgctggcccgtggatatgtatatggagggcgccgaccagttccgcggctggttccagtccagcctgctgacctgcgttgccactcagggcattgccccctacaaggaggttctgtgccacggctgggtcgtagatgagaagggcaagcagatgcacaaatccgccggcaacggtgtggagcccagcgagatcatccgtgattacggtgccgacatcatccgcctgtgggtcgcctccagcgattacaccgttgatgtccgcgccggtaaggagatcttccgccagctgtccgaggcctaccgcaagatgcgcaataccgcccgcttcatgctgggcaacatcaacgactttgatcctgccaaggatatggttgccgatgaccagctgtttgagatcgaccgctgggcgctggaggcctgcaataagctgaccgccaacctgcgcgatgcctatgaccactatgatttcagccgcgcctaccacgcactgtacaacttctgcgtcattgatatgtccaacttctacatggatgtcatcaaggaccgcctgtactgtgcggatgaccatgcgcgccgctgcgcacagactgcattgtaccgcattctggtggacttcacgaagctgctggcacccatcctctgctttaccagtcaggagatttggagctatgtgccgaagctgcccggtatgaaggactatgtggtctttgagcagatgcccgaggctaagcccgctgccgacgatgcctttaccgccaagtgggatcgcatcatggcgatccgcgatgatgtgaagaaggttctggagcaggcccgtgccgataaggttatcggctctgcgctggaggccggtctgacgctgtactgcagcaaggaggtctacgacttcctgaacgccatcccgatggatgagctggccgacctgttcatcgtctcccatgtcgagctgatcgagggtgaaggcggtgtcaagggtctggtcgaggggctcggcgtaagcgctgcccacgccgccggcaacaagtgcctgcgctgctggaagtatgatacctccgttggggaggatggcctttgcccgcgctgcgctaaggttctgaagctgtaaatttactctgccgtcagcggtgcttatacgcgtaagcaccgctgattttttcggataaggtgttgtatgatttctggtttgttttctctgctgggggcggccgttctggtcgtgattgaccagcttatcaagcactgggccacggcggtgctgctgccggttggcaatatggatgtgctgcccggcattgtcgagctgcgctactgcctgaatgacggcatggcattctcaatgctggccggtaagcagacgctgctcatcggcatgacctcggtcatgctggtggtggtggccgccatgctgtttgcccgcaaaatgcctgtgtgggagcgcatctcctggacgctgatcctcggcggcggtgtgggcaacctcatcgaccgggtgctcaacggcgtggtggtggactacatcaatgtgctgttcatgcactttgctatcttcaattttgcggatatctgcgtctgcgtgggtgtcggcctgctgatgctggtcgtgctgctggactccttcaagaaagaggagaccgcaaagcaaaaggcggatgacgatggaactgcttgagctttccgccgcccccggcgacagcggtcggctggatgcgtggctggcggggcagtgcccgacactctcccgcagtgcgctgcaggggctgatcgagcaggggcttgtcacccgggacggcgcgcccgtcaacaaaaaagacaaggtagcccccggtgctgtttaccgtgtggcactgcccgacccgcagcccattgaggcgcagccccagaacattccgcttgatattgtgtatgaggatgatgacctgctggtggtcaacaagccgaagggcatggtggttcacccggcccccggcaacccggacggcaccctcgtcaatgcactgctctaccactgtgccgggcagttgtccggcatcggcggcgcgatccgccccggcatcgtacaccgcatcgacaaggataccagcggtctattggtagtagccaaaaacgatgcggcgcatcaggcgctcagcgcccagatgagcgtacacagcatccatcgtgtctaccatgcggtggtctacggcaacctcagggaggacgaaggctttgtggagcggtggatcggccgcgacccgcatgaccgcaaaaagatggccgtgctggcggaaaacgctgccggggcgcggtatgcctatacaggctggcatgtgcaggagcggtacggcaattttacctacatagcctgtaagctcaagacagggcgcacccaccagatccgggtacatatggcatccacagggcatccgctggcgggggatgccgtctacggcccgaaaaactgtatcaaatcgctgaacggccaatgcctgcatgccaaggaactgggctttgtacacccgaaaacaggggagtggatgcagtttgattccccgctgccgccctattttactgattttctgacacggttaagaaaggaacatcgcgcatgaaaccacccctcggcgatacccttgtgatctgtgacatggataatacgctgctgacggctaaggaggggattcctgcctgcaaccgggcagtcatccggctgtacaccagtctgggcggactgtttacggtggctaccggccgcccgccggagtcgatccgtgcagcgctgggggatatccgcctgtccctgccggcaatctcctgcaatggggcactgctgtatgatttttccaccgagtcagtgctgcatcgcgcaaccctgaaccgtgagcaggccaccaccgccattctggacattctgaacaaattcccccgtatgggggtcgaggtcatggccggaaacggggaaatgtatgtcatccatgccaacgaagttacccacgcccatcaggtggacgagcacctgggcagcatcgcctgcccggtcgagtcggtgcccgatggctggatcaaggtcgtgtttgcctccgacccggagagcatccgcaagctggggcagtacgccaagacgaaatactatggccgggataactatttccttgccaccaacagcatctatcttgagatcatgcccggcggcgtaagcaaggccagcggtctgcacgacctctgcgccctgatgagcaagtccatgaagaacaccgtctttatcggtgactactataacgaccttgagctgatgcgggaggccggctacgcggttgcggtggccaatgccccggcagaggtcaaggcagctgccgaccatgtaacgacctgcacctgcgcagagggcgcggtgggtgaatatctgtacagcctgatcggcaagaccgagggctgaccaaagagggtttgacgatgaaagtcagcgaactgatggaccccaagggcgttctgctccatgcaaagatcgacaactccgccgatgcattgggtattctggtggagctgcaggaggggatcggcgtcattaccaacggcaatgcctattataatgccgtcagctaccgggagaccttcggcggtacaacggccatcggcggcggcattgcgctgccgcatgccggcaacgccggtgtgtcggcaccgggcatatccgccctgcttttgcgccacggtgtggattggggcgccccggacgggaaaccggtagaccttgtgtttatgatcgccgttccgccgcgctgcgaaagcctgcacctgcagatattggcacggctggtgaatttgctcagccgcagtgatctggttgaggcgctgcacaacgcaagcaccccccagcgctttgttgaactgattgccaaggcggaaaacgcctgctttgcagactgaaatctgatttgccccagcttgtgtataagctggggcattttgtttacatccgcccgccgtacctgccgcaaacagcgtgggcgactgcaaggtgttcgttaatttgactaaaaaatacttttaagtgggcagagtattatacgaaattacacttgctttaaagcactaaagcgtgctatactttaaagcactaaaccggctgcgcttgagggatctgcctgatggcaggtgtacacctgaagaaaaaaggtgcgcagcgggtactattggaggaatttacatgaaaaaagcagtttcccttatgatggccgccgccatgaccatgggtctggccgcctgcggtgctaccgcgtccgccgctgatgccgcttccacggccgataccgcttccggcacggaggctgccgcggacagcaaggtttaccgtgtgggcatctgccagctggtccagcacgaggcactggatgccgcaacgcagggcttcaaagatgcacttgtggaggcgctgggcgagggcaatgtgaagtttgatgagcagaacgcctccggtgattctgccaactgcgccaccattgtgaacggcttcgtttcctccaatgtggatctgattctggccaatgcgaccgccccgctgcaggcggctgcacaggcaactgccgatattcccattttgggcacctcggtcacggactatgcgactgcgctggacatcagcgactggaccggcacggtaggcggcaacatctccggcacctccgatctggccccgctggatcagcaggcggccatgattcaggagcttttcccggacgccaaggcggtcggcctgctctactgcagcgccgagccgaactcggtttaccagtgcgatgtcattgagggctatctgaaggaggagggctacagcgttacccgctacgccttcactgacacgaacgatgttacctcagtggcacagacggctgccgataactccgatgtcatctacattcctaccgacaacaccgctgcctccaacaccgaggcaatcgccaatgtggtcctgcctgccaaggttcctgttgtggctggcgaggagggtatctgcaacggctgtggtgttgccacgctgtccatcagctactatgatctgggccacgccaccggcgagatggccgccaagatcctcgctgagggtggcgatgtttctaccatgccggtagagtacgcacccaatgtcaccaagaaatacaacgctgccaactgcgaggcactgggcatcaccccgccggacggctatgaggccattggctgatataacagcagccgtttaaccaccatcatgacagcgaggaaggggaggtaaactctctttccccgctgttttggtgcttataaaaattctggaggatgtttttatggagttcctgacctccctgttgaactcaatgcccggtgccgcagcgcagggactgatttggggcattatggccatcggcgtttatcttacctaccgcattctggatgtggcggatctgactgttgacggctctctcggtaccggcggcgcggtctgcgttgtgctggtgctgaacggtgtgccggtgggggctgcccttgtggccgccacgctggccggtatgctggcgggccttgtcacaggtctgttccacacggcctgcggcatccccgcaattctggccggtatcctgacccagctggcgctctattcggtcaacctgcgcatcatgggtacaggcacgggcggcggcaaggctaacctgcccatcagcgtggataaatacggtctgctggtttcggcccggtatgtccgtgcgctggcgctcaacaatccgattatcgtgctgcttatcttctgcgcaatcctcatcggcgtgctgtactggttcttcggcacggagcttggctgcgcactgcgcgcaaccggtgccaaccagcatatggcccgtgcgcagggcatcaacaccaatgtggccatcgttctgggcctgatgatctccaatggccttgtggcgctggctggcggtctgctggcccagtatcagggcttctctgacattaacatgggccgcggtgccatcgtcatcggtctggcggcggtcatcatcggtgaggtcgtgttcggcaagatcttccgcaactttgcgctgaagctgacggcctccgtcatcggtgccatcatctactacattgtcatgaactttgtgctgcgcatgggcctgtccaccgacgacctgaagctgttgacggcgcttgttgtggcggtgttcctgaccatcccgtattggaagggcaaatactttaccaaggtacccgtgaaaaagggaggcaaggacaatgcttgaaatcaaaaatgtatacaagaccttcaatgcgggcaccgtcaacgagaaggtggccctcaaggggctggacctgacgctggaggacggcgatttcgtgacggtcatcggcggcaacggcgcaggcaagtccacgatgctgaatgccgtggccggtgtctggccggtggatatgggcaagatcgtcattgacgggcaggatgtgacccgtctgtcggagcatcagcgcgccaagtacatcggccgtgtgtttcaggacccgatgatgggcacggcggccaccatgcagatcgatgagaatctcgcgctggcggcccgccgcggactgccccgcacgctgaagatcggcatcacgaggaaggaacatgacacctactatgagctgctcaagacgctcgatctggggctggaggagcgcatgaccagcaaggtgggcctgctgtcaggcggtcagcgtcaggcggtcaccctgctgatggcaacgctgaaaaagcccaagctgctgctgctcgatgagcataccgccgcactggaccccaagacggctgccaaggtgctgaccctctcggagaagatcgttgaggaaaaccacctcacaacgctgatgatcacccataacatgaaggatgccatcaagtacggcaaccgcctgatcatgatgtatgagggtcacatcatctacgatgtgcgcggtgaggaaaagaaaaatctgcaggtcagcgatctgctcaagcggtttgagcaggtgagtgacggcgagtttgcaaacgaccgtatgctgctttcctgaggcggcggcggttgagcttgcgcaatattgtcctgctgttttagcccgggtgccatcccgggctttttgtgtacaggcaccaccgcacgggtttggctgctgcggcaggaaaaaatgcacggtgatgcctgtaataaaattgtaattcgtgacaattttttgaaaagcatgttcaaaacgccgtaaatatggtataatctttaacatgtatactaggtgggatatggcctttcggtctcccgtattcaataaggcattaccgtataatccctgtgccgctgcagtgggcggtgctgccatacataaggaggataccatttcctatgagccgcgaatcgtatgaaggaaagaagggcttcagccctgcacagcgcaaggcctgtgttgtgctggcgctttgtgcgctggcaatcgttttgagtattctggcggcgtgggtgctgcctgccaagctggggctgttcatcggcggtacaggcgcctatgataaggatgcctatccgctggatacatcgctggaggctgtgctgccgcaggccgctgcagacgatgcctacatcacagccagcgtctttgccggtgaccagtacgccgtcaccctgcagaaggacggccgcatcacgctgaatcagtttgtcgggcaggaggggctcaagacctccaaggcactctcgacctcctgtgtcaactttgcatcggattccagcaattatacgatcccgcaggcaattcccaagatgaaggcccgccgcgtttttgtgcagcttggcgccaacgatgtcgatggctcagtcagcgttgattcctttattgcagattacaagcagttcctgcagagcatccgctctgcctattcctactgcgacatcatcgcggtgggcatcccgcccgtcacggaggacagcaccaacgccgccgcgacccagacgatcatcgaccagttcaatcaggctatcgccgtggcctgcaatgatctgggctgcaagtatctgaacagcgccgaggcgctgaaaaacagccggggctatgccgaaagcagctactttgaggccaacggctacagtgcctccggtgcgcgcgctctgctggaatacgcaaagtcccacgcctacaatacgatggacagccgcccggataccagcgacattccgcagcgcgcctcccagtccagcggctctgccagtacgccgctgcccaccgcaacgccgacaaagttcaccgccagctatgaggttgaggacagcggcaagggcaccctgaccggcaacggccagaccggtgtagcgagcgttgaaattcaggcggagagcggtaccagcgtcaatgtcacggcagtggctgcagacggctttgtcttttataaatggagcgacggcgttacgaccgccacccgctatgacaacatcaccaaggatatctccgtcaaggctatgttcaacgatgcccgcgtggagctgacgcttgacaagggcgacacggccatgaagaagggcgagagcctgaccgtgaacgcaacggtcaagcttggcagcaaggcgtatgacgccacgaatgtgcagtggtccatcaacgatgagatggagaagaacggcagcagcctgacctttacccccaatgccgccggtacctatgtcatcaaggcaggcatcgagatcaacggtaccttctcgaccgcacagctgacggtcacggtggcagccgatgccacaacggtgaacatcagcggcagcaacaccctgaccgttggccagagcacgaccctgaccgccaccatcggcaatggaagcggggagactgtctggggctgtgaggagacctcttggcgcgcctcgggtgagcaggtgacctttacggcgaatgaagccggtacctaccgcatccatgccgcaaataacggcactgacagtgtgtttgtcgtgacagtcaacccggcccccacgcaggcccccacaccggcgcccacgcaggcccccacgcccacaccctcgcccacgcagccgcctgaaaactagtccgatgaataaaaccggaggccacgccgccccctgacagaggtaagactatggcaatttacacttgtgtcctgctggacatcgacaatacacttcttgactttgatgccgcagagcatcaggccctgaccgacatgctggcagagtatgagctgccccacgatgagaacgcctgcgccgtctaccatcagataaaccgggaactgtgggacgcactggccaaggggcagatgaacaagcaaaagctgtttcaggtgcggttcggccgctttatgcaggctatgcagctaccggataacggcaagagcaaggctatgaacgaccgctatgaggaactgctctccacccacgccgacttgctgcccggcgcgctgaccgcgctggaggaactgagcgaggtggcaacgcttgccatcgtctccaacggtgctgttgccgtgcaggagccccgcattgctgcctccggcatcgaccgctatatggacggcatttatatctctgaaaaaatcggcgcagccaagcccaatgccaagctgtttgagcatgccctgcgtgatctgggcatcacgaaccgcagccgtgtgctgatggtgggggatgacctgcttgccgacatcaagggcggcatcaacgccggggtggatacctgctggttcaacccccggaatgtcgagaataagaccgacatcgcgccgaaatttacggttggctcttatgaggagctgtaccgtatcgtgatggagccggaggaactggaaaatctgggcgtgcgcaaccgccgccacagcaacgaagccctgctgtaagcaagcacagggcatactgccgctgcccgtatataaggcggcggcatcattttggaattaaggatgtaccgctatgttgttggaacttcaaaatttggccaagagcttcggcgaacacgaggtactgcatgatgtgacagccggggtggagcgcggcgaccgcatcggcattatcggcgccaacggcaccggcaagacaacgctcctgcgcatcctgtgcggcgagagcctgcccgatgcgggggatgcggcgttcggcaccggcgtgaccaccggctatctggagcagaatgccagactggaccccacgcttgatgtttatgccacgatgaagctggtgttcaccccggcattggatgccatgcagcagatggaaggtctgcaaaagcagctggctgccgatccccataatgcagagctgaccgacaagatcgcgcactgcaccgctgtggtggatgcgatggatgcctacaatatggatacccagatcaaaaaggtgctgaacggcatgggatttccggccgacacatggtcaaaggcagcgggtgtactctccggcggtgagcagacccgcctgcgtctggcccgcctgctgctggagcggcctgatctgctgattttggacgaacccacgaaccatctcgatctcgaaacgatggagtggctggaaaattacctgaaggcctaccgcggcgcggtgctggttgtcagccacgaccgctattttctggatgccgtctgcacccgcatctgggagctgcgcggcaagagcatcaagacctaccgcggcaactactcagcctatctgcctcagcgcgaggccgccgatgagcgccagcaaaagctgcacgatgccgccgtggagaaggcagccaagctgcaggattatgtggaccgcaatctcgtgcgcgcctccaccaccaaaatggcgcagagccgccgcaggcagcttgaaaagctggaaatcgtcgaggcacccactgcggaggcgtgggagctgaacttccgctttgagtatgacattgagccgtatgatgagctggtcatcatgaaaaacctgagcgttcacatcggggagcgcaccctcattgatgcgctggactatgtggtccaccgcggggataagcttgtcattgccggccccaacggcgcgggcaaatcaacgcttttgcaggtgctggacggcaagcgccgcccctccggcggtatggtgcggctgggcagcggcgccaagccgggcatcttcacccagcagcaggcccgccgggcaggccgcgtcatagatgccatctggaaccagtatccccgctttacggagctggaggtgcgcagccatctggcacggttcggctaccgcggcgaggaggtattcaaggactgtgcctctctctccggcggcgagctggcccgcctgcgctttgccgagctggcgctcgagcggccgaacctgatgttcctcgatgagcctacgaaccatctggacatctatatgcgggagagcctgactcaggcgctggcggcctacacaggcacgctgctgcttgtcacccatgaccgctaccttatgcagacgctggactgcccgatcatgtaccttgaaaacggcagcgcgacattttaccagaactttgccgcactgcagaaccgcgaggccggcagaggggcgaaggcacaggaaacgcagcagaaggcggaggacagtgccaaaaagcagggctacggcaaggagcagcgcaagcgccgcgccgaggtgcgcgcccgcctgaaaaaggtcgagaccgagatcgaggagctgggagcgcacatcgtagagctggaaaacgagatcaacgaccctgaggtgctgcgcgatcatctgctgctgcgggataaatgcgatgagctggacgatacaaggttccatcagcaggagctgtatgaggaatgggaaaagctggcagaggagcaggagcgcttcgaaaacgagggggaataagcttttaccgttctgtaacttgtattccgacgaaaaagcgttatactataggtttagcaagaatagtcggaagagtgtaggaaaagtatataaggcgggttgaacacattgcagaccaccattatcgtagcaacgcataaaccgtactgggtgccggaggacccgatgtatcttccggtacagatgggccatgccatccacccggccatcggctatatcggcgatgataccggcgaaaatatctcggagcgcaacgcgaatttctgtgagctgacgggcctgtactgggcagcgcacaacattgattccgactatatcggtatcgtgcattaccgccgttattttgccagccggaaaaagagccgctttgcgcccaagaaggaccgcgtcatcagccatgaggagctttgctccattttggccaccaccaatgtagtgctgccgcgagagcgccattacttcattgagacaaactatacccagtatatccacgcccaccacaaacgggatctcacggcgacccgcgctatcattgcgcgcaaatgcccggagtatctgcccgcctatgatatgtatatgtccaagacccatggccaccacttcaacatgttcgtcatgaagaaggaactgctgcggcattactgcacatggctgttcgatatcctgtttgatcttgagcgggagttggacatgaccggttatacggtgaatgaccgccgtgtgttcggctttgtgagtgagcgcctgctggacgcatggctcattaccaacaacatcagctttgaggagttggatatcgtctatatggagcatcagaactggctgcacaagggcacggccttcctcaagcgcaagttattcccgaaaaaagatgattgatgcaagagatgtcacggcggtggtcgtgacctacaaccgacttccgctgctgcgccggtgtctggccgctctgcaggctcaaactgtgcaggggctgcgggtgctggtggtggacaatgcctccgccgatggcacggcagagtatctgaaaacgctcgccatgccgggtcttgtctgccgtatcctcacagaaaatctcggcggtgcgggcggctttgcctacggtatgcaggctgcggcggagttgggctgcaaggcggtctggcttatggacgatgacaccctccccgagccgcaggcgctggaagcactgctggcagccgatgcagccctgaacggggcatacggctggctgtcaagccgggctttggccccggatggcagcgaccagccgatgaacctgcagcgcaaaacgatgtaccgcgacatagacggctttgacggaaaagagataccggctgtgatggccagctttgtgtcgctgtttttgcgcatggataccgtgcggcagctcggcttgcccatagcggagttttttatatggtcagatgactgggaatatacccgccgtatctcgcgctgcaagccctgccgggttattccggccagccgggtcgtgcatgccatgcagaacccgggcgttgtgaacattgcccgggatgtaccggagcgctgggcgcgctaccgctatttttaccgcaacgatgtcgtgctgtaccgccgcgagggggcagcaggctggctgtggctgctggcaaaggacgcatggcataccgtgcaggtgctgcgcgacagccggggccgccgcgccgagcgcatcggcattatctggaaaggctttgctgcgggggtgaaattccacccgcagacaccctatctgccatgaatctgactgaattgatctgccgcagggctgcccgcgccgatgcggtggcgtttgatgtgtttgataccctcatcaagcgggataccgcaacccctgcggatctgttccgtctgcggggagaggctttttatacggcccgcatcgaggccgagcgcgaagcacgcgcggtcaaaggcggggaggtgacgctggcggagatctacgcccggccctgccttgcgggctatgacccggcgcaggagtgtgccgccgagctggccgcctgcgtgccgtaccgaccggtgctggatgcagtgcagcaactgcgccgacagggcaaaaagctctactatatttcagacatgtacctgccgcaggcgcagatcgatgcgatgctgcgccgctgcggctaccccgcctttgacggcggtcttgtgtccagcacctacggtgtgcagaagcgaagcggaaagctgttccggcagtttctgcatgagacggagctggacgcaaggcaggtgctttttatcggggacagctggcgggcggatgtggctggtgcggcgctggccggtattccggtctggcatctgccaacgccgccgcagcctgcggatgccgtggccgcctttgcggaaaaccgtctgcccgcactgcaaccgggcgggcaggcactgggattttcagtgctggggccgcttgccgtggcgttttgtcactggctacatgaccggcgggctgcacacccggccgcaaggctttatttcctcgcgcgggatatgtatctgatgcgggaggtctacggcctgctttaccccgaggaaaagaccgcgtatctgcaggtttcccgccgcagtctggccccggcgtttctggcagagggggagtatgcgtgcgtactggcggcgctgccgcgccaacggctgaccggcgcgcagcttgccgcatactgcggcaccgtctgcccgggaggtgaggcggaaagcgttttcaacctcaagacgccggatacagaagcactgtatgcgtttttggcaaagctgccgcgccccgaaacggccgatgcagtcatgggttacctgcagagcaaacagctgcgggcgggggatatccttgtggacatcggcagcggcggtacgacccagctgctgctggaaaagctgcttgggacggagctgcacgggatgcagctctcggcggatgaccggctgcgcagccggttcagcgcgtcgcgcaccgaggtgttcctctttgacggtgccccggcgccgcgcatctactgggcagggcagccccttttggagcgcctgctctcgcaggatgtcggggcgaccctcagctatacgaaaacgcctgcgggctttcgcgtgaataccgccgcccagccagccgagccgttattggcagagctgcagcgcggtgtgctctattttgcgcaagggtggcaggaaagcgtgctgaacgggcaggcaatagagccgcagcgcgcaatcgccccatttttgcgattggtggaaagccctactgctttacaggtgaaactgctcggggacttgaccgttgaggacggcggtatctacccgctggcagcaccccgcagcgcggggtattacctgacccaccccgcagccgccgggcgcgaccttggcacggcgcggtggaaaatcggctttttaaagcggctggctccgttgccgctgccctatgggaaaatctatcagaagctcaaaaagtaactgcgaagggagggcagcgtcatggcaaaactcagtgtgatcgtcccggcgtacaacgccgagacgacgctgcgcaccgcagtcgagtcgatcctttcgcagcaggtgccggggctggaaatcatcatcgtcaacgatggctctacggatgctacggacaaaatatgccatgcgctggccagcgaaaaccaatgcatccatgtcataacccaaaaaaacgccgggatctgtgcggcccgcaaccgcgggctggaggcagcaagcggagaatttctgaccttctgcgatgatgatgacctgctctggcagggggcgctcaagctgctgctgcagacggcggaggatacccatgcggacatcgtgcgcggcggctatgagctgctgcgccagcgccctgacggtacaatggttcagcagccgcatcccgccgggcaggcctgcacaatcgagcttggcagcggcggctacggctcctttttgacaaacagcggcccgcagtttgtctggaatgccctctaccgccgcaccgcgctgctggggctgcgcttcaatgagcgatgcagcttcgggctggaggatttcgttttcaatgccgccgcctaccggcgcatcagcaaagcagtctatatcccgcaggtggtttaccgccattttgagggcgtgcaaagcacctcctgtgcgcggtcagctcaggcgctgctggggcgcatccgggcgctggagccatggatggaggcggaatttcacgccgcccagcgctggtgtgacgccgatgaactgcaggtcgtctggaaggaccgccgcgcgcaggcagtcacatttttaatgcaccagctgcgggacgcccacgcccccggcgccatccgccgccgcgcctggcagacgctgcggcaggtgctggccccgtatcccggcgggctggttgacattttacacgatgcagggcacaataaaaaacagaccgtggcactgcttttataccagatgcggctgcagagactgtatgatctgctgccggtcagagaggaacagctatgaaaacgattcttgttaccggcgcggcggggtatatcggccgtcatgttgtaaagaatgcccttgaccgcggctatcgtgtcattgcggcggatttcaacttcaagggtgtggatgagcgtgcagaattctgtgatgaaccgctgttcagcggagatcctgacctgtacaggaagctgggcagcccggacatctgcatccatctggcgtggcgcgacggcttccgccacaattctgccgcccacatgaaggatctgtccagccatgtgacctttctcaacacgctggtggagggcggtctgcaggggctgagcgttatgggcacgatgcatgaggtcggctactgggagggcgccatcaacgaaagcaccccctgcaagccgcagagccagtacggcattgcgaaaaacgccctgcgccagagcatgatgctcagccttgcggattccccctgcaggctgcactggctgcgcgcgtactacatcacgggggatgaagcccacggcagctcgatctttgccaagatcacgcaggcagagcaggacggcaaagcgaccttcccgttcacgagcggcagcaatctttacgactttattgatgtggatgagcttgccgatatgatcgtggcggccagcgtgcagaaccggatcaacggcatcatcaatgtatgcaccggcaagcccatgagtctggcggaccgtgtggaaaaattcctgcgggacaaaaactataagatcaggctcgactacggcgcattcccggaccgcccctacgacagcccgggcacttggggtgacccggcaaaaatcaaccagattctggccatggataaaaaggaacagcaatgaaacgattaggcatctttttcttctacgaaaaaaacggcgatgtggatgatttcatcacctactatctcgcagatctgcataagaacctgaccgagctggtcgttgtctgcaacggcaagctcagcgcgcaggggcgcgccgcttttcagcagttcaccgacacgatcatcgtgcgggaaaacaaggggcttgatgtatgggcctacaagacggcgctagacttctacggctgggagaagctgtcggaatatgacgagatcgtcatgacgaactcgacccttatgggccccgtgcgcccgctgcaggagatgttcgaggccatgtgggaaaatcaggatctggatttctggggcctttccctacaccacggcgcaaagtcgaaccctttcaaaggtaagcatctttacaactatctgccggtgcatatccagtcccattttatcgtctaccgcaagcgctttgtgcagaatccggagctgcaggcctattgggatacgatgccgatgatcgaaagctacaccgactcggtgcagcggtatgaggctgtgttcaccaagcagttcggggataagggctttaagtgggatgtctatgtcaagaccgatgacctgaaggagtttaccgactacccgctgctggtctgcccgacgctgctgctgcgcgaaaaaaaatgcccgcttttcaagcgccgcagctttatgcatgagctggaggcctacctcaacgataccgcaggcgagccggtgcaggagctgtatgactatctgcgcgatgagacggactatccgctggagctgatctggaagaatatgatccggacgatgcacccccacgatttcacacggaatctggcgctgacccgcatcattgaaccgaccgtgcaggatgccgctgcggcacagagcctttgccaaaaccgccgcatcgcgctggccatgcatctgtattttatggatatgctcggccagagcagggcctttgctgccaaattcccgccgcagaccgatgtctttatcacaacgagcagtgccgataaaaagccgcagatcgaggcaacctttgccggcctgccggtacacagcgttaccgtgaccgtggtggagaatcaggggcgcgatgtggcggccttcctctgtgatctggccccgcagctgcgggaatatgactacgcctgctttatgcatgacaaaaaagctgtccagacaaagcccggcagcgtgggtgctggcttcggctatgtttgcaatgagaatgtctgcaaaaattcggcgcatgtgctgaatgttctgtgcgagtttgagaaggacccctacctcggcatcctttgcccgccgtacccgacccacggactgtattttatgaatatgtgctccggcggctggggcccgaactttgaaaatacgaagaagctgatgaaggatctggggctggatgtgcccatctctggtgaaaaatcgcccattgcgccctacggcagtgtgttttggttccgtccgcgtgcgcttgcgccgctgtttgaccatggctggaagcatactgacttcccgccggagccgctgccgcaggacggtacgatcagccatgccattgagcgcatctacccgtttgtggcccagagcgcaggctactacccggccgttgtcatgagcaaaagctatgccgttacccacaacgatacgatgcaggcctacgcatccgccatgattcgcccgctggcccgcgtctttgactgcacgaccttctatggggcgtccagctcggcggtggggtttgcctacaagcgccaccacctgttcagccactacggcccatattctgacagcaagcgccgccatgcccggaactggctgcgggacaatctgccagccggttcctaccgggtcatcatcaatacaaagcgcgcgattttcggcccgcatgagggcccctatgaggattgatctcccatgaaacgactggtcatctacttccattatgacccggcgggctgtattgacactgcctgccgcattgccgtgcaggcaatgcagaaatatggcaaggtcatctttgttacaaacggtgcgctggccccggcggaccgggtgtgggtgcgccagtccggcgcgggctgcatagagcgggacaacaccggctttgatgtgggggcttaccgggaggcactgctcaccatcggccgggaggcactggcggaatatgaggaactcgtcctcatgaactacacgctggcaggtccggtctgtgaactgcaggcgatgtttgaggcaatgcaggcacgcccggcgctggatttctggggcctgacccgccactatgcaatgaaaagcccacggttcggcgggaatgtgccggagcatgtccagtcccatttcctcgcgctgcggccccggcttttcaccggcaatgatttctggcgctactggcaggaaatgcccctgccaaagagctatgaggagtccgtcatccgccatgaaacgcggtttacgccttattttgccgctaaggggtatacatgggatacctatgtgcagacggaggatatgagggacgtctttgtcaacccgatcatggcctgcccgcgggagctactggaaaagcgcggctgtccgttcttcaagcggcgcagtctgttcacgccctacggggatgaactgcgccgcacagacggcatggcagcgcgggagctgtgcggctatctccatgagaaaaccaatttcccgctggatcttctgctggtgtcgctgcttaaaacccagccgctggcggcgctgtccaaaaacctgcactggcgctatgtcgttgggatgcctacccaaacgcaggctgacccggctgtgctggggctgcggctgatccgctatgcgctgcccgagacagacccggtaaccgactggtatacccggcaggcagccgcacaggcggatgcgctgatggagcaggctgccatctggtttgaaaagcagccgctgctcggcatcctcagcccctctgtgccgctgtacgcgggctgtgctgcggcgcagcgcagccaatggctggctgagaaagaaagcctgcaaggtcaggcgcaggttcctgtcggtgaggagcctctgccggcacccaactgcggctggatgctggtgcgggagtctgctttcccgcagggcatcccggactgcaaaaaccagcatgacgcatggcggctggccctgatcgcacaagcaaacggcgcatacgctgccagctttgaaacagcggctcaggccgtggcgcgcgctgacattctcaatgcgtatgaaacagcggctgcacagccggccgctgtggcaaagcagcttgggcgtcttatcaagcatcggctgcaaacaaagtaaaaggggagaacacccatcaaaaagcaacgccttttttatctggatctggtccgtgccgtggcgctgggctgcatcctgaccgtacatttcaatgccacggtcacggggtatttcaccctgccgcataagctgtttaccagcacgctgccgttgggcatctatctgggggatttcggctccacgctgttctttatcgtgtcgggcgcttcgctggcgctgacggtcccggcggatcaaagccccgcgcagttctacaaaaagcgtgcaagggcggtctatccgctcttttggctggcgtggttcgttgtgttcggctggcggttcgtgacaagaccgggcagctttgccggggcaaagacgatcacactggtgctgaccttccttggactggataactttgccgtggcagcgggctgggtcggcatggattttgcctgcgtgggggagtggttcctcggcagtatcctgtttttatatctgctgttcccgctgctgcagcgggcgctgcgcagaaatatctggctgacttgggtcatcacccttgcggtgtgtattccgatccatctgctgggctgggatgcgcgtctggtcgcggtgcatatcccggaatttcttttcggcatgacctttctgaccatgccgaagcgtgcgcagtacatgctgcctgcggcgctgctggcaggtgctgccgctgcccgcagccttgacggcaagatcacctgcgcactcgccggtgccgctgtttttatcctgctggcgctggcggccccgctgctggaccgcccgtggccgcgtgtgctgggcgcacggctggcaaagatttcctacgcggtgtttcttgtgcatcatgtcctgattcaggatatggccgcccattttgatctggcggcgctgtcccgccgggacacggcgtttttgtatgtgatctatctggccgctgcgtttgcggcggcggaggccctgctctggctgcagaaggccctgcgcagagcgtttgccgccctgcggcctgcttgatactgtgtctacccgctgttttgtaaaaaacagcgggtatttttttgcttgtgttcgcatgcggcctctgtacaaaaacgggcaattacggtataataaaacataatgctaaaagaaaagaggcgttccactgtgtctgagttctctgtttccctggcaaagctggctgaggaagccaacctgacaatcgcctacaccccctgtgagctggaaaagattcaggtcacggcaacggaggtgtaccgcccgggcatcctgctggccggttactatgaaaattttgacagcaagcgcatccagatcatcggtctgaccgagatgtcctatctggatgaattgaccaccaccctgcgcaaaacccatctggaaaagcttttctcctttcagccgcctgctgtggtgctgagccgcggcatgcagccgctgtctgagatgatgcagtacggcaaaaagtacggtgtgccgattctgatgtctaccgagatgacctccgccctgatgggccagctcatcacgacgctgaacaccgagctggcaccccgcatcacccgccacggcgtactggtggaggtctacggcgagggtatcctgatcctcggtgattccggtgtcggcaagagcgaaaccgccattgagctggtcaagcgcggccaccgcctgattgcggacgatgccgttgagctgcgcagggtctcctaccgcaagatcctcggcacggcgcccgccaacatccgccactttattgaactgcgcggcatcggcatcatcaatgttgcccgcgtgttcggcatcggctcggtgcgctccagtgtggaggttgagatggtcgtccagcttgagccgtgggatcgcacgaagaactacgaccgcacgggtcttgagacagagtattatgacattctcggcgtcaaggtgcccagtatgctgatccccgttatgccgggccgtaatctggcggtcattctggaaacggcagccatcaacaaccgtcagaaggagatgggctacaacgctgccaaggagctgctgacccagctgggcctgcaggacgatattacaaagtaaaaagaggttttttcattccatgcagatgattgcagacctgcacacccacacgctgtgcgccacccacgcctacaacacctttgcggagatggccgctgccgccaaggcactgggctattgcgccctcgccgtgacggatcacgcccccgcgatgcccgatgcaccgcatgcatggcatttcggaaactggagcgccatgccccgcaccatggacggtgtggtgatcctctacggtgccgaggccaatgtcatggataccaagggcgggctggatctttcgcagagccagctcaaggcgcaggactgggtcgtggcgtccatccacagcacctgtgtgccgggtcttctgacccgcagggaggcagatcgtctctggctggctgtggccgaaaacccttatgtggactgcatcggccattccgagcaggaaaactaccgctatgactacgaccttgtcaccagagcgtttgctaaaaaccacaaggtcgtggagctcaacggcaactcattcaatgtccgcaaggacggcatccccaatatgcgggcgctgttggccgcatgccttgccaacggctgccgcattgcggtggacagcgatgcccacagcacataccagctgcagcacggtttgtgtgccctgtatgccatgctggaggaaatgcaattcccgcaggagctgatcgtgaacgcaacgcgggaaaatctggttcgtgaattacaactgcacggtaagccctgtgcagaagaagtaggaggaattttgttatgagcaagtatacgattggtattgatctgggcggcaccacgatgaccgccggtctggtcaacgaaaaatttgaggtcgtcggcaaggtgacctgggccacccgtctgccacgcccggcgcaggatctcgagaaggctctggcagacctgtgccgcactgtggcgcgcgagaataaggtggactttgcggatatctgctatgtcggcatcggcaccccgggcagcgtgaactttaccaccggctttgtcggcttcaatacgaacttcggctactatgactggaaccttggcccggatatggaaaatctgctgggctgcaaggtctatgtggaaaacgacgccaacgctgccgcgttcggtgagtacattgcgggcggtgcgaagggctatcgtgatgccgtcatcatcacgctcggcaccggcatcggcagcggcattatcctgaacggcaagatcctgcgcggcttcaattttgccgccggtgagatgggccacaatgtcatcgtcaaggacggcatccagtgtacctgcggccgcaagggctgctgggagcgctatgcctccgccagcgccctgacccgcgagaccaagaaggccatgcaggaaaacaagaacaccatcatgtggcagatgacgcaggacatcgaccatgtcaatgccaagctggcctttgacgccgccgccaagggggacgagaccgcacaaaaggtcgtggacagctggatcgagtatgtgggcgtcggcgttgccaatgtcatcaacacctttgagccggaggtcatctgcatcggcggcggcgtttccaatcagggcgaggtcctgctggcacctgtccgcgcatatgctgagaatgagacccgcaacatcaccaccggcaagttcccggctatctgtgcctgcacgctgcgcaacgatgccggcgtgatcggtgcggcggctctggaaaattctatttgatgcaagcgattctgacggaggacatccatgcaggaaaagacgatcacagcactgtgcgatgcactgacaaggcagcagctgccctttgtgcagggggagccgctcgcggcccatacgacctttcggatcggcggcccggcggtgttctggtgcgcgccgcaggatgcagagcagctgcgtgaaacgctgcgcctctgccgtgaaaacggtgtgcgggtctacctgctgggcaatggctccaacacactgtttgatgatgcgggctttgacggcgcagtagtggatatgcgcggactttcccagatggaatattccgatgcaggcaccgatgtggtgcgcattaccgccggggcaggccagaccctgggccgcctgtgcagcaaggcacagtcgcttaatctgaccgggctggagtttgcctgcggcatccccggcacggtgggcggtgccgtctatatgaacgccggtgcctacggcggggaaatgaaggatgtgctggagagcgtgacctttctggacgacacgcttgagctgcgtgtgctgccggcaaaggatcttgccatgggctaccgcaccagcgtgtttgaacagcaccccgactggtgcatcctgtcggttacggtcgtgctgcaccgcggcaacggtgcggaggttctggcccggatgaaggagcttctcggcaagcgcagggaaaagcagccccttgagtggcccagcgccggcagcaccttcaagcgcccggcgggtgcctttgcaggcaagctgattgaggactgcggtctctgcggcttcaccgtgggcggtgcccagatcagcgaaaagcactgcgggtttgtcatcaaccgcggcggtgcgacctgcgccgatgtggtggagctgaccgagcaggtcagccgtatcgttaaggaaaagaccggcttcgtgctggaacgcgagatccgcgtggtaaaataagagagcggtggggaagatgaattttctgatcgtgacgggactttccggtgcgggcaagtctatggctgtcaacgcactggaggacatcggctttttctgcattgacaacatcccggtggcgctgctgccgcgtatcgtggacttcgccctgcagggcgaaaaccagctcagccgtgtggcagtcgtcatggatgtgcgcggtgtgcgcagcattgagcagctcaaggaggctcttgaggatctggacgagaaaaagatcgactatgatattctgtttttggatgcaaatgacgccgtgatccagcgccgctataaagagacccgccgccagcaccccatcaccatcagcgaaaaggtccccatcaccgaggcgatcgcccgggagcgcaagctgctgcagccgctgcgggacaaggcaaagtatgtcattgatacctcgctgctctcggcagcacagaaccgtgagcgcatctgcggactgtttctggataaaggggaaagcccgatggcgctgactgtggtgtcgttcggcttcaagtacggtctgccgcaggaggccgaccttgtgcttgatgtgcgctgcctgcccaatcccttctatgtgccggagctcaagcataagacaggccttgatcaggaggtcgttgactatgtgatggcatcgaccgactcacaggagcttctgcgccgctatgagcacatgctggagtttgcactgccgctgtatgtcaaggagggcaaaagccagctgatgattgcggtgggctgcaccggcggcaagcaccgctcgattacctttgcacgcaagatcgcagcgttttgtgaaaagctgggctacgctcccagtgtgcagcaccgcgatgtaaaacgaagtctataataaggagtacaccgacttgagcttttctcaagaagtgaaaaacgaaatactgcgccgtaaaattgcaaagccctgctgtaacatggccgccgcctatgcggtggcctgttttggcaaatactttgatgatcgcggtgtagtcttgcagaccgaaaacgagggcgtggccgcctttgcgcaaaagctctaccgccgctgcggcgtacagagcactgtgctgagcaaggagcgcccgaccggcccggtatatgaattcagcgtcaaggagcctgccgaggtggcaaagatgctggcgctgttcggccataccggcaaggagcccacgctgcgcatccggccggagaattttaaatgccagagctgtatgcaggcttttatcgccacggcattcctctgctgcggcacgatgaccgacccggaaaaaagctataatctggaatttctctcgacccggcattatctgtcccagcagctggaggctatgctggccgagcatgatttccacccccaccgcgcgctgcgcaagggtgccaataccatctacatcagggtggcagatcatatcgaggatctgctcaccttcatgggggcgggcggcgcggccatgcgcatcatggaccagcgcctttacaatgagatgcgcaataagacgaaccgcctgtccaactgtgaaacggcgaacctcggtaaaagtgtacaggccgccgtgcaggtgcagctggctattgaaaagctgcaggctgcgggggctatgaacaccctgccggaaaatctgcgcctgacggccaagctgcggatgcagtacccggatctgccgctggctaagctggcgcagaagtttgacccgcccgtcagcaaagccgggctttcccaccggatgaagaagattcaggaggctgctgcccgactggatgctgccgcagcgcccaatgaaaaggaaacgacccatgtctgaaaacaccccaagacaatttacccacctgcatgtgcataccgagtacagcctgctggacggcgcctgccgcatcgaccggatgtttgaccggctcaaggaaatggggcagacggcctgtgccatcactgaccacggcgttatgtatggctgcgttgcgttttttgacgctgccaaggcggcgggcatcaagccgatcatcggctgtgaggtttatgttgcgacccgcacccgctttgataaggtaaaccgcattgacggcaacagccacctgatcctgctgtgcaagaacgagaccggctacaaaaatctgatcaagatggtgtccgcaggctttaccgagggcttttactccaagccgcgcattgataaggagttgcttgcgcagcatcatgaggggcttatctgtctgtcagcctgccttgccggcgagatccccagagcgattctggcaggggattacgaccgtgccaagcagacggcgctgtggtatcgggaccttttcggcgagggcaactactacattgaattgcaggatcacggtctggaggaggatcgggtcgttttgccgcagcttatccgcctcgcgagggaaaccggtatcccgatggcggcaaccaacgatgcccactatataacgaaagaggacgccaagatgcagagcatcctgctctgcatccagaccggcaagaccatcaacgatgtggatcggatggaatttcagaccgatgagttctatctgaaaagcaccgatgagatgtacgagctgttctcgatggtgccggaggcctgcgaaaacacaaataaaatcgcagagcagtgcaactttgcgtttaccttcggcgagacaaagctgccgtatttcagggcccctgacggcatggaaaatcaggtctactttgagaagctctgctgggagggactggaacgccgttaccccgggaaggtgaccgatgcactgaaggaacgcctgacctatgagatcaatgtcgtcaagacgatgggatacacgaactattacctcatcgtctacgacttcatcaattatgccaaaagccacgatattcccgtggggccggggcgcggctccggcgcgggcagcttggctgcctactgcgtcggcattaccgacattgaccccatccgctataacctgatttttgaacgcttcctgaatccggagcgcgtctcgatgcccgacttcgatgttgacttctgctacgagcgccgtcaggaggtcatcgactatgtaaacgagaaatacggccgcgaccatgtagcccagatcgtgacctttggcacgatggccgcccgcgctgcggtgcgcgatgtgggccgtgttatgggcatgggctatcaggatgtggatcgggtggcaaagctgatcccgacagacctgaaaatgacgctgaaaaaggcgcttgaggtcagcccggacctgaaggcgctttatgacgctgacacgcaggtccatgatctgatcgacacctcgctgaaggtggagggaatgccgcgccatgcgtctacccatgcggccggtgttgtcattacccgtgaccctgccaccgaatatgtgccgctttcgaccaatgacggtctgcctgtcacccagttcaatatggtggagatcgagcggctgggccttttgaagatggactttctggggctgcgcaccctgacagtcattcacgataccgagacggctgtgcgccgcaagcacccggatttccgcgtggcaggcatcgactacgatgatccggacacctatgcgatgcttgccagaggcgaaacggagggcatcttccagcttgaatccaccggcatgacgcaggtgctgaccggtatgcggccaaaaaatctggaggatatcatcgccctgatctcactgtatcggccgggaccgatggattccatcccaacctatctgcgcaatcgcaaggacccctccaaggtgtcttataagacgccccagatggcccatattgtcgatgtcacaaacggtgttgtgatctatcaggagcaggtcatgcagatctgccgcgagctggccggcttcagcttcgggcaggctgataatgtgcgccgcgccatgagcaagaaaaagctcaaggtcatggaggccgagcgagagcattttgtgcatggctgccgggagcccggcaaagagtgtgcgggctgcgttgccaacggtgtgccggaagatgtggcaaatcagatctacgatgatatgatcagctttgcgtcctacgccttcaacaaatcccacgccgcctgctatgcctatgtggcgttccagacggcatacctgaaatgccattatccccatgagtttatggcggccctgctgaccagcgtgctggataacacctccaaggtcattgaatataccaccgaatgtcagcgtctgggcatcaaggtacagcagccggacatcaatatctcccgcggcggctttacggcggacggcgaactgatccgctttggtctgaacgctgtcaagagcgtgggccgcggcctgatcgatgccgttatcaaagaacgcgcacagcggccctaccgcagcctgtacgacttctgcaagcggctgcacggctcggaattgaatcgccgcgccttggaaaatcttatcaaggcgggcgcctttgatgcactggagccgacccggcggggaatgcttgaaagcgtggagggcatcctgaaaagtgtggagacagatgcccgccagaatctggatgggcagatggatctgttcggcctgatgggcggcggcgatgaaaagcctgccgatgagtataaggtgccggaactgccggaatacgccgcctctgaattgctgaagatggaaaaagaggtgtccggcctgtatctgtccggccatccgctggacgcctaccgcagtcagatcgctcaggtgtccacctgcacgatcgcccagctgttgggggaggatgcaaagcagttcgacaaccaaaatgtcacactggtctgcaccatcgtaaggaacaagatcatgaccacgaaatccaacacgctgatggcgtttacgaccgtggaggatctgaccggcagtatggagctgcttgtattcccgcgcattttggcagaatgccgtgccgccctgcaggaaaatgcagttgtggtggcgaacggccgtgtctctgtcaaggaggacgaggcagcccgccttattgtggagggcgttcagtccatagagacctatgacccggcacagagcttcggccgcaaccgtgtggagcgtgtcaagcgcgagaccagcgggggaggggccgccggctatttcctgacggtgcctgcgcgggattgcccgcagatgcataaggtggaaaatctgctctgcaacatttttgacgggggcacggtaaaagtctatttccgctttcgggatacgggcaaggcaatgctggcaaggcacatggcggtgcgggatgatccgctgctgcgagcagaactggagcgtattttgggcaaggactgcgtaaaagttcaagatattgaacagtctgcaaaataaatccatgcgttttgcgcgatttatccataattaccagagacaaaatgtggtataatgtgggtagtcacgagtttgttaaaaatttattataatgtgatgaccgcgcctgaataaaacgtgatgtttcaggcgggtccatggttcccgaataggaggggctcgctttatggctaaggaaatcaaaacaatcggtgttctcaccagtggcggtgacgcacctggcatgaacgctgcagtgcgtgcgatcgtccgtgcaggcatcagcaagggataccgcatgatgggtatccagcgtggttataacggcctgatcaacggcgaagtgtatgagatgaatgtgcgcagcgtatccgagattatccaccgcggcggcacgatcctgtatacggcacgctgcttggaattcaaaacaaaggaaggtcaggcaaagggtcttgcccgctgcaaggagctgggcattgacgcactggtcgtcattggcggtgacggctccttcatgggcgcccgtgcgctggcaaatcaggggattccctgcatcggcctgcccggcaccattgacaatgatattgcctgcagtgagtataccatcggctacgacacggctatgaataccgccgtcgaggccattgataagctgcgtgataccacccagagccatgaccgctgcagtgtggtcgaggtcatgggccatcacgcgggttatatcgccctgaatgtcggcattgcgaccggcgctgtggcggttctgctgccggagattccgttcgattttgagcgcgacatccttgagcgcatgcgccagacgcaggtcaccggcaaaaagcacttcatcatcattgtctctgagggcgttattgatgccaacgagctggcaaaccagattcaggcggccaccggtgttgactcccgtgctacggttctgggccatattcagcgcggcggttctccgacggtccgcgaccgtgtgaatgcgtccctgatgggctatcacgccatcgacctgctggacaagggcatctacaaccgtgtggttgctgtttccggtgataagatcgttgactatgatgtcaatgttgcgctgtccatgcacaagaccatcgaccgtgacatgattgagatcgccaatacgatttccatctgacgaaactttacagagctgtactccgaattagagtacggctctgtttttgcaaaagcagaaaaataaaaagtttttttgcaaaaacctgttgacaatccatggcagctttgctataataacaaccgtcgtcaggagcgaacggcactgatggcggccagcatgggggattagctcagctgggagagcgcttgcatggcatgcaagaggtcaccggttcgatcccggtattctccaccacaacgacccgacagagatttctgtcgggtcgttttgtttatggcaataccgcataattctaagtgccgatacggcgagcgaggtgcggcagctgctaagccaaaagcgcagataatactttgtgtattatcgagcattttggcaacgcagatgccgtgccggagccgccggagcggtgcttaagccgtcaggcgggaattgtgcggtattgccttatatcgcgcggcaggcaaagaaaccatcgcccttgtcacaggcggcatagaacacctcgctgcgctgtccgatgccttttgcgtgaaggcgggcatcaagccatcgctcatcgcgtccggctgcccgcagattgtcctgcataagctgcccatcaatgataaggtcataccaggcactggcggcggcagggtgcagctgcatatcctccggcgtcagggaacgggcgcggcttttgggcaaaaagctgatctgcccgttggtttccagaatcgcggtctcgatctcgttggggtcaaagtatccggctacacgggcctggccgagaaattcattcaggtcgatggcgcaccgctgcaggttggcttttaaaatcgtgccgccgtccatcagaatcagactgcgcccgctccaaaagctgcgcatccggttgcttttgcaggcgctgtagtggacgaaccatgtcacaacgccgtatacgatcagcgcggagaaggggcgcagccattgctcgagatttgtagcaagctccgcaccgatggaccccaccgtgacggcattcagatagtcgaacggactcatctgggcaatctgccgcttgccgcccgcgcgggtaaaaatgaacatggcggccaaagagagcaggctcgtcagcacgacctgcccgatctctgtaaaaatgtcagacataaaatacaccctcctgcaggtagcttttgcgcagttgcgcttttttatacggaaaaccgttgacaagacgggcaaaacggcatataataagcctgtaaaaggaaaaatagcgatgaaagggccaatgccgcctctccgcttcttagagagaaaaccgcacggtgcaaggttttcagcgtgagtacggcagagccaccccggagctttcggcgtagagctgagcgtacctgcggcgttaacgcagacacaaagcggcggtgcgcagcgcgtatcgcaaactgggtggtaccacggaagcataacagccttcgtccctgcagtggggcgtgggctgtatttttttgtggcggcgcgatcgcaattttatggatgggagaacaatacctatgcaatggaccggattgaacgaactgcgtgagaagtacctgcactattttgagacgaaggatcatctgcgcctgggcagcttcccgctggtgccgaaggatgaccccagcctgctgctgatcaacagcggcatggcccccatgaaaaagtggttccttggtcaggaggagccgccgcgccaccgcgtgactacctgccagaagtgcatccgcaccccggatattgagcgtgtcggcatcacggcccgccatggctgcttctttgagatgctgggcaacttcagctttcaggactacttcaagaaggaagtcatcccctgggcatgggagttcctgaccaaggagctggagatccccgctgaccgcctgtatatttccgtgtatcaggaggatgacgaggcttacgacatctggacgaagcaggtcggcatccccgaggatcacatggtccgtctgggtaaggaggataacttctgggagcatggctccggcccctgcggcccttgctcggagatttactttgaccgcggcctgaagtacggctgcggcaagcccacctgtggtgtcggctgtgactgcgaccgcttcatggagatctggaaccttgtgttcagccagtacgatgctgacggcaagggcaactatgagctgctggccagacccaacattgataccggcatgggtctggagcgtctggccgttgtcatgcaggatgtcaacaacctgtttgaggtcgatactgttgccgctgttctgcaccatgtggagcgcattgcaggcaagaagtacggcgaggacgagaaggacgacatttccatccgcgttatcaccgaccacatccgcgccacggtctttatggcatccgatggcatcctgccctccaacgagggccgcggctatgttatgcgccgtctgctgcgccgcgctgcgcgccatggccgcatgctgggcatcgaccgcccgttcctgaccgaactggtagacacggttatcgaatccagcgaggcaggctaccccgagctgcgcgagcatgagtcctatatcaagaaggtcatcggtactgaggagcagcgttttggccgtaccattgatgccggtctgagcattctgaacggcatgatgggccgcctgaaggaggcgcatgagaaggttttgtccggtgttgaggcattcaagctgaatgacaccttcggcttccccctcgatctgacccgtgagattgctgcggaggccggtcttgcagtcgatgaggcagccttccatattgagatgacaaagcagcgtgagcgcgcccgcgccgagcgtctggcaaaggatatttccggctggagcgccgacctgttcggcgagctgacggcagagcctacccgctttgacggctatgagacgctgagcgagaaggccaaggtgctggcactgtccgatggtgaggagcttgtggacgccattgccaccgatgaagccgatgaggtcaaggagggcgtgcttgtcgtgctggacaagaccccgttctatgccgagatgggcggtcaggtcgcagaccacggctaccttgtcagcggtgatgccaagctgaaggtcacgcaggtcaaaaagaccccgaagggctactttgtccatacctgcgagctgctggacggcaccatccatgttgaggatgaactcactgcctctgtggacgagaagcgccgcgccgctatctgccgcaaccacacggctacccacctgctgcagaaggctctgcgcgaggttctgggcgagcatgtccatcaggccggcagctatcaggatgaccgcctgacccactttgactttacccatttcagcgctgtgactcccgccgagctggccgaggtcgagcgccgcgtgaatgagaaaatctacgaggccctgcctgtcactgtgaagaacctgcccattgaggaagctaagaagatgggcgcaatggcactgttcggcgagaagtacggcagtgtcgtccgcgttgtcgatgcaggcggctggagcacggagttctgcggcggcacccatgtgaccaacaccgcacagatcggctgcttcaagatcctgagcgaatccagcgtggccgccggtattcgccgtgtcgaggctaccaccgccttcggtgtgcttgacctgctggatgaccgcaccgagacgctggccaagacggcggttgccctgaaggccaacaacctcaaggatgctccggcccgcgcggaggctctggccgccgagttgaaggaaactgccaagcagttggatatcctcaaggcacaggttgctgcctccaagatcgacggtctgtttgaggatgccgccgatgttgacggcgtgcgcatcgtttctgcctatctgaccggtaccggtgccgataccctgcgtgatatggtcgataaggtccgggacaaggcccccaacgctgtgacggttctgatcggcagcgatggtgccaagacgatgatggctgtcggtgtttccaagaatgccatggcccgcggcctgaaggccggcgccctcgttaagaagatcgctgccatcgcaggcggcaacggcggcggcaagccggactttgcaatggccggtatccgcgatgcctccaagatcgatgaggcgctgaacgctgtgccggagatcgtcaagaccgagatgaaccattgatctggttctcataaaatccaatgcaaaggagggattccggatggaggattgtctgttttgtaagatcgccgcaggcgagatcccctcaaacaaattgtatgaggatgacaccctgctggccttctacgacatcgacccgcaggcccctgtgcatttccttgtcatcccgaagcgccacattgcgtctgctgcggcgctgacggaggacgatgctgccctgctgggccatatctatgccgtgattgcgcagctttgccgcaagctgggtgtggatgagagcggctaccgagttgtcaccaatgtgggtgaggacggcggccagagcgtgaagcacctgcactttcatgtgctggccaagcgcagcctcgcttggcctccgggctgatggcaaaggctgcagcgcatttgtaaaagtaaggagaggtaaaaccatcatggcagatacctatacattgcatatcgcgggcctgacccgtgaactgcccatctgcaaggtcaatgatcatctggacattgctgcttttatcatgttcagcgatgtggagctgactgaggcctgcgccgctgctctgctgaaaaaggcgccggagtttgatgtgatcctgaccgccgaggccaagggcattcctctggcctatgaaatggcacggcaaagcggaaaatactggattccggcacgcaaaggcccgaagctgtatatgcgtgagccggtcatcattgaggaccagtccatcaccaccgagggcaagcagaagcttgtcatcgacaagaaggacatcgagtatatggatggcaagcgcatcctgatcgtggatgatgttatctccaccggcggctctctgcacgcgctggagacactggcggccaagagcaccggcaccgttgtgggctgctgtgccgctttggcggagggcgatgccgccaagcgcaccgacatcttcttcctggagccgctgccgctcttcctgcactaagcaatgaaacgaaagctcggttggttcggtctcggctttgccggggctgagcttgctgcggccaatctgccgccgctggtctgtgtgcccgcggcggcatttttggcattgctggcattttggaacaggcgcagggatgcaaggactcctctgctgggggcgctgtgcgggctggtatggtttgcgctgtttacgcttacctttgtacagccctgccgggcgctggcggggcagacggtcacctgtacagctgtggtggagacagacgcagaggcttcctacagtgatagccgtctgcgcggcacattgcggctgactgagatcaacggtaagcctgcccggctgtgggtgcaatgctcgtcattccccggggaaagcgcgggagagcggtttgaggcaagctttgcgctgagcagtcttccggacaaccgctaccgcttgagccgcaacagcaagggcgtctacctgcaggcggaatatctcggcagctaccgcggccttgcggccagcgcggcaccgcgatttgcactttttcgtctgcggcagcgctggagcgccgtgctgcggcgctggctgccgaagcagctggacggcatggaggcggcgatgctgctggccgataaaagtcaccttgaggatgccgtacagcaggcgttccgcaccgcaggggtgtcgcacctgctggcggtgtccgggctgcatctggcgctgctctgcgggctcctgggcttcggccggcggtggcggttctataagccgcttatcctgctgcgcggtgctgcggcgctgttttatctgctgctgaccggggcgccggtgtcggtgctgcgcgcggggctggtgctggcggcagcgctggcgggggagtttcttctgcagcctgtcgatctgctgacatccactggctttgccgcagtcctgatggggctgcagaatgcctacgcaccctgtgatataggctttcagctgtccttctgtgccgtgctgggcgtgcaggctgcggcagctctgaccgagacggagcaatgtgcggcggcgcaaggcaagccggccgctttgcgtttggtttgccgccttgcggagcctgtgcaggtggcagcgctcgccagccttgccaccctgccggtgctggtagcccatggcatgtccaccagccttgtgggcattgtctgcaatgtgctggtcgtgtggatgctgcagcccgccctgcagatgggtatcctgctcctgattttcagtgctgtgccgtttttattgccgcttgtaaaccttacggggctggcactcagcctttggcttaaggcaatgctcaaaattgttgagcgctgtgcggcactgccgtttgcgtctgtctatttaccgcagcggtacacgctgtttgtgctggcggtgctgggcgcgctggctctatactactggcacggcaaagggctgcgggtgtatccgattgctgcgctgatctgcacagcagccgccgttgtcatgggtgtatggatgcagcgggatgtggtagagataaatcttgtcggcgcgtccaacaatccctgcgtggtctgtgtgcagaacgggcaggcaatggtgcttttccgtggcggcgaaagcaacctgagcgctgttgagcggtatcttgccgggcgcagcaggcaagagcctgccctgctggtggatctgcgtgccagacctacggcgctggactttgcggcggcggaggtagtgacgatgcaggcccagccgggatttgatacccgcacggtgcttgacggattgacgctcgacctgtatcataataaaagcgcgagtctggcggtgctgggcatcggcgaacgccatattgcggtgggggcgggcagcatacagttggccgagccgatccgtgtggatgtactctgtgcgccgggcgcactgtccgatgccgtgcaggcggacacgatcctgactgcggtacgccacccgaaatggctggatgaaatcgaaagctgcgagctgcgctatggcgatgaggcaccgggcctgacactgcgccccggccgcagcatgatctgggaggaggcacagacgattgctatacagtgaaaaagaacttgaaaaacgcctgcagtccggctgcgcactgtactatttttatgcatcggatgaggcccttgtccacgccgctgcacagaaggcccttgcatacctgaaccgcgatgacccggagacgaccgtgctggacggcccgaccccctcggtggaggagatcgtgctggcagcgggtacgatctccttctttggcggcaagcggctggtgcttatgccgctgatacgcccatcgacctactccgacaaggacctgcaggagctctgtgacactttggcggacacggaaaatgcgatcttcgtcatgacgggactcgtggaggaggcgtacggcaagctgcgccccggcaagcgggagcaaaagctcatcagctgctgcgaaaagctggggtattgcgtgcagatcaaccgtcccacaggggcggcactgcaggctatggcccgcgattgggcaaagcaggccggtgctgcctttgcaccgggggcggaggctgccctgctggtgcgctgcggtgaggatcaattccttttgaaaaacgagatcgaaaagctggcggctctgtccggctacggcacgatcacacagcagatggtcggtcagttgggcaccgtgacgctggatgcggatacctttgacatggtaaagctgcttaccggcggccagaccgataaggcgcagcaaaagctcaggacgctgctggcgctgcagaatgacccgatcatgatcacgggcgcgctgatcagcaattatctggatctctaccgcgtgctgctgggccgccgcagccgccgcagtctgggggatgtagccaaggatttcggctataagggcaactggagctaccgcctcaattcgacggaaaaaacggcggcgcggttcaaccgtaaccagctggaaagctgcctgcgcatcctgcagcagctggataccgatctgaaaagcagcaggctggacgccgacctgctgatgcagaaggcgctgtgtgagctggcgctggccgggaggaaagcatgataaaagtagagcaggccctgctggtggagggaaaatacgatgccgcccggctggccaatattgtggacggcacgatcctgacaacggacggattccgtgtattccgggacgctgcgctgcaaaagctgctcaagcgaatagccgctgcgcagggcctcatcattttgacggattccgatgcagcaggctttaagatacgccactttgtgacgggtctggtaggggcagagcatgtcctgcaggcctatgtgccggcgctgccgggcaaggaggcgcgcaaggcagagcccggcaaggagggcctgctgggcgttgagggcgtacccgatgcattgatcctgcagggactgacaacggcgctggagagcgctgtgccccgcgcagatgccgcaaaaagccgcgccatcacctacactgacctgtatgactggggtatctccggaacagccaacagtgcggagaaccgccgtgcgctgctgcatcggctgggccttccgccgcggctgagcaaaaaggagttgctgcaggtgctgaacacgctgtacacctatgatgccctctgcgcagaaatcaaaaacctataaaaatatcccggagcacagactccgggatgttttttattgcgggcagatcaaacctcgagtttttccagctcggccatccacagggtgttgcaggcatcgctgggcatacgccagtcgccgcggggggacagcgtgaccgagccgaccttaggcccatcgggcaggcagctgcgcttgaactgctgggcaaagaagcggcggtagaaattctttaaccaggcaagcagaatctccggttcatacttgccgtcaaaggcggtacgggcaagatgatagatctttgccgggctgaagccaaagcgcagcacatagtagagatagaagtcgtgcagctcatacgggccgaccagcttttccgtctgctgggcaatggtgccgtcctcagcggtgggcagcagctcggggctgacgggggtgtccagaatgtcaagcagcaccccgcgcagtgtgtcgctgccgcaggtgtccgctacatactgcacgatatgccgcacaagcgtcttgggcacaccggcattgacgccgtacatgctcatgtggtcgccgttgtaggtggcccagcccagtgcaagctcgctcagatcgccggtgccgatgacaaagccgccgttcttgttggcgtaatccatcagctccagtgtgcgcacgcgggcctgacagttttcaaaggtgacatcgtatttgtcggcaggctgaccgatgtctgcaaagtgacttttgacggtctgcgtgatattgatctcgccgaaggtcacgcccagcgcctcacacaaaatctcggcgttggagcgggtgcgctttgtggtgccgaagcaaggcatcgtcagtgctacaatgtctttggcatcgcggcccagaaccttgcaggcgcgcacagctaccagcagggccagacagctgtccagcccgccggagatgccgatcaccccgcatttggcgtgggtgtgctccatccgcttggcaagaccctcggcctgaatgcgcaggatcaactcacagcgttcggcgcgggtggcagcgtcctgcggcacaaagggtgtgcaggagacagggcgtgtcagggcaaggctgatcggtggtagatcaaattctaccgtggtatagccagctgtttccggcataaaggtcgtgttgcgctggcgctcctgcaccatgcggccaagatccagctcagtcacggcggcctcgcctgcaaagggggcggtatcggccagcaggctgccgttttcggcaatcaaattgtgcccggcaaaggtcatgtcggtggtgctttccccatggccggcatcggcgtagagatatgcgcagagcagccgcgcactctgtccgcagacgagcgcccggcggtaggcggacttgccgacggtctcgtcactggcggagaggtttgccaccaccgtggccccggccagcgcgtgggcgcagcttggcgggacaggtgcccacagatcctcgcagatctcggcggccagcacaaaggcaggcatctgcttgcaggcgaacagcaggttggtgccgatcagcgtttcctgcccggccagcgtgatgcactccggcgcacgcataccggggatgaagtggcgcttttcgtaaaattcgccatagttgggcaggtgcattttcggcacaaggcccagcagctcaccgttgcacacaacggcggcgcagttgtacagcttgccggtgcagcgtaccggcagaccgaccagaaccacaaggttgaggccctgactggcctttaagatggcggcgaggccgtcctccgccccgcgcagcagggtgtcctgcaaaaacagatcgctgcaggtgtagccggtcagcgcaaactccggcaggcagagcagctgaacgttcttctcggcatattcgcgcatgacgccgatgatctgctcggcattatacacacagtcggccacgcgcagggcggggctggctgcggcggcgcggataaaaccgttttcaaaagcgggaaagctgtacttcatagccaaacttcctttatcatagtatataaaattatcatagcacagcgcgcgccgggccgcaagtgctgcttttgcaagcaaaaaatatcattcataaagtaatgtatacttgacataatgtaaagcgcgcgatataataaagccaccgtaagaagaaaggacaagcgacatggcaaaaaacttaaagctgaaagccgcccgcgctgtgcgcgatatgacgcaggcggatctggcggcggcggtaggcgtgtcccgccagacaatcaacgccattgaaaaaggggagtataaccctacgatcaatctctgccgcagcatctgcaaggtgctgggcaagacattggacgagctgttctgggaggaatgagcaatgaacataaaagaattttttaagcgcgacaatctggatgaaatgcaaaagcagacccttttaaaaattgagtcccgcggcttctgggtgctgtgggtgctgctgtttgcggcgcttaccatcgaaagtctgctgggctttaccccgcgggagatggcggcagaatggtttatctttatgctggggtgcgcctattcggtcataagtgatctgcgtgccggtatctgggaccgccgcttcaagccgaatacgaaaaccaatgccgttgtgtccgttgcgggcggtgttgccgtgtttgtgtgggggcttatcaaatttgcagcgcttggcgcgggcattgcggtgctgcaggcggtcatcatgggggtctgtacctgggtgctgtgctttgcaacgctgcagctcatcatgcaggcttacaaaaaacgccacgcagaactggaaaaccccaaggaggacgacgatgaaaacgaataaacgcgaactgaccgtctttgccatttgtgcctatgcggtgccgtttctgatgatgccgctcttatacatctgcctgcagaacggccaggatacaagcatttttgccaacgcccagatgttctacccggcggcgggtgtcatgctgaccttcctgctggcgcggcggccggatacgcccaagcggttttacatattgcacctgctggttacagctattatgctgatcatgagtgtgctttccgccgctgcgccgcagggggagtggttatatatcgccaaccttgttattgttatcgcatcggtgctgggctggatctttctgctgaccgagaaaaagacaaagcgcgaggcctgcggcctgcgcctgcacggcaagctgctgacgcctcttggcatctgcgtctatttccttgtggttaaaaccgggatggtctttctttcgatggcgatgcagggcggtgatagctggactgaatatctggcctactggcgcacatctgcaccgtgggttatggcagtagttcttgtgccgaacttctttctgagcattctgccgttttttggcgaggaatacggctggcgctattacctgacgccagccctgcaaggccgcttcggcgcacggcgcggcgcactggccgtgggcgtgctgtgggggctgtggcatctgccgctgaatcttttcttctacagccccgacacctcactgcagagcattgccgcacagcttgttgcctgcgtgacgctcggtgtctttttcacctttgcgtatgagaagtgcggcaaaaatatctggctccccgtggtgctgcactacctcaacaacagcatggtcttggtctggaccggtacggcggatatttcaaatcagatcatcagctggacagatgtggcaatcagcgccatcatgtatggggttgtattcctgccgtttctggcagcaaagtgctaccgcaagaataaataaaaaacaggtgcagccctttaaatggggttgcacctgttttttgattgccgtcagactgcaaacgccttgtgcagggcttcgagggcggcgtcctcgtcctgctggcggatcaacagcgaaatatcgaggtcgctggtcgtgataagcacgatctcgatgcttgccccggccagagcggccagcgcacgggcgccgacaccgcagctggtgaccatatcctcgccaaagaggttgatcttgctgtagccgccggagaccagcgggggattggccttggccgcagcaggcagtgcccgcataacggcggcaaagttgtcatagctggtcgtgaagctgaaatccaccgcagagccgcggggcgcgctctggcagatcatatccaccacgatacctgcctttgcaaagacatccagatgctcggccagactctgggcactgtactgggcacccgggaaggtggtgagcatgatgttctgctcactggtgatcttgctgacgccgtacataaaaatcatcctttcattcaatcgaatgtaataaactgctcatcgatagaattgcggagcacgctttcaatgtattcgcgggagagggtgaactcgccgtgggcggcacccagctcatcggtgtacatgctgtaggggtagacgcggatattcttatatccggcctcatattggcttataacacagtgcagcttggggtcaagcatggcaacggtgctgctgccgtcgggctgggtggttttctcaaaggtcatgtccaaaatcgcgccgatgacattatcagacgaggactgtgcattgataaagttgcccagactgtatacgacaagggcagtattgccgttggcacccgtcagccatgcggcgttttgggtcacatgggggtgggtgccgatgatcaggtcaacgccctgatctgccagccactgggcggtatccttctgaaaatcgttgacaacatgggtgccctcggtgccccagtgcgcgctgaccaccagcacatcacagttggggcgcatagcggcgatctgccgggcaatggtatcgcggtcatcgagataaaccacgccgtaggtggccccggaaggggttggcaggccgttggtatgctccgtataggacaggtagccgaaggtgatgccgttgacggtctgatagacataatcgtcataggtgtcaagattataaaagcccatcgagacaacatcctccggcatggcggcccaatgctcacgcgaggcatcaatgcctgcagcgcccttgtcatagctgtggttgttggacaggctgaacacccggaagccaaggctgtacagcgtatcggtgatctcaccgggggtggaaaacatcgggtagccgctgggagcgaaagcgtcattgaccagcgtttcctgattgagccagtttacatcgaattgggtgtagaagtcccgcatgttctcataggcaaaggaaaagtcatagtggtcaccgccgcgctgcttggcctgcaggaagatgccgtcatggatcaggtcatcccccgtggcggaaaagcgcacggtctccacgacaggctgcggctcgggggtaggctccggtgtggcagctggctcaacagccgccaccggctgcggttccgcagcgggcagggcctgctcctgcttgccgacacccagcagagagccggccagcacaccgcccacgcccagcgcaatcaccagacaggcggcaatgtcgtttcccttcattcgcataacagcttaccccgcagcagatcggtcatggtatagtagcccggggcaagggctgcaatgtagagcgcggcctgcacggcaccgtcagcaaagacaccgcggcttcccgcgctgtggctcagggtgacgacctcgtcagggccgcagaaaaggacatcgtgctcgcccacaatgccgccgccgcgcaccgaactgatgcccagctcctgcgcgccgcgcttttggcggacctgggtgcggtcgtagacatactcataccggccgtcagcctcggcgttgatggcatcggcgatcattagtgcagtgccgctgggggcatccagcttgttatggtggtgcttttcgatgatctcgatgtcaaactcgccgcccagaagctttgtagcctgacgcgccagctcgatcagtacattgacgcccaccgacatgttggcgctgcggaagatcggcgttttggcgctggcagcctccagcacagcctcgtccgccttggaaaggccggtggaacagatcacgcagggcagaccgttggctgcgccatactgtgccgcagccacagccccggcgggagaggaaaagtcgatgataacgccgcggcagggcagcgcatcaaagtcggagaagatgggaatctcgcccagatgccccggctcgcggtccacaccggcgacgacacggcaatcgtcccgcgcaccgattttctccagcagggcgcgccccatgcggccgcagatgccctgaatgatgatatccgtcattgttgccattcctttcacaaaaacacaaaaagccgacccgtaccagacggagggtcggctgcgaattatttcagcaggccgaaatcctgcagagccttttccagctgtgcctgtacggctgcgcagggggccacaagcggcagacggcattcgccggcctgccatcccagacggttcatggcccacttgaccgggatggggtttacatcggcaaacagggccttgatgaggggcagcgccttcagctgcatcgcaaggctctcatcaaaatcaccggcaaaccacttggcgcagatgtcgtgggtgtactgcggtgccacattggacagcacgctgataacacccttgccgcccagcgccagcagcgggacgatctgatcatcattgccggagtagaggttcagctcatcaccgcagagggcggcgatctccgccacctgactgatgttgccgctggcctccttgacggcgttgatgttggggtgcttggcaagctccgccagcgtggccggggtcaggttgcagccggtgcggctgggtacattgtagaggatgcagggcagatgcacagcatccgcaatggccgtgtagtgggcaatcaggcccgcctgactggctttgttgtagtagggggtgaccagcagcagggcatcggcaccatcggcctcggcctgctgggacagccagatcgcatactttgtatcgttggagccggtgcccgccactacgggaacgcgcccggccacttttttgacggcatagcggatgcactcggtatgctcctcgtcggtcatcgtcggggactcaccggtagtgccgcagatgacaatggcatcggtgctgtgggcaatctgatcctcgataatgcggcccagctcgtcatagttgacgctgccgtccgcgtgcatcggggtaatgatagccacagcggctcctgtaaaaacgggtttcttcatacaaattctccttacaccaaagcgttgctttgtatcgaatcagtcaaaatagcccttggcggccagcagctcggccagcagaacagcgccgcctgccgcgccgcgcagtgtgttgtgagacaggcagacaaatttgtaatcgtactggttatcctcgcgcaggcgtccgatgctgacagccatgccgttctccagcatacggtcaagctttggctgcgggcgatcgttttcctcaaaatagtgcaggaactgcttgggggcgctgggcagattcagatcctgtgcgggaccgtggaattccttccaggcctgcagaacctcttccttggtcggcttattttcaaagcgtacaaagacggcgcccatgtggccgtcggaaacgggaacgcgcaggcactgcgccgtgaagcgaggagcatctgcggacacaatccgatcgccctcgatatgaccccacagcttcagcggctcctgctcgctcttttcctcctcgccgccgatgtaggggatgacattgtcgaggatgtcggggaaggtctcaaaggttttgccggcaccggagatagcctgataggtgcagaccagcacatccgagatgccgtatttgcgcaggggatgcagggcaggcacatagctctgcaggctgcagttggacttgacggccacaaagccgcgcttggtgcccagacgcttgcgctgtgcggggatgatctcgatatggtcggcattgatctcgggcacgaccatcggcacatcgggggtaaagcggtgtgcgctgttgttggagacaacggggcactcggccttggcgtaggcctcctccagtgccttgatctcctccttcttcatgttgacggcgcagaaaacgaaatcgactttggatgcgacctcctcaacattggcggcatccagcacgaccatctttttgacgctctcgggcatgggggtcgtcatgagccagcggctgccgacggcctcctcgtaggttttgcctgcgctgcgtgcgctggctgcaagggcaaccagattgaaccaagggtgattttccagcagcgtgataaagcgctgaccgaccataccggttgcaccgatgacaccaacattgtactgtttcatcctgactaagaccttcctttcacaaacccttcccaatatctatgcagtccaaacgaaattttgcacagataataaaaaaaccggcttgaaaaccggcacaaaatgcaatataatatcatattgcatataacacagcgcaacacaccgttttgcggtgtgacagtcccgcacctgttcggctgcggacccaggaagatgcgtgccgcgcatccccttcggcgaaggaccctttcccgtttccgcccttggcagggaataaagaaaccggtactgatgcacttcgcgcctctgtgtttggattcattatagtatgctccggaacgaatgtcaagataatatcgctttaaagtgaaaaaggatgaaaaatcatgctgaaaaaagatttctggtatgacctgcctaaagaattgatcgcacaggaacccgctgacccgcgggacgctgcccgcctgatggtgctggaccgcaagaacgataagatcctgcactcggtattccatgagctgccccactatctggaaaagggcgatcttctggtggtcaacaactccaaggtcctgcccgcccgcctgatgggcaccaaggttcccacgggtgcggtttgtgagctgctgctgctgcgtcaggtcaagggcgatacatgggagtgtctggcccgccccggcaagcggatgcagcccggcacaaaggtggaattcggtgacggcagcctgactgccgtggtggacgagacgctgccggacggcaacaagcatgtaactttcagctatgatacagagactttgtatgagaagctggacgagttcggcaaaatgcctctgccgccctatatcacgaagcagcttgaggatcaaagccagtaccagaccgtctatgccaaggagcttggcagtgccgccgcgccgacggccggcctgcattttaccccgcagctgatggataccatccgctcccgcggcgtcaacattgccgaggttacgctgcatgtcgggcttggcaccttccgccctgtgaatgaggaggagattgaggaccatcagatgcacagcgagtggtactctgtcagcgaggagactgcgaagcttatcaatgagacccgtgcggcgggccatcgcgtgattgctgtcggcacaaccagctgccgcacgctggaatccgtctgggatcgctacggcaagatcgtgccctgcagcggcaacaccagcatctttatttatcccggcatcgagctgcacgccattgacggcctgatcacaaacttccatctgccggaaagcacccttatcatgctgattgccgccttctacggctatgataagacgatggctgcctacaagatcgcggttgaggaacgatatagatttttcagttttggcgatgctatgtttattcgataaaaaacattgacgaaacgataaaaatcttttataatagcttattgggcggtgcagggaaaagcccctgcgccgcttttttcggacaatatataaaatggagatagtatctatgccttaccgccttatcaaacaggaaggtgccgcccgccgcggtgagtttaccacggtccacggtacggtacagacccccgcgttccagaatgttgccacggccgctgccatcaagggcggtctttcggcgctggatctcaaggatatccgcgcacaggtcatgctgtgcaacacctatcatctgcatctgcgtccgggtgataagctggtggccgatatgggcggcctgcacaaattcacaaaatgggacggccccatcctgacggacagcggcgggtttcaggtgttcagtctggccaagctgcgccagatcaccgaggaaggcgtgaccttcaactctcatctggacggacaccggatctttatgggcccggagcagagcatgcagattcaggctaatctgggctccaccattgccatggcctttgatgagtgtgttgaaaacccggcaacctatgaatatgccaaaaacagctgcgcccgcacggcgcgctggctgctgcgctgcaaggcggagatgaaccgtctgaagcatgaggaaaaggcagtcaacccggatcagctgttgttcggcatcaatcagggctgcaccttcgcggatctgcgtgtagagcatatgaagcagattgcggagtacgatatggacggctatgccatcggtggtctggctgtgggtgagcctgcggaggtaatgtacgatatcatttctgcggtggagccgtttgcccccaaggacaagatccgctacctgatgggcgtcggtacgcccggcaatattatcgagggcgtataccgcggtgtggatctgtttgactgtgttatgcccagccgcaacgcccgccacggccatctgtttacatgggacggcgtcatcaatatcaaaaatctgaagtatgagcgcgatgaatcgcctattgacccgcactgcgactgcccggtctgccgcaatttctcacgcgcctacatccgccatctgcaaaaggctgacgaactgctgggcatgcgtctggcagttatgcacaacctgtatttctacaatcacctgatggagcgcatccgcgaggcgttggacaacggcaccttccagcagttccacgacacctatgtgcataaacttgacacccgcatctgattttttgacaaaacgcttgcacaatgcacactgattcgatataatagaagaaatcgttatttttaaggagtatacttgctatgatccagtttttgaatgccgctgccggcacagccactaccgcagagatgctgatcagcttcctgccgatggttctgattatcgtctttatgatcgttctgatctacctgccgcagaagcgtcaggacaagaaggatgctgccatgcgcaactccattgagatcggcgacaaggtcaccaccatcggcggtattgttggcatcgtctgcgctatcgccgacaaggatgacaccctcgttatcgagaccggcagcgaccgcaccaagatccgcttccgccgttccgcaatttcttctgtggaaaagctggacaccggcaaggacagcaagtctgcccctgtcaagaagtaagcaggcataatacacacgcccccttgcatagtgttgactgtgcaagggggcgttttttatggctggaaaaaatctgcgcaagccgcccagagcggcgcgccgaaaaacaacggctgctgtgctgctggctgcctttggctgcggtgtgggaagctgtatgctgctgttggcggcgtgtgcgtttttgctgacgcatacggcgctgccgctgggcctcgtgcggccgatggcctgtatggcagctgcagcgggggcggcagtatccgctgcagttctggcgcatcagtgcagggagaagctgcttttgtgcgggctgggctgcggtgtgttttatacggcttgtctgctgggggcatcactgctggcgggtggagaagtaaactggcagggcagtaatgtgatgctgccgatagctctgctgctgggaggtctgctgggcagtgcagtgacagccctgcggacaaaccgctgatgcgggcggctcggacggcactgcgtctgcctgcgctgccgcagctgcgaaccagggagccgaagcgtaaaaccatgtcggcgcggcgaccggactgcgttgtatggcttggcgcagcgtttctggccgggtatctgccgggcatatggctgggccgggacggcgccacggcactgggccaacagctggcagtctggtacacagaaggccccgaaagcacagcttttgcggcggctttcggggcgcggtttgcggtgggggcgctgcagctttgcgcagtgcttttgtgcgggttctgcatctggggcgttggcttgctggtgctgttttttgcggcgcgcgggggatttctcggcttctgtgcggcctccgtggcagcggctgacggcgtggcaggactgctgcgctaccgccgcgatacggctatatcggatgttgccacgctgctgttgtgtctgtggctggccgggtggtcggcgcagttggcggcacagctgttctgtgccgcgcaggggcgcgccacaagggaaacgccggggaccgtgcggcggcttttgagccgctttgcggctgcaatggttttgtcagcggccgtcagtgctgtcgggggcgtcctcgtcctcgctgtcggcagcgggcgatgagggcttttcctccacatatttctgactggccagcggggaggcggcaacggcttttttcagctgttcacggttgatgtgggtgtagatctgcgttgtagagacattttcgtgccctaaaatttctttcagcgccagcatatcaacgccgccctgatacataagcgtggcggcggtatggcgcagcttatgcggagaaaatccgcgtccgctcagaccggcactttgcaggcagcgggctacgatttgttcgatccggcgcgctgaaagccgcttgccggtgcgattggagataaacaatgcatccttgtccacaagattcggcagggaagcgcggtccttccggtagcgctgcagggcatccaagcaggcatcgttcagatagacgagccgctccttgttgcccttgccgatgatgcggatggtgtcatcgcggaaatcgcccatgttgatcgtgaccagctcggccaaccgcataccgcaattcaaaaacagcgttataatgcaataatcccgcgtataaaaatcgctttgtatatggctcagcaaggtgacggcctcggtttcggtcaggtatttgggcagcgccttttgaggggtgccgaggctgatgttttctgtggggttggccgtcagcttgttgacctgcgtacacatatagtggaaaaagcccttcagcgcgctcaacttgcgggcgcgggccttggggccgttttccgcgttgcgggcgtaatccagatagtcaaagatgtctcttttggtaatctgcgcaatatcggcggtggtgatgccggttagcttgatttcatcgggcggcgtggtatcggccacgcgctgccagcgctgcatcataaaacggaaaaagccgcgcaggtcaagatagtatccgttgacagtgcgcggggagcgcagctttacaaaatccagatagtgaagatattcaattacatcatcgggaatgtccagatacggcgcgtgacgctccggatgggccacatcaatataactgctcacaatcgaacctcaaaacacaaaataagagtgcggaatcatgcagaaatgctgattccgttttttattgtagcacagataggcagcaggcgtcaatttcacaaacttataagaaatgcaaaccatcacgcatattacagtgcgtacagaaaacgcaagcgcgtgaatattcatacaaaatagccaaggcggaggcggcaacagaaaagcgagcaaaagggcaggtgtttttctctgtttctataacttcgctaaattagagtttagcgaaacagagggagggcgctgcggcgttttacaaggatgcgggttgattatgcgattatgccacacttaaaacggccttttttgcagcttacgaataaggtgctgtatcgcaaagatctgtctgatgtagctggccaaagctgctgaataatttacgcgatgggtacaagcacgtaccagattcgtatggacgatgctcttgcaatttacaggaaatctggtatgataaataaaaaaggagttgccatcatgagcaaggatgcgataataaaaatcctgatcacgattattgcgctgatggtatttatatggctttggcatataatcagccgcatgatcatcgggacactgatccttacgacctcgcttttgtcggtattgatttccctgttgattcaaatcgtggttccggcgacaatcattgtgtatgctgttaaatggatcacaaaggtgaagaaatgagcggtgtttggtatgggattctttggtaacaaaaagcaggctccgatgcctgaggcatctgagacgatcggtctttctctgacgccggctgaaattgatctgctgcgtgagtgcatgaaacgcactgaggactattaccgtgggctgttgctgctcaagcaggactggaacgccgaaaaaaacgaagcggccattgccatgataaagatcaggttgaatatgatcgacaagctgcaggaaaaaacacggtatgacggacaatctgactactataaaaatctacagtaacacaaaagcccttcgcagaactgatcttttgcgaagggcttttgtataagtgttttttcagcggttgattgattgcgccatcttatggtaagtatgccgctcgccacgaattgcaatcgaatacgccatgatattctgcggcagtgccatgccgggcacgccggtgtcgccgatgtggtggatatctgcaccggccatcttgcacatcagcgcaatctggcgaatcgtggcgacgtcggcaccctcctgagaggttccgatggctgtcagcgccagtttaccgtgtgcgtgtaccgcctcaatcaggcggtgtgcatagtcctgtgtgatgcccggtacagtgcccggtgcaggcagcagaatgatatccgcgcccgccgcaatgaaggcctcggcatcggcgggggtcatgattttctccccgccctcccctgctacgccggaggcatgcatctttccggcagccagcataacgcggtcaccgacagcggcagaaatctccttcagcgatgctacgatcaattcgttgctgacgccgttgccggggttgccggtaagcacaatcaggtcaacgcccatatcggcggcacggcgcgcgttttctaccgtagccaagcggccgctgctcatcttccatagcgtaccatcgttgctttttgctgcttcggggtcgcatggctccagattgatgccgatgacccggcctgtcagacgcttaagctcccgcacggtctctgcctcgggaaccttcggcaaggcgttgatgaccggatgctgcacatcaaacatgttcagcagcaaaatgtctgcgctcagagctgctgcgtattcggcatttgtcacatcgaccagcagcggcggtgtcaggccgatggtctcacaggccagcacacgcccctcgctgccggcaatggcgtccagcaggtcagtcttgcggtaggcggctaaatcgctgggggtgcagtccagcaggcgctttacgctcattcgtcgtcatcctcctcaactacgcggccaatgcccttgcggtagaacggctcactgccgcgcataccctgctggcccatcggggtaaccgaggtggtaatgttcaaatccatctttttctcgcggctgagcagatacggccgggcagcctgcgccaccgcggcaaacagcttatcatccttggaaccgtccagaaccagcaagtagctgcgggcctcgccgttgacaatcatcacggaaaggtacgcggagcccacgccgggggcaccggccagaagctcacagatggggtcaatcatggcatcgggcaggatgctcggctcaaccagcgtgaccttatcaccgggatggatgcggtgtgcttcgcgctgggccatggcatcggcgattttgtgggcgacctcgtccttctgcttcttgacagactcgatgagcgggcgctccagacgcaggctgttgtcgccggggttgatgaccagcccgcacgcagcctcgtttctggcaatcatgttggcataatcatcaaagcgcagcaggacgatctgctgggcagccttgggctgcttggcctgccattcatgcacagcgtcccaatcgctgaagcccagataatagtgcttgccctccgggctgttgaccaaaacaaggctgattttggtgtccttgggcagctgcacgcggccatccgcctcgggcgtaggcgcgggctgaccctgcagatcaaacacggcgggagccagcagcggcgagcgcacaagctcattcaggatatcgttcagatttttggggctgttttcctctttgaagaccgcaatcgtctccttgagcttcgggttgaattgaggtgcttggggcatttttttctcattctgttcgggcatgggttcgttcctcactttaattttattgcattgatggcttcccgcaggtaggacacgcctaccagcttcaggccgggaaattgcgagctgtcaatcattttcagattgtgcttgggtacaatggctgtgtcaaagccgacgcgctgggcttcccgcaggcgcgtttccagatgggtcacgctgcgcacctcgccgccgaggccaacctcgccgatggcgaaggttttctcgcttaccggcaaatccagcaggctggaagcaagcgcaatgcagactggtaaatcacaggcggtttcgtccagcttcaggccgccgatgatgttgacatagacatcctgactgtaaaaggcgtatccggcgcgcttttccagcacggccagcagcaggtacatacggttgtagtcaaagccgcttgcggtgcgccgcgggctgggaaagctcgtcttggtggccagcgcctgtatttcgctgagcaccgggcgggtaccctccataacacaggccacgcaggtaccgctgatgccgatgggccgcccctccagcataacctgagaagggttttcaatctgggcaagtcccctgccggtcatatcgaacataccgatttcattcgtggagccgtagcggtttttcacggcccgcagcacgcggtacggcagggttttgtcgccctcaaaatacagcacggtgtccacaatgtgctccatgactttagggccggcaatcgcgccgtccttgttgacatggccgacgatgaaggtcgggatttccagtgttttagccacatttaaaaagcgtgcggcgctctccttgacctgactgaccgtgccggaggaggaagaaatgtcggtgcagcgcatggtctgaatggaatcgatgaccaccagatccggcttcatggactctatcaggccgcatatctcgtcaacatcgctttccgcaaccagagaaatgttatcctgcggtacgtccagacgaaccgcccgcagcttaatctggcgtgcggattcctcacccgtaacgtataggacattccgggttttgctgacctcgccgcagagctgcagcaaaatggtggattttccgatgcctggctcaccgccgatgagcgttacgctgccgatgacaataccgccgcccaacacccggtccagctcactgataccggtgacgatacggctcttttcctcggtggtgctgatggccttcagcttctgcggcactaggcttgtctgcccggtaacgcgctgcacggcaccggccttgccaccggtggttttggtgggctcggccacaacatcctcggtcatggtattccacgcgccgcaggacggacaccgccccagccagcgggggcttgtctcaccgcattgggtgcagacgtagatggttttcagtttatctttgggcatggatgcctccctgacaaagctatactttctctattatagcccaaaatggccgtgggggcaagtatgcgctgcagaaaaacatttgtagctgcaaaaacgactttttctattgttgttttttgaacattgtgttaaagtttgaaaacactttaatttatcgcgttaaagtatgaaattgggaaggtgcgatgttagcaccgtatctgatggtgcaatgctcggacaaccgccactacggccgtatcagcgactatgtgtaccgtttctcggccatggatctgaccgccgaggagcgcggcaccctgcatggaaacaacgaacgcatctgcgttgagaccgttggccgtgcggtggagttttatgtccgcctgatgcgtcagtgctgagaaagtaagcatacaaagaggtgcagcccgtttgaagtgctgcaccttttactgtttatatcccgaaatgtatagagggcggcattctcgatgctcaatcatataaactggaatttgtaattacattccatacatattggcattttttacaattactttatcgcctttttctaattgttccttggaaattcctcgtaacccaagtccaacatgctctgttttatatccacaaccatttgcttttcgttcttttgtatgtacatcgacagtagtaattctggattctaagatatctccatttgctttataaatacacgcattttccccttctctgcacatccctattaatatgtttcctgtggcaactgttccaacccccataattgtaaatacatcatcaataatcaattcaaaattttcttttaaacacg

SEQ ID NO: 14029 - DNA, 1654 bp, Unknown
  gut microbiota DNA sequence
ctgatccagccccgtaaagggataatgccagccgacattaataggggtaacggtaacatagtcctcgctgtctgtggctgggtatttaacagcttcccaaggattttcctctgtgctgttttccagacggcgctggagctggatgtaaatctttttcggctgctttgctgaaacaaggtcattgccagccgcatctttccacagcttagtgaacgcaatgtcaatcagcgtgcgcttggtgttggtaaaggttgcggtcattatctggggggttgtgctttccacaatcacgccttccaccgtggtgttgttgactacatgggcgttgttctcgttgcctgtaagcgttacgccttgcagatgggagccatccgatgttgcaacttcctcgatggtataacgggtgccaacggggattccggtgatgggtacggtgtggtctgcgttcccatcgcccatattgatcgtatatttttttacgatgggatctcccggttccaagccctgcccgccgacatcactgaaggtcaccttgaatgtataggtgcccgtcaggggttcgccttctgcggccttctttttgattatcagcccgccggtttttaccttgttgatgtactgcaccttcaaccttgtcagcgaatcgccgctctcgtccgggttgctgtaggagcggaaaacaatggtgttggcattgctcggcttatttccgtcatactcattatccttttgctcggcatctgtccccttattttccgttcggccatcattgggctgatctactgttgcgggttgattttccagcgatttattctggttttcaaccttcacagtacttacattgtcacccttcatcgaggtaaccggctgcccgttctcgtacactgtccatttggtttcatacagttttgtatccagtatctccttgagcgaaatgtaactgccgcggcggaactgatcgttgaatgtaattgtttcgccgttttccagtacaaaccgtccctgatcgtctaccacctgcacgccatcaaagttagaggtgtactttgcgtatttggcgttttccagcacgccggttgtagcggagccgtaatccgggattttatcctgctcggttgtgaagccggtctttatatccggtaccgttttgggaacaaaggtaatgtctttgaaatagatgtggcgttcatagttatcgcccacgcggatggttttaactttgtcaccaaacccagccatcgcattcatcttattcaaactcagctttaccgtgttccattgattgggtaccagcgtaaccgagccgaatgtggcgccgttcagacctgctttgccaaggctgcccatttgcttgccgttttcatccagcagctccaagtacaggttgctgagggaaaggtttgtagttccctcgacatagatttggaatgtaaggtagccgtactgcctgaggtcaatagaatctttcagctgcaggataccataccgtttatcgcggtaagcactgttcaggtcattatagggcgcaaaccagtgcagtacctgaccggtattggtttgcgcggggtcaggcgctaacgcaaagatgtaatccgtgctgttcttagttgcgggatagatgttcgttccacttgcagtcaaatccactattgct

SEQ ID NO: 14030 - DNA, 2006 bp, Unknown
  gut microbiota DNA sequence
tctggtcgttaaagcaagcttggaaatccttatcaacatcactcagatcgaccttcttttcaacctgcagctcgttgtggtcggggaagttgaacgccaccgccatgttggactcccacatgccgcgctccatgtagaacatggtcagggtgtgggtggtgcctttgtcgagggtgaattctttggtctgatcgtccttatcaacaattttgccctgcttggtgaatgtgactgggctgccgttgaagtagacggttttgttgtttacgtttgttgtgtaaacctcaccgcctgctttgttggagctgacatagggggttacggtgttgtctgttccatcatccccaaattccagcaggccggacgctttaccgtgcgcgccgccgacatccagcaccagctgaccgtcaatgtagacccacacatcatcgtcaccggagaagaagaacttgatggggaccttgatgtcctcgttgtccttgttcttgccaacaacaacctgcccgtcatccgtcaatgtaaagtcaaattgcagcttagcaccaaagccgtagttgtatttgtttacattgcgattctcctccattatcttttgattaaatgggaagaaaccatatccacgggactggttattatttttattatcttctgtgctgttatccgaaccacggttctgtgagttgagatccgtataaatcgggttttcacttgtgccagtcttcgttgcttccagatagtacttgctgttggcattatcttgcttcagatacagcgaccgctcattactgtcaaagtaccagtattgggctttactttcggaatcaccctcattttgcgtaaagacaggtttttgggtaaatgggaaggaaacatccttgtacaccttgcccagcacggctttttcagcgtttgtgccggttaaaaacgcttcgttgaagtgcggctctgcaaggtcagtaccggccatgaccggcatgccatccttcatttggtttccaaccaagccctggaaggtgtctttgtagtgttccccactatggttatcatctaacgcatatgccgagttatttaccgctataaagcgccagtaggtgtcatcctctgttgtactccaaccatacaaattcaggtttgaggcaattccactgaacgcactgccccaattattaggttggaaatgtcctgtataaagcggataattgattggttttttgtttatatcagcgtattgtttgtagtaattactcagcgcacggtcaaactgctcaaatgtaacatagctgcgttgcgtgtttacctcattagaactgtatgtattgcggttgttgccgttcagttcatagtccgtgtaatagtcatacagtgtggtgctgatatactttgtgttggactggggcttaaaagtcttgctttccagatctacaatactctttgtctctccgttttctccttttttgcctttttctacatcacggacaacgcccaactcgtcccaatagccgccgcggttgccgccttggtagattacatcatcgctggtgtcggcgtagaagcacggcttgcttaaatcaggaatcgtcaacaagaccgtgtcagtgccgttgttagcagtatttgtaccgcctacctcccaagacgcaaagcggatttgtgtatagccttgcggcacatcggcataccaaatctcgctggtgccgtcacgagccatttgcgaggttatcgctggtttgctgctatcatcactggtaatgtagcaccacaggttgccgttggcgtccggcataccgtaggtggttgcagcgtcacctttgtacgacatgtccgagaaggttgcatcgaagtagacggttttgctgcccggtgcgctccaccttacatcatcatcgcctttatatatcaggcaatagcgcgtgacagggtcgtatgggaatactgctatttcttttgtttcagcttcatcattatagaaattgaagtaatgtttgccgatgtaagtattatctgac

SEQ ID NO: 14031 - DNA, 2926 bp, Unknown
  gut microbiota DNA sequence
gcaggaataacgaatatccatacagcggcttcctccttgacaggtgtgtgtttgtaagcaaacatattttgctatcgttacctctattatacagcattcagtgctggtaacatagtggcagtattgcacaattattgcgtcccatttttgtgcaatttattgatgaatatttttcactttacaaattagcatctttcaagtatactcatgtcagtgtcacggccgcgaagaagcggcccggcccgacccggaagcaccgggtcgggccgatctattgtcaaaaacgaaggagcagccccatgcttacattagacaaaatctaccacgcaaaatttattctaaaacaggttgcccgcaagactgatctgattgcagcgccccggctgtgccccggcacggacctttatctaaagaccgagaacctgcaggtcacaggcagcttcaaggtgcgcggcgcttactacaagatcagccagctcagtgaggaggagcgcgccaagggcgtcatcgcctgctcggccggcaaccacgcgcagggcgtggcgctggccgccacccgcatgggcatcaaaagcgtggtctgtatgccggacggtgcccctattatgaaggtagagagcaccaaacgcctcggcgcagaggtcgagctggtcaagggcacctacgacgatgcccacgaccgcgctgtggagctgcaggagcagaccggcatgacctttatccacccctacgatgacgagcttgtcattgcagggcaggggaccatcggtcttgagatccttgaccagctgcctgatgtggacgcagtcatcgtgcccatcggcggcggcggtctgatctccggcgtggcgtttgccatcaagagcctgcgccccgaggtaaaggtctacggcgtgcaggctgccggcgcccccagcatggagcatgccttccacgaccacaaatacgagacactggacagcgccgtgacctttgcggatggcattgcggtcaagacacccggcgaaacgacctttgagatggtgagccagtatgtggacgacatcgtcaccgtaagcgaggacgagattgccgccgccatcctggccttgatggaaaaccagaagctggtggccgagggggccggtgccacaccggtggcagccgcacttttcggcaagctgccgctggcgggcaaaaagaccgtctgcctgatctcaggcggcaacattgatgtaaacatcctctcccgtgtcatcacgcgcggtctggtcatgagcggccgcaagacaaacctgatgattgcgctggaggacaagcccggccagctgagtctggtcagcgacatcgtctcgggctgcggggccaatgtcgtgagcgtccaccatgaccgcagcgatgcaaacatggccatcacaagctgcttcctgaagctgggccttgagacccgcgatgccgcccagatcgaaacgatcaagcagaagctgaccgaagcagggtttaagctggtgacggagcgcgcctgattcttatgctatgtaggggcgaacattgttcgcccgcggaagctttgcggtagcgctgacttcccgggtcgtcgaggacgccgacccctacgcgtaggggcagattccatatccgcccgcggatgtttctgccgccgcgaacgagcacgggcgaacattgttcgcccctacagggtggcgaaattttataccttgacgcccgctgccagcagctcgacaaactgcttggcaacgcgcgggctgcgcccgccggcacggatggcgaatgccgcgcccttgatgtacagctggtcgctgggcatctggatgccgtactgcttcgccagctcaagcaagatgcgctcatagcggtccttgtcaggctgctggaaagttaccgtcaggccgaaccgcgctgccagactcatcagttcctgccgggtatccgccgcatgcaggtcatccccgctgcggtcggccatcgtctccttgacgagatggcggcggttgctggtcgcgtagaccgccacattatggctgcgcccgccgacgccgccctccagaatcgccttcagcgccgcaaagttatcatcgttggcagagaagctcagatcatcaataaagaggatgaatttcagcggattgttcgccagctcgtccatcagggcgggaatctggtaaagctggttcttcttgacttcgatcagccgcaggccgtccggcgcaagctcgttggcaacggccttgactgtgctggatttgccggtgccggcatcgccgtacagcagcacattgttcgcggggcggccctccagcagggcgcgggtgttggcaatgaccttctcccgctcctgctcatagccgggcagctcgctcagccgctgcgggtcggggtagcgcaccggcaccagacggccgtcctccagcgcaaacacatggtagcgggcaaacataccgtagcccttgcgtccggccgccgcgcggcgcgcctcataggccgcgcggtaatccgcatccggcgtggtctgccagcggggcagaaacgccgccgcgccggggaacacctcgtccagtggggcgcgccccagctgctgcagaaagtccagctcatcggccagcgccttttccagcacagggccggcatcctgcccggccgccacacgcaggcagaggttttcctcctccaacacagtattcagcagggtatccgtccagttcgtaccgcgggcaaacagctccgcctccagcgcggcgatcgcgcccgtcagctcgttttcctccgccgccagcgccgcgcgcagcgcacgcagcggctccgctgccagcagaccgcggaacaccacaagcccatccagatgggccaaccattccttacgcaacatatttagtattcctttcccaagaagatcactctttatcacagtataaccgccgcagcccaa

SEQ ID NO: 14032 - DNA, 11509 bp, Unknown
  gut microbiota DNA sequence
taacgcacggtcctcgggagggataaattcctcccctacgcattgcccgcaaacaaccgcctgcatggcggggcttcggggacgccgccccctaccgccgcattttgtttgcgctcagcgcaaactccaccttttttattatctattatcttttatctcttatctatttattatttgcagcattcgtggtatgatatacctaaccccaatatctatcacaaaaaggagcgatccattttgactaccaatgaaaaaatcgccgcgctgcgcgctgccgcgaaggcagccggggccgatggcgtgctgattatgaccagcgacccccactgcagtgagtatctgcccggctattacaacgctctgccgtggttttccggctttatcggggagaactcgaccctcgttgtgactcaagaccgcagcgccctgtggtgtgacggccgcttctatgtgcaggctgaccgccagctggccggcagtgagatcgagtgcatgcacgcaggctctgcgggcgtgccgaccgtggccgagtatctggagagccactttgcacagggcgagacactgctgctggacggcagctgcgtgcccgccacgatcgccgaggaataccgtgacgcgctggccaaaaagggtgccgcgctcaagagccttgatgttgcctcccccatctgggacgccacgggtgagcgccccgccctgcccgacaccccctgcaccctgctgacccccgcccagaccggggccaccgccgcggaccgcatcgccatggtccgcgccgagctgcaaaaggccggtgccaccgcgctggccgtgaccggtctggactgcgtgggctggctgctgaacctgcgcgcccgcgacctgccctgcaccccgctggccgttgcctacgcgctggtcacgatggacgcctgcacgctgtttatcgcgccgggccgcctgtctgacaccgatgccgccacgctggccgagagcggcgtgacgctgcgcggctacgatgagattctttccgccgtccacgccctgcccgctgaggaagtgttccttgtggacgagaaggcaaccaattttgccctgtacgaggccctgaccgcccacaggacggtgaccggcgctgacccgatctttgccctgaagggcatcaagaacgagaccgagctgaagaacatccgcgagtgccacatccgtgacggcatcgccgtggtacgcttccagatggacttggaaaaggcactggccgagggcaagaccctgaccgagatcgacatcgacacgatgctgcagaagcgccgcgccgagcagcccggctactttgaggacagcttctcgaccattgcagcctacggcgcgaacgccgccatgatgcactaccacgccgagggcgaggtcaacagcgtcattgagccgcacggtttcctgttggtggacaacggcggccagtatgactgcggcacgaccgacatcacccgcacctacccggtcggcccgctgaccgacaacgagcgccgctattacacatgggtgctgcagagccacatcgacatggcccgcgccgtctttctggactactgcaccggctttgcgctggacacctttgcccgcggcccggtgtgggcgcacaaaatcaactaccgctgcggcaccggccacggcgtcggcttcatctccggcgtgcatgagggtccccagagcctgcgcccgaacaaccccgtcatcttcaagcccggcatgaccatcaccgacgagccgggcatctatgagaccgacgaggtcggcatccgcatcgagaacgagctggagtgcgtggacatgggcgagaaccagtacggccgctggctgggctttgccccgctgacgctggtgcccatctcgaccgagccggtcattgtggacgagctgagccgcgaccagctcaactggctgaacgactaccacgcccatgtctatgagatgctcagcccccgcctgaatgaggacgagaaggtctggctgcaggccaagtgtgcccccctcgcaagataataattttccgggcggcaccgcgccgctttccccgggaaacaataacggcagatgccccgccgggcatctgccgtttttttgtttagttatcgtttagttatcgcagccggagtcggtctcgccgcagccgtcgcagtcactctcgaactgcacggcgttcttggccagctcggggtcaaggcgctgtgcgacctgcatcatcagggcgcactccatccgcttgcggaacaccttgcagccgtactcataggtgccgtggatgtcgccggtggcgtgcagcgcgttggccgcgcagccgcccgcgcagtacagccgcgcccagcaatccttgcagtcggggcgggcgtagacattgcagagcttgaactcatcgcgcagggcggtgttggtcacgccgtcccagacattgcccagcttgtaattcgggtcgcccacaaactggtggcaggggtagagatcgccccacggggtcacggccatatactccgtgccggagccgcagcccgagatgcgcttgtagatgcaggggccgtgctttaaatccagaatgtaatggtagaaggtgatcggcttgccggccttctggcggcgcagcatgtcgttggccagcagctcatactggtcaaacagcttgggcaggtcctcctcggtcagcgcctcgggggagtcgggcggcgccacaaccggctccatcgacagctcgctgaagccgaggtcgtctgccatatggaacaggtccttggtaaaatcaacgttgtgatgcgtaaaggtgccgcgcatatagtagcctgtgccgccgcgcgccgccaccagcttttggaacttgggcacgatgcggtcatagctgccgttgcccgccagatccacgcggaaacggtcgttgacctccttgcggccgtcgagcgaaagcacaacattatgacattccttgttgcaccagtcaatgacctcgtccgtgatgccgatgccgttggtcgtcatcgtaaagcggaagtttttgttgtactttttctcgatgctgcgcgcataggcaaccagctgcttgcagacctcgaaattcatcagcggctcaccgccgaagaaatcgacctccagattgcggcgggtgccggagttttcgatcaaaaagtccaaagcgcgcttgccggtctcaaagctcatcaggccggcctcgccgtggaacttgccctgcgcggcaaagcagtagctgcagttcaggttgcaggtgtgggccacatgcaggcagagtgccttgaccacattggaacggtttttaaagtcaaaggcgtggtcagcgtaggcatcgggtgcaaacagctgaccggcggcggtcagttcgtcaatgtcgtccagcacatcgctgatgtcggcggcggtcacatcggcgcggtccgcgtactttttggcgagggctgcagcagcctgctcccggctgctgccttggtcgatcagggcgatggcgtcataggcgacatcgtccacggcgtgtacgctgccgctgtagacatccagtacgatattgtaaccgctgagtttgtattgatggatcatggttttctccgttttgtcaggttggatatacggcaggcggccacgggcggatatggaatccgcccctacggcaaccccttgcgggggcacatttcctatgcgccccaccgcatcatatcatagaaaatgccgggctgccatgcggcaccccggcataaaagccagcaaaaattacttgtcggtcttctcgcaaggctggttggcaatgccgcagctggtcttgcaggcgctctggcaggaagtctggcactcgccgcagccgccgttcagcaggctcttcgccatatcgcgggtctcgagagtctggatgtgcttcataaaacagtcacccctttatacattttagaattattactattatacacggttttggcgggggtgtcaagggggcaatcaaggcaaagcccctccggccttgcttcgctcggccacctcccctataaggggaggcttttctcgcgggctccgcccgcgcaaaaggctccccacactgtggggagctggccgagcctgcgaggccggaggggctctgcggccttcaaatcaccgaaatcttatccggcccgctccccccaatatgcttgatccttgtcccggccttttccagctcctcacacgcggcggccagcgccgccgtcacctcctcgccgggggcgatcagcggcacgccgggcgggtaggcccaaaggtactcggcggcggtctgccccacggcgctctgcatcggcacaatgcgggacgggcgcagcagcgccgcgccgatcgtgcagcgcaccgcgccgggcgcgggcaggatatgcggcgctgcggcgggcggcgctgcggtcttatcccacgcggccagcacctcggccagccggtccagcgcgtcctctgcatcgcaggggcttgtcatcgccagcacattggggccgcagaccatctccggctcaaagccgttttcccgcaaataagccgcgcccgccgcgccgatctgcaacagcagcttgccggcatcgtgcgcaaaaaagtccgggtggggcgcgtccgcgccgcagcacaggatgcgcgtgttctgcagctttttcgctgcagcgtcaaagcggtccagccgggcgcgccatgcggcaaaggccgcgcgcccctgctgcgccagccagccggtgcagccgtccagactgaccagcagcgggtagctgggtgagcttgtctcaaatacatcaagctggcgctcgatctcggcggggtccgcaaggctgccgttcagctgcaaaaaggcggtctgggtcaggctgggcagcgttttgtgggcgctttgcacgacaaggtcggcccccgctgcgaccgcgccgccctgccagccgtactgcgcggcaaacggcagatagtgcgcaccgtgcgcttcatcgacaagcagcggcacgccgtgcgcgtggcagagccttgcaatggacgctatatcgcttaaaactccctcataggtcgggctggtcaggatgacgcagcgcgcctgcgggtgcgcatcgagcgcagcagccaccgcggcgggctgcacactgccatagatgccgaacgccgcatcgaccggcggtgtcaggtaatgggcggtcagctgccccagctcaagggcgtggtagacggccttgtggcagttgcgcgccacgatgacctcactgccgaagggtgccagcgcgcggatgcccgccagcaggccgaccgtgctgccccccaccagataccagcagcggcggctgccgtacagggcggcggtgcgctgcatggcggcggccaatatgccgtccgcatcgtgcaggtcgtccgcaccgtcaatttcggtcatgtcccacgcagcgcagccaagccccggtgcaggcaaagcgcggcgcttgtggccgggcatgtgcagcgggtagcgggcggcggagagggtttctaattgttgttgcagcgttgattttacagtcataggttaccttccaacagaaaagccttcccccttgtgggggaaggtgcccgaggccccgcccgagggcggatgagggacgggtctgccgtgccctcccttttacggctggctgcggcaggctctcccctcatcagccgcctgcgggcggcagcttctcccccaaggggagaagcctttggggttacgaaatctcaatttctgccttactgcccgcccgtgtcttggtcacgcggatctgccttgtcaggcggtcctgcagggcctcgacatgggagatgacgccgatgagcttatcgcccccggccagcccggccagcgtatcaacggccttttcaaggctgtcggcgtcaagtgagccgaagccctcgtcaataaacagcgtttcgatgaccacgccgcccgcgttctgctggatcgtatcgctgatgcccagcgcaaggctcagggcagccataaagctctcgccgcccgacagactgcccaccgggcgggtcttgccggtgtaggcgtcaaaaacatcgagatccagcgcggtcttgccgcttacggcctcgctccggcggcgcagcaggcggtactgcccgtccgtcatgcgggtgaagcgcaggttggcagcctcgaccacaccgtcaaaatagaacgcctgtacatactgctcaaacggcagcttgatcttgccggtcaggttgccgttgattgtcttggagaggttgtcccacatggcccgtttttcccgggcggcggcgctctgcttcatcgccttttgcagcgcgtcgatggcggcgcggttcgtgtgcaggcggtggaccgccgcatcgcgggcgtccatggcggcggcgcggtcgctgcgcagccgggccagcgcctcctgcaggcgctccagcgcatcggggttatcccgcttgggcattgtctcctgcatctgctgcacgcgggccgtggcggcggcgtggcctgccttggcgttggcggcgcggcgggtggcggcaaactgctgcttgtccagctcggccagctggctcgtcaggatgtccgcctgcttggcaaggctcttggcacggtcggtcttttgcttcagcttcaggtggtcggcctgcaggccgcgcagcccctcggtcaggctctcctgctgggcggtcagcgcggttttcagctcgtccggtgtcagctcggcggcgggcttgcccgtatagcggtccccgcggcgggcgaaaaatccatctgcgtcgcgctgcaatgccgcgcgcagctcatgcgcgtgggcagcggcgtcaccggcggtgcggctggcggcggccgttgtgcggcgctgggccgtcagctccttctcgcgctcctccagctgcttttcggtgatgtggtccttgggcagggccgcgatcttggggtggcgggtcgagccgcagaccgggcagggcttgcccttttccagctcgcgggccagcagaccggcgcggtttgcgttaagctggcgctgcagcgtgctgtactcctcctcggccttgtccagcgcggcctgcgccgccacataggcggtctggcggtcggcggcggcctgctcggcccggtcggcatcggtcaggctctgcaaaagctgcttgcagtcagccgaaagtccctccgccagctcaatgcggtggtcggttttcagcaggtcggcctcagcctggctcagcgcggcgcggtcggcttcgtttttggcaatgctctccttgaggcccgccgtccgcttctcaaggtcggccatgatgatgtcggtctggtgctcaacatcggcggcgcgctgctcctcggcgatgaggccggccagctggcggcggcgggcggcgcgctcctcggcaattttaaggccggcgtcaccgcgggcgatcttctcgtccagctccttcatgacagcggtctggcgcttctcgttcgcctcatcggcctcaagcagcagcttgcccagttcggcggcagcgcctgcggcaaaggggtcgcggtcggcctgcatttcggccagctcggcggcggtctgctcatcggcaccctctcccagcagggcgccgacatgcatcaaaagtacatcgtcaagccgcttgcactcttcctcggcgcggcgggcgtagtccacggcggcctgtccaaggcgctggtggtcggccgtgtcaaaaacgcggcgcaggatggcggcccgctcggcggagggggcgttcagcagccgggtgaaatcgttctgcgccagcatcgacacctgcgcaaactgcttggcgtcaatgcccagcagcttgacaacggcgtccgtcacggcggaggcaccgctgaccggctcgtccggctcgcggataagttcggccttggcgggcaccttgaccatgccgctgccccgcttggccgcgcgctgctggtcgggccagcggcgcaccgtgtagctgcggccccggtgggtaaaggtcagctccaccgaggtctcggcctccggtgccgcaaaatcgctgcgcagcatcgttgtttttcgattctcgcccgaggtctcgccgtagagcgcaaaggtgatggcgtcaaacagggcggtcttgcccgcgccggtatcgccgccgatcaaaaacaggccgttgccgccgaacgccgcaaaatccagctctgtgcggccggcgtaggggccgaaggcgttcaagatcaacttccggggtttcattcgctttttgacgcctcctcgcgcagttttttcacggccagcacttcctcggtcgtcagggcacggccgttcatcttggtgaaaaagtcctgaaacagctccgcaaagggcttgcccctgacggcctgggtcatatcggccggcagcgccgccgtgcccttgggctggtagtcgagccgcatggcgttggggtaggccgcgcgcagctgggccatcgcatcgggcagcggggtcgggtcggtcagggtcgcccagatataatcctcggtgtcggtggggtgcgcgaccagcttggccagcgggccggtcaggtggcgcatggcgcggcggggcgtcagcggcagctgctcgatcttttcgacaccgcgcttgccgatccgcacaagggtggcggatttctgcataccgcactcgtccagatggtagcacagcggcgagccggcgtaccgcacagcgtcaatgccgacccgctgcgcgcggtggatatgcccgagcgccgcatagcagaagcccgcaaaccgcgctgcatcaatggaatccaccgtgccgaccgtcaggggggccgtctcactgccggcaagctggggcgggcatacgccggagaccaccatctggtgggccaccagcacgcggcggggggcggcaggctcacagacggcgagcgccgcgcccacggcggaatcatagtcggagatctcggcctcgggcagatagtggcgcacggtggccgcccgcacaaagggcagcagggtaaattcaagggggccgtagcggtcatgcagcacgacctgcttgggcatgccgtggaaccgcccggcgatgtaaacgccctgctctgccagcaggccgctggcaaaatcaaggcgctcggcgctgtcgtggttgccggacacggccagcaccggtacatgccgcagcgaaagctgtgtcaaaaaccagtcgagcagcgtgcaggccgcagccggggggacgggggtgtcgtagatgtcgcccgccagcaccacagcctcgacgccgtgcttatcgcagagggtcaggatctgctccagaataaagcgctgatcctccagcatatcaaacccgttgacccgtttgccaaggtgcaggtcagccaagtgcagaaatttcatagtgtatctccagattttgcgtttaccgcgctgcaggggccggacatgtccggcccgcggccttgcggggatggggtgcttgccggaatgtacagggccgggcgtgcccggcccctacccggcagcctgccgtttgtagggggcggcgtcctcgacgccccgcgggccgatgcaagcatcggcccctacaaattcactgcgttaccgccacagcttctcccatgtggtaatatccagcgtcacgccgggcaggacctccatcggggcggtctcggccttgcggaagcggcattttttgacaaagccctcggccttgaggtcgcgcgcccacaccttcaggtaaaggcggctgcggccatccccctcggccagcttctgggcgtaggccacagcgctgcggccgatgcccttgccgcgggccttctccttcaaaaacaggcggctcaggcacatagcgcccgccgggccgaggtcgagtgcaaaataacccaccgcctcggtgccgagatagacgaggaaatagttgataacgccgctgtggatctcgtcatcggtcaggatgtcgctctggtacttatcggccagcgcggcggcgaccttgggcgtcagcttggtgtagtgctgcacaaaaatttcctgtgccagctccgaaaccagctgcacatagcgggtcttggtaacttgtttaaatgtcgggttcatagtaactccttttgttaaacatatgccgccgtaggggcgcattctatatgcgcccgtgcagcttacggcaggtgccgcgggcggatatggaatccgcccctacatttattcaatggtaacgcttgccttcgccggcatacaggcggcccagtcgccctcgtttttcagcacgccaaacccctcgcagaggtggtcggggcaggggctgtccacaaaggcgatgccgccgttttccacatgcagatggaccgtgtaccggccggtgtcgatgtcatagtcggcgtccctgcgcaggtcgatgcgctgctccgtctgcggggtgccgtagcgcagcaccgccgtatgcccgctgccgccggtgcggcataccagccaaagcaccgccgccacggccagaaccgccgcaacaaagataatatttttgcgtttgttcgtcattctttgtcaaattccagttcctgcgccatgccgtcatacccggccagcgctaaagggtaagccgtgcgggccgcagccagcccgggggcggtgtcggtcacggcggcgctgtagtgggtcagccagagacggcgcaccgctgcggcggcggccagcgcgcccgcctcgcggcaggtcgcgtggccgtagagccgggccttgggcaggtcggcgtcatcggcgtaggtcgcatccatgcagagcaggtcggcgccccgggcggcggcttccagcgcggcgcaggggcgggtgtcagtcgcatagacgaccttgaggccccggcgcggcgggccaagcacctgctccggcgtaaagcctcctgccgccgcacccctctgcagcgttttccagtacgccaccgggatgcccgccgcccgcgcccgcgcggggtcaaaccggcctgcgcggggcagcgccagcgcgtaaccgcagcagggcacgcggtgggtcagcgggaacggcgtgattttcagcgcatctacggcaaacggcgcgtttgcctcccgccagaggacgggatagggctgcgcgcctgccagcgccatgacgggccgcgcgaccgcatccagccccgcagggccgtagacggtcagcggctcggtgcggttcaggctgcccagcgtctgcaaaagcccgggcaggcccagaatgtggtccccgtggtagtgggtgagcagcacggccgaaagccggtacgcgctgacgccgtaccgccgcagcccgacctgcgtgccctcgccgcagtcgagcagaacgctgcgcccggccaccgtcacggcggtggccgccagtgcgcggtcgggcagcggctgcgtgccgcccgtacccaaaagcgttaccttcagcatcggctcacctctttccaacagtaccccattattaagcgtattatagcacagatcagggaggagtacaacaggcgtatgccttcccccttgggggaaggtgcccgaggccccgaccgagggcggatgaggggcaggtttgccgcagcccctcggg

SEQ ID NO: 14033 - DNA, 3071 bp, Unknown
  gut microbiota DNA sequence
aggggtatttataccccccgtgttacttccggtcaatcgccacaaccacgccggacagtgccagcagcgccagcaggttcgggatcaccatcaggccgttgaacaggtcggccagcgcccagacaagatcgaccttcaaggtcgagccgaccagaataaacgcgaccacaatgacgctgtacacaggcagcaacttctcgccaaacagcgccttgaaattcgactggccgaagaaataccagccgatgatcgtggaaaaagcgaagaagaacatgcacaccgcgatgaacaccggcccaaacccgccgaacgcctggctgaacgcggcctgcgtcagcgcggtgccggtcaagccctgcggtaccagcccggaggtgatcagcaccagaccggtcagcgtcagaaccacaaaggtgtcgatgaacacacccagaatcgccacggcaccctgatcctgcggacgcttgaccttggccagcgcgtgggcatgcggcgtggagccaaggcccgcctcgttggagaacaacccgcgcgctacgccaaagcgcatggcctgctgcacggtcacacccgcgatgccgcccgccatggcctgcggctcaaatgccagcacaaacacctgcgccagcgcgccgggcagcgccttggcgttgatgaccagaatggcgatgcagcccaaaatgtaaaatgccgccatgaccggcacaaccttttctgttacagcggcgattctctgcacgccgcccagaaagatgaacgccgcaatggctgccacgatgacgccaaccaccagccggtttacgccgaatgcgttgtggaacgcatcgccgatcgagttggactgcaccatgttgcccataaagcccagcgccagaataataagcaccgaaaagacggtcgccagcaccttgccgcccttgcccttgaatgcggcgcggatataaaacgccgggccgccggtcacatggccgttcaccgtggtacggtagtgctgcgccagcacggcctctgcatagatggtggccatgccgaaaaacgccgacacccatgtccagaacagcgcgcccgggccgccgctgaccagtgcggtggcgcagcccgtgatgttgccggtgccaacctgtgccgcaatggcggtcgtcagcgcctgaaagctgctcatgccgtcggcgtcagcctttttgccgcgcagcgtaaagccgccgaacacccgatgaaccccctcgccaaagcggcgcacctgcacgccgcgcagccgcacggtaaaatagaggcccgtgccgaccaacaaaaacagcagcagcgagttccacagaacatcgctgaactgctcgatccatgccgtaaatactgccatgttttccccctgttattataccattttactttccgtgccaccgccgccgcagggcaagtgacttaataactatacaatgatttgcgtataaagtcaagtgtatttgtttcgcgtacagcttggcagcctgaggcataaaaaatattttgcagatcctcctccgtgtaacatcggggacacaactgcatggtacactggctgcaaacaggaaaggagaaatgctccatgaaaaagtatctgcccttgcttgcagccgccttggccctgaccgcctgcagcactgcgcctgaatctacccccgcaccgatgcagacacctgctgcagagaacgctgccggcgaggaaagcgcagcagcgttccccattggggaactgcgcgcatataacgactggatgcactgcacagacacagcctattacacgctgtatagccaagagggcacaacaaatattgtggggctgaagttggactatgccaacggtgtgcagaccaaggttatgtcgattgatttagccaacgatgctttgtactccgattggtttgtcacaaatgataatgtggtgcgcgtatttttggcgaacgaggacggatcagagtttcgttttaagagcttttacccggatggccgcagtgaagaacggactgccagtcaggaaattacgccagttatttatgacgagtacgcggcctatgtcctgcgcgacaagtgtgtcgccagactggactggcagaccggagagcttacgacatggagcgcatccatcccgcagataagcgagatacttggcgttgcgcacaacaaggtagtgctgacccgcattgtatccgatatgccgctgcctacagaccctgaaatgtccgaggctgtgcttcaaagctccctgatggaatacgatctatacgatgtatcgtctaatacgctggaaaaactgtttgatgaaccgtactacccggaggaaggcagcagccgaaaatcctacttgggataccgtggtgatatgctgtactttgaccagtcgagaccggatggcgatgacatcacaaaggttttgtgggggtacgactgttcggcgggaaccttgcaggagttatatgcagagaattcggccggatgtgtgggcggctatagcaccccacagggatttacacgcagcgggcagctggagtttttgtttctgcaaagcacatcggacacgctgcatatttacaaaacagccaacggacaggtgtacaaggtgccctaccacgacccgactctggatgcggcctacggcaatgccgaaaattacggccgccccattgccctgaccggcgatggtcgggtgcttgtaacggacggttatgtccagcgggacggttccccggcggatgcctacggcctgatcgaccttgacgcctacctctccggcagcaccgactacaccccggtacagatgtggcaggatcagtagggggcggcgtcccctatctacagatgaaccgcaaaagggatataccgtcaggctgcgggccgggcatgcccggcccctacaaatgccggagagttggcggcaacgattgtagggggcggcgtcctcgacgccccgcgggtcagcagtccttcccgggtcatatgtagggcggcaagccctctggccgccgtggccgcttgcggcagcgggaagtgcccgggagggatgaatccctcccctacggattgattgtaaaagggat

SEQ ID NO: 14034 - DNA, 2419 bp, Unknown
  gut microbiota DNA sequence
aaaagtatggctgactacagcaatgtatcttttaaaaataacggcaggctgaagctgctgatcatcgtcggcacccggccggagattatccggcttgcggcagtcatcaataagacccgcaagtattttgatgtcattctggcccacaccggccagaactacgactataacctgaacggcgtctttttccatgatctggagcttgccgacccggaggtctatatggacgccgtgggtgccgacctcggcgagacgatgggcaacatcatcgccgagagctacaagctgatggctgccacccgccctgatgccgtgctggtgctgggcgataccaacagctgcctctccgtcatcggcgccaagcggctgcatatccccattttccacatggaggccggcaaccgctgcaaggatgaatgtctgccggaggagacgaaccgccgcattgtggacatcatctccgatgtgaacatggcctactctgagcatgcccgccgctatctggccgacaccggtctgccgaaagagcgcacctatgtgaccggctccccgatggccgaggtgctgcaccagaaccttgccaagatcgaggcctccgatatccatgcccgcctcggtctggagaaggggcggtacatcctgctctccgcccaccgcgaggagaacattgataccgagaagaacttcacctcgctctttaccgccatcaacaagatggccgaaaagtacgatatgccgatcctctactcctgccatccgcgcagccgcaagcggttggagcagagcggtttcccgcttgacaagcgggtcatccggcatgagccgctcggcttccatgattacaactgcctgcagatgaacgccttctgcgttgtgtccgactccggcacgctgcccgaggaatcgagcttttttaccagtgtagggcaccccttccccgccgtctgcatccgcacctcgaccgagcggcctgaggcgctcgacaaagcctgcttcattctggcgggcattgacggcgaccatctgctgcaggcggtggatgtagccgttgagatgaacaagaacggcgatctgggcacccccgtgcccgactacaccgacgaaaatgtctccgacaaggtcgtcaaaattatccagagctacaccggcgttgtcaacaagatggtgtggcgcaaatactaaacaggaacacgatagcttatgcgcatactggtagtgacccagcatttctggccggaaaatttccgcatcaacgatattgtcgagggctttgtgcaggacggccttgccgtggatgtactgtgcggcctgcccaactatccgcacggggaatggtttgacggctacagcgccgacggcccctttgaggaaagctataagggtgcccgggtattccgcgcaagggagatcccgcgcaaaggaaacaccggcaagacgatttttttgaattatgtaagctggccgctgtatgcggcggcagccctgaagcgcctgcccggcgggtatgatgcggtgttctgcttcaacacaagccctgtgctgatgtgctggcctgcggtgctgtatgcaaaaaagcaccatgtgccgtttacaaattatgtgctcgacctctggccggagaatttgtacagcgtgctgcccgtcaaaaaccggtttatgcggtgggtggcacagtcggtcagtgacagcctgtacaagcgctgcgaccggctgatcgccatgagcgagccgctgcaggagcgtctgtgcgcccgcaccggcaagacagcggcgcaggtggcggtcatcccgcagtactgtgaggatttctacgctgtgccgcagcatgatgcagcgctggagcagcgctttgccgggcggttcaatctggtattcaccggcacctttacccccgcgcagagccttgacatggtgctgcgcgccgtgctggacgcccgcgccgccggggccgagcggctgcacctgctgctggtcggggacggcatgagccgcgaggccctgcaaagcctcgcccatgagctgcatgccggggatgccgtgaccttttacggcagcgtccccgccgccgatgtacccaagttcaccgcgctggccgatgccctgctgatctccctctccgactcgcccgatctgggcctgacggttcccggcaagcttgccagctacatggccgccggcaagccggtgctggcctcgatgaacggtgcaggctgcacggctgtgcaggaaagcggcggcggactggtcagcccggcctgcgaccaaaaggcactggcagagaatatgctggcgctgtacggcatgaccgccgatgagcgggcagagttggggcgcaaagcctatgcgtattacgccgcacattaccgccgggcggagttgttgaaacggctggaggaatttacggtggaagggaaatgag

SEQ ID NO: 14035 - DNA, 62840 bp, Unknown
  gut microbiota DNA sequence
ggattttcaagtgacaccgcatcaattacgtcacacttatatcacgaacctgatttatgcttcggttgatcctaaaaccgtacagtatcttgccggacacgaaaacagcaaggtgactatggacatttacgctaaagtcaagtataataaacctgcccaattacatggggtgatcaacagagcaatcgacacatcaaaaaaagattagggttaaaatccgacaaaagcctacaaaatcgtgggtttaagaactggtggacgaagagcaaaaagcttgaaaaaccgcgtaaaatcaagcaaaatcgagcttcggtttcgtgaagtacggtctgaaggctgcccgccgcgctccccagttcagcaagcgctgatttctgctgcgcagcaaaagcttttaccccagcatctatggtgccgatccgctggccgggtcggcactttttgtgtgattctgcaaggagtttctatggctttatcactaaaaaccaaagagcatatcctccgcgcggcggcgctgctcgtccccaaatggggggcgctgctgggcggcggtgcggcgctggcgctctcgatcgggtttaccgggtcggcgctgcatttcacgacggtcaccgacacccacggcggccgcgtgcgcatcctgacggcggccaccgaccttgccaccgtgctgcggcaggctgaaacgccgccgctgggcgagaatgacaaggcgatctggtcccagaccgatgacggcacccagcttgacatcctgcgcgcctacaccgtgccggtcacggcggacggcaccacgcaggagatcatcacgaccggcgcaacggcggcagagctgctggcgcaggccgggctgacctggacggaggacgatatcctcagctgcgcgccgggggagcaggtccccgagggagagaccctgacgctgcagcgggtcagctatgtggactacacgcagaacgaggtcatccccaccgagctggaggagatcccctccagcctgttctaccgccggccggaggataccgtcaccgtgcagcagggcagtgacggtctggacaccgtcagctaccgggaaacctgggtggacggtgcatggaccggcaccgaggagatcggccgtgagacgcagatcggcatggtgcctaccgtgcagaagatctacggcgagcaggcgccggtgtcgcagtttgtcggccccgagatcgtggacggtgccccggcagagggcgttgccgaggtctacacggggcagcgctcgacaggctattcagcgtccgccacggccaagggggccagcggccgccgcctgacctacggcacggtcgcagtcaaccccgccgtcattccctacggctcgctgatgtacatcaccagcgatgacggccgctttgtctatggctacgcctacgcggcggacaccggcgccgccatgctgcagggcaaggccttcatcgacctgtactatgagacctacgatgagtcggtcgcaagcgcggtcatcccggtcacggtctatctgctcgacgaggagaccgccgctaagtacaaggagcagaacgatgcgatccttgcggctgacacggtggtcggcagataaagcatcagacaaaaaaacagggtcgtgaaccgctgtggttcacgaccctgtttttgtacagtcttacttcgtgccgaagatacggtcaccggcatcgcccagaccggggacgatgtagccgttttcgttcagcttttcgtccagtgcgccgacatagatgtccacatcggggtgggcctcatgcagagccttcaggccctgaggggcagcaaccagaccgatgaacttgatgtgcttggcaccacgcttcttgatctggccgatggcgtcgcaggcgctgccgccggtagccagcatcgggtccagaacaaagacctcgcgctcattgatgtcgctgggcagcttgcagtagtactcgaccggcaccagcgtctcctcgttgcggtacatgccgatgtggccgaccttggcagcgggaatcaggttcagcatgccgtccaccatgccgagaccggcgcgcaggatggggaccagcgccagcttgcggccggccaggaccttggtgcgggccagagccacgggagtctcgacctcgacctcctcggtcggcaggtcgcgggtggcctcatagcagagcagcatcgcaatctcgcttaccagatcacggaactccttggtgccggtgttgcggtcacgcagcaggctgattttgtgctggatcaggggatggtcaacaatttcaacaacgctcatggtaggatctccttgcaattcaaaattattcagcctgcagggcaggcaatgtgaaacttagaggttctccagcgccatcatcttgtcgatgcgcgtctggtggcggccgccctcaaactcagcgttcaggaaggcgtccacgatcttgcaggcaaggcctgcgcccacaacgcggccgcccatgcacagggcgttggcattgttgtggcggcgggtcagttctgcgctgaaggtatcgctgcagcagcatgcgcggatgcccttcatcttattggcacacatcgagatgcccacgccggtgccgcagcagaggatcgccagcgcacagctgccgtcctgcacggcccggcagcccttgacggcatagtcagggtagtccacgctggcggtggagtcggtgccgaaatccgtataggcgatgcccagctcgtccagatgggccttgatggcctctttcagctcatagccgccgtggtcggcagccagtgcgatcggtttgtcaaatttcattctgatgccccttttgttttttcccgttccgcgcgctcacgctcggcctgactcagccggtggtagtccggcagcagcgccgcaggcggcacacattcgccgttctcccaaagggccttggcggccagcgccacgcccgcgccccgcaaaacctgcagggcagggggcgtgcagaccacgcccggaacactcttatatgtattgtaacacaaagttgcgccatcgccaacaaaaaagagcggttttttacagctttggacaaaattttccagctctgtgaccggtgcggcggcgtcctcggtcaggcggcggtggcttgcaaggtcaaacgcgccccaatagacctgcccgcggcgggcgtcctgcgcgccgatgaccgtcccctcgcccgcaaggccccaggccagcgcggccatggtggacacccctgcgcagggcagctgatgcggcagtgccagccccttgatgacggccagcccgatgcgcagcccggtaaagctgccggggccgttcgtgacgcccagcacatccagctcgtccatcgtcaggccgctggccttcagcgccgtgtcgatcatcggcagcagcgtctcgctgtgggtcaggccgttgttgcactgtgcctcatacagcagggtatcgtcccgcagcacggccacggccgctgttttgccagcggtatctacagctaggatattcataggatcacctgtttaaaaatgtaatagagtatagagccttcccccttgggggaaggtgcccgaggccccgcccgagggcggatgaggggcgagtgtactgcgattgcccgtaaatgggttgcaatggcgcagtcccggcggggtgagggcaccccgccctacatccggttgaaaagtagtgcgtagggcggcatgccctcatgccgccgcagccgcacgggtcccggatcgtcaaagaccttacccaatcgtaatcttccgcgtcgtttcgtccagccgctcaatgtggatattgatgggattttccagcgccagcagctcggcgcagttctcgctccactcgcaggcgaccacggcacccatgtcaaggtagtcatagaacccggcggcggccagatcattctcggtatggatgcggtagaggtcaaaatgcgcgaaaggccgcgggccgcggtaatagttgacgatggcaaaggtcgggctggacaccgggtcggtgcagccaagcccctcggcaatgccctgacagaacgcggtcttgcccgcgcccagcccgccggtgaacgcgatcagcgcgcccgggggcagtgtcccggcaagcgcgcggccggcggcaacggtttcctcccgcgaatgggtcacaaattcctgcataggtacgctccctgtctgcggccgaataaagtgatggccgcactcatatatattatagtacagaaatcccaatttgtaaaatttaatctgtaacttggcaagatctgccgcgatgcggtataatacttacagttacaaagtatctgcaggggagggaggccgcctatgtatccgcttatacgccggtatctgcgccgggtagatctgtttatgctgctgctctgcgcggcctgctcggtgctcagcgttgtggtgctggtgtccatcggccagacgcagcttggctccaacaacaaggcctcggtccagcttattgccagcctgctggggatgatgcttgccgctatattttccacggcagattaccacgcgctggcgcgggcctggccgctgcatggcgtggtggcgtgggggctggtgctgcccaccctctttctgcacaatgtcaacaccgggcttctgacgatcggctacgatgcgggcggcacctccaactacagctggtaccgtgtgggcggcatgacctttcagcccgccgagctggcgaaaatcagctttatcctgacgctggcgctgcatttgagcagggtgcgcgggcaggtgaaccggccgcggaacctgttgcttgtgctgctgcacatactgctgcccgttgcggccatccacattcagggtgatgacggcacggcgctggtatttctgggcatcgggtttattatgctgtatgcgggcgggctgtcccactggctggcggccggcgggctggcggcgggcatcgtgggcggtgcggcgctgctggcgctgcgccccgggcttttaaagggctaccagttcaagcggattctggcggtgctgacgccggacgatcccgcgctggcggacatcacctaccagcagaacaagggtgcaatggccatcggcaccggcgggctgacggggcaggggctgttctccggtgagcatatctttgtgccgaacgcatggaacgattttatctttgcgtatctcgccaatgtgctgggctttgtcggcgcggcggcggtgctggtggtgctgctggcgctctgcctgcgcacgctgcagaccgggctgcgctgccccgatgcgctgggctgcaatatctgtgtaggcatctttgcggcgctgtttctgcagtgcgttatcaatcttgggatgaatttacaggtgctgccggtcatcggcgtgacgctgccgttcttctcggcaggtgggtcgagcgttgttatgatgtatctctgcatcggcattgtgctaagcgtaggcatgaacacaaggcgcagcaagctggatatgcagcgaattttataaggaaagcgggtgctgtgcggcacccgcttttgtgttattcagcagctttggggtcaggcgcgaacaaaccggggataaggcagagtgccgctgcgccgacaacgatgaacactgtgcgggacagccagctcatactgccgcccagcagccagcccacggcgttgaacccccagatgccgtaaatgccccagttgatgccgccgatgatggcaagcagcagcaaaacctttttaaaacaagacatggatgatccctcctctgtgggagagtatgtgcggggatgtgtggatttatgcgcgggtgaagggggagccgcgacttaccgccgcatccctttcacggttcattcgcagggaaaaatcctgcccccttcgcggggcgtcgaggacgccgccctctacacattccttgtcgtaaaccttccgcctatttgtaggggccgcatacaggcggcccgccaaccttaacgccatatccggcttacgaatcgccaccctgtaggggccgggcatgcccggcccgcagttttgccataagtacccgcttatccttacaaactggaatttgtatgatcttataaatttattataattctcctcaagtaatatttcttttgcaatatccttcatgtccaagttctgtcgtagattttctaatgaagcattcgcttggattaagtctcttttctgcatattcctcacttctcctaattttttctgcctataaaaatcatcttgttacagtaattacaatagagattagaattgccactataatactaattattggccagtgattttttaatatattttttccggtgtaaactcttccgacttccatataaccactgatgatacctgtactattcatggctgaaagcatatcatctgtaacaccaggaattacttttgttatgacatttattccatttcttctcatggccgcttcctcgatgcccagcatagcttgcaaaacccattcctcaaattctgttcgctctctgttgcaaaaattaatgtatctggtcattagcccgacctgaattcttccaataaaaaacatgataaatccaacgataaatgctacagccggaacaataaattgaaaaaccgtagggaggtcgcaaagtataagaacaaacgaaggaatcgctccaaataacaaatccatcccccaaaatgacaaatagaatcctttgcgaagtcttctcgtcacttcttctggtgaataaataatcgtgcttttatcagctttgttcacagtgtgaacaattaaccatgttggaattccgataagaaccgatactataagtagtgaaattattatatccatacaacaacctcctcaaattacgatttgtcctcctgatcatatcacaaaaagcgcccatgccaaaacccggcatgggcgctgcctttactgctttagtttttcagcgcctgcatcggggcggggatgcggccgccgcggtggatcatgaccgcagggctgtactggctgatcggcatgatgggcgcgtgacccagcagcccgccgaagtccagcacatcgccggccttgtggccgatggcggggataacgcgcaccgccgtcgtcttgctgttcaccatgccgatggcggcctcatccgcaatcaggccgctgatgacctcggcgctcgtatcgccggggatgaccaccatgtcgataccgaccgagcagaccgctgtcatggcctccagcttttccagcgtcaggctgccgcagttggcggcgttgatcatgccgtcatcctccgacacggggatgaacgcgccggacaggccgcccacatggttggacgccatgacgccgccctttttgacagcatcgttcagcagggccagacaggccgtggtgccgcagcagccgcagctttccaagcccatctcctccagaatgttcgcaacgctgtcaccgatggcgggcgtgggtgccagcgacaggtcgatgatacccgccggaacgcccagccgctcgctggaaaggtttgccaccagctggcccagacgggtgatcttgaaggcggtgcgcttgaccagctcagccacctcgtccatcggggcgtccttcggcagcttggccagcgcggcgcgcacggcacccgggccggaaacgccgacatggatctcgcagtccggctcgcccgcgccgtggaacgcacccgccataaacgggttgtcctcgggcgcattgcaaaagacgaccagcttggcatcgcccatgcacatgttgtccttcgtcagctcggcggtctcgcgcacgacctcgcccatcaagcgtactgcatccatattgatgccggacttggtggagccaatattgacgctggagcatacaatatcggtctcggccagcgcgcgggggatcgcggcgatcagccgcttgtcgcccgcggaaaagcccttatgtaccagcgcaccaaagccgccgatgaagttgacccccacagccttggctgcgcggtccagcgttttggcgtactgcacagggtcggcatcgggcgcagcgcccagcagcatggcaatgggcgttacgctgatgcgcttgttgacgatgggaatgccgtactcctcgctgatgccgttcacaacagggacgagattgcccgcgaggcgggtaatcttgttgtagatcttctcgcacgccttgtcagggtccgggtcgatgcagtccagcaggctgatgcccatcgtgacggtgcggacatcgagattctcagcggtgagcatctcgatcgtttccataatgtcgcggctgttgatgatcctcatagcgcagcccccttaaatcgtgtgcatggcgtcaaagacttcctgacgggtcacggtgacctgcatacccatctccttgcccagcgcggtaaagcggtcgcgcacagcggcggcctcggcagtggccttgctcaggtccaccagcatgatcatgcagaacatatcctgcatgatggactgggagacatcctcgatgttgatgttcagctcggcgcagaccgcgctgactttggcaacgacacccacggtgtcccgcccgataacggtgataacagctttcataatatgaccccctcataacactgtccggcagggatgcagggggcggcgtcctcgacgccccgccccatgttcagccggatcagaattattataacaaagtttgcggtaggagtaaagaatataacgggaagtaatactttttcgaacggacgaacagccaataagctgccgctttgtaggggccgcacatgtgcggcccgcaactgtacggcggacgaccgcttgcctttcacgcgcgggccgggcatgcccggcccctacagggcgtcggaaatgtcaaaactccgccgaatgttccccggcgcgtacatcgtcccgctgcagctcggccagcagctcgtcctcgccgccctgcaaaagcagcttttggctgtactgctcaaagcgctcgcagtcgttctcggccaaaaacggggccgagtcggggccaagggccagctcgttgacaaagacgaccatctcctgcccgtcctcaaacgcctgctccataaagtcaaaggcaaattccagcgcgttcgcggcggcggaagccgcctcctcgcggcgctgtacctgactgttgaaggcgctgcgcactgtgtcgaacgcatcgtccgggtccagcccgttgtcaagctggcggccccacgctgtcagcagggcaacggtgcgggtgcgggccgcggcctcatcgggcagcaggctgccggcactcttgtcggcctccagccgctcgcggtagcggtcgcgctgctcggcaaacaggtcggcggggtccgccccggtctgctggcccagcgcccgcttaaagctgcgcagctgctggtagcaggcgtccgtcacagcgccggcggcgcgtgcggcggcaaagcgggtgttcagccccgccagcagcaggcttaccagactgatgcgctcatcgaagccggcgtccatcgcgcgggcaaccacggcgtcaaacggcttgccctgcagaatatcctcgacaccgtagtcctgatgatacttgcggtacagcacccagtaggcggcaaaatcccgcgatacatcggggtggcgcaggtattgggcaatcacgccctcgtccacgggcagccccagcgtgtcggctgcctgcagataggcagacagatcctcccagccgcgcgcggtcacgaactgcacgccgtccacatcggtctcgatcttgtaaaagtgctgggggcgcagctccagataggcggtcacggcggggtgcagccggtgggcgcgggcatagtcctgccagacgctcagcttcggctcaatgtcgatgcgccgcacacggtcgagcgttacaaggtcaaactcccgcacgctcttgttgtactccggcgggttgccggcggccacgatgacccacccttccggcacggcctgattgccgaaggtcttgcactgcaggaactgcagcatcgtgggggccagcgtctcgctgacgcagttgatctcatcaataaacaggatgccgtgctgcttgctggtgcgctccatcgcagcgtacacgctggcaatgatctcactcatcgtgtactcggtcacgctgcgggtcttgccgccgaaattccgctcccggataaagggcaggccgacagcgctctgccgcgtgtggtgggtgatggtgtaggccaccagtgcaatatcgcactcctgcgcgatctgctccatgatctgggtcttgccgacacccggcgggcccatcagcagtatggggcgctgccgcacgggcggtatcagcgggcggccggtgtcatccgctgccagatacgcctgcacggcgcgtttgatttcctctttggcgcgttgaatatccatagctcatcgtcctttcgggtcggtgtcgggggtaaactcctccggctgcaaaatcaggcgcatggcccaggggggcacatcgggcggcggggtgccgtcctccaaaaacagaaaagcaacctcaaacggcgggcgcttggccgggtagatgcccttgccgtcggtaaaataaagcacgccctgcaggtcacgcagcgacccctcgcggcgcagcgcggcaatgcgggcaaacgcggggcggaagtccgttccgccgccgcccaccagcgtgaaccgggcagtgtagcggtccagcgcgtccagatcggtgagccatgtttcctcgcgcacggcgttgtcggcctgcatgacaaggatgcggcatttgcggaaaaagctgtcctgactggtcagcagggcaaaggtctctttcaggaaggactttaccagctcaccggctgtggactcgctggtgtccacaacaatgacgaagtcgcgtatcttttttacttcgcggctttccagcggctcaatcagcggcagtttgccgtaggtgcgcaggccgtagctgtaaaagccaaggtcaaactcatcggggtcaaggtgcggctcctcatgccagacggcgaaccggcgcaaaaaatccttgtaggtgcggcggctgcgcccggcctgcagctgtgcctgcagtgcctgggcggtggtgtcctgcccggcgcggcggccgttttcgtccatgcttagctctgtctggcggcccagatcctcccactgtttgccctgcatctgggcggcggggctgtcagggtcggcaggccacaggcggtggctgtcggtataaaattcccgctgccatttgttcagggtgtcggcatcggtttttgccagcgcgcggtagatcggcccggcggccaaaaaccggcattgcgcgcgcagctgcgcatagcactgctgccgcacccagccgatggggcgctttgcggcgggggtgttcagggcgtccagcgtgctttccaccgcaatatcgcaggcaaggccccacaggtcggggtcgcgcttatcccgcagccagagatggcggaagatgcagtggaacaggctgtgcaggtaggcgcgcggcagataccgccggtttttgcggtaggtgtccagcagccatgcggtggggtagtacagccgcccgccgtccgtggcaaagctgccgccgccctgctgcggggcagggggcagcgcacccagcgccgcagtcaggtagcgctggtccagatacagctcaccgcgcagctgttccatcacccgccgcgccatggtctgctcccactcggtctgggtctggatatgcttggacattaagacaccttccttcatgatggctgtattgtaggggccgggcatgccccctctgcggcggccagagggctggccgccctacgaccccacatcaaatccgtgcgtagggcggggtgccctcaccccgccgaaacttaccgccaaatcccgtttccccatcgccgccctgtaggggccgggcatgcccggcccgcgggcttgcggcggctgcccttttattggtggatttgtaggggagggattcatccctcccgggtcgtcggggacgccgacccctacatctgccccgggaaatcgcgccttacaaatcctcaaaatcataggtctttttgacctttttggcgcggcccaacaaaatcgcggccccggcgctccaaccggcgcgggcgcagtaggcggcggcctcggcggtgggcagccctaagccgaccagcagccgcagggcggcctcgtcccgggtgtcgatggcaaggcggaacgccgccgccgggtgggcacgcaggtaaaattcatagtcggcgcgggcctgcccgcccagcgcaaacggcagcaccagccgccccagcgccagccggcagagcgcaccctcgccctcgccgacacaggcctgcgcaaaggacgcatcgaacgcggcgtagtccaccgcaccggccgctgtaaagcattgccgcatccggtagccctcgccctcaatgctatggttgaagatgtgcgcgggcgtgttctcgtcaagaaattcggaatattcggggtaaaacagccgtgcgccgtcaaattctgcggtgatgtcggcgctgatggcccccagcagctttttcaggccggtgggggcatcgggcgcggcgcgcaggcacagccgcgcaaggctgcggcagttcgtgaacaggtcgctgcccagcccctcgaccccggccccaaggctgaggcggcgcaggcggcggcagttgtaaaatgccgcgctgtgcagggtgcgcaccgtgtcgggcagggtgacctcctccacaaaattgccggtgatctcatgggtgtcggccccgctgcgccgcgccccggccttgaccggcttgtcggcaaagcagtacggcccgatctcggtgacaggcagaccctccacggtttccggcacggcagggcaggggctgtcccccagcacccgcagcacccgggcccccgcagcgcacggctcccatacgatcgacatgaaatcactcctttacagggcattatagcatagaacccccttaaacgcaaaagaaaaaccaccgccgccgcgcaggaattgcggcagcagtggctggcacaaaaaaatcccgccaccgggtaagggtggcggggaaagatggtgcgagtttagggggttggggagccagtgggatcaatatcaacccaaacgtataaagggccggtgctcttttcgactttatagctccccgtgccgcttgcctcactgtcagcagtataggtacaggtataggcgccattatcgtacctcacggtctttatatgggcatcccaagtgatttttgcatcaaaggttgccttcggattggaatcaaacacctctgctaattttttgatttcggtgatgcgtattccttcttttcctgtatttcccccatagtctggataggtaaaccagttatcccgatgatcatcagccaaattattaaaactgccataggtttcggacgccaccgtctggacagccataacgaccatgcgggtctcggcaacaatctttttctcttttgccttgtcgatgtaccctgtcagcgccgggaccagcagggcggccagtatggccagaatgaccaataccacaatcagttcaacaagcgtaaagcctttgtttttgtgcttcatttaccgggcctttcttatgcttttgcaaaggaatctgcggtgcagaatgttattttattaactataccgtaaacaggtataattgtcaagatagcttggcatggtgaggacacctttccatgggaataaaaaaagcccgatgcagggcatcgggcgagaaaatagaattgtattctttaagacacagaataagtattggtgctggagctgtaagtgcaggtatatgtgacaccggaaacagtatgagtgtaagtgagcgtattgattttgccgacaccctcgctaccatcagcctgttttacggtaatatcagtaacttcacccggaacttctgctaattctttgacagcagctttgtcaatgtctgcagcggtaatgccggtagtggtagtagtagtaccatacttctcggaggcaatcgtctgtgcagccatgacgcactgacgggtttctgcaacgatggactgcttacgagccttatcaatgtacccagtcagggccgggaccagcagggcggccagaatggccagaatgaccagaacaacaatcagctccaccagcgtgaagcccttcttgttcttgaggttacgaattttctcgaacataataaatcctccacaattcatttttgggggcactccacccctcattgtcttatttctagtttaccacggtatttatttttttcaatcgctgcggcaaaacaatgcaaaaaatgcacgaaatttgccgcaaccctacagcattgttgggcgaaataacaagttgcgacaccgcacaacgctgtgccgttgcttttttgtaaaagagcgccccggcgcggctgaattttcgcataaaatcgcatgtatattgcctgaattgttgcaaattcacacaaaaccgtgccccggcgctgcgcggcggctggctgaaacgctgcaaggcagcgaagggactggagtaaacataacagccgacctctttgcgaggtcggctcagtttgtagaaaaagcccttttttgggtagaaatgtagggatgggtcttgacccatccgcaccgctggccgcgcgcaacgcataaaatcgcgccgaacggcgcgccatttcccgatatatcgtactattggctagactgcacggaacggtcaagaccgttccctacaaacccgccgaaagttcgcaatcgtcccgttaggtttatcgacagcctgtttgctatgcgccgcgctcggtctgcagcgtttggataaactgtaccgggtcgataatggagttgccatccgtgccggtggcggcggtggaaagcaaataccgcatgatctcatcgccggtcagggtggggtccacctgccagcccatggccattaccccggcgcagtaggggatgccccagctcaggccgccttgtccgtagtgggtgtagccgaactgcccggcggtgtattcctcggctgttgtgcggtaagagcaggggagagcaagtgcattttttgcaaacaccgaggaaccgtcctcgctaggaaagccgacccgacaggcggctgggtcatcccgggcgtttgggtcaaggacagcaggatagggcataaggcggtctggttttgtgcctgcgccctctacggtcaaaaccagaaccccggcttcttcggcacgggcggctgcggcgttccagaggtcggtgttctggaacatatcggcggaaccgggcgcagccgaaacggaaacgacccgaatcttctcaccttcgggcagcgcctcgttttgctccagcacccaatccagtgcatccgcggcatagcggctgtctttcagccatgaaggccaggccgcatagtaaatgttggcatccggcgccacgccgatggttttgcccgccagcaggctggctaccgccgggccgtgcatcgaggcggtctccccctcgcagccggtatcgtagtaagcggcgatgcggtcggcaaattcggggtggtcggtcagcagcggctggtccagaatggcgacgttcacgcccctgccggtgatgccgcgcgcctgcaagctgcgcacacccagaccggggtctttgcacgcctccagcaatgcggcggcttcgtcctcggcccccgcaaagacggtgccggtgttgtaggtataggtgtacaggtcagaggcgttgtattcgtctggctgataggtctgcttggcatagtcatccagccagggcagataacgcaggtcgctgtacggctcaacggaaacggcaggctcagaaatttcaggcgcgttttcgtcaggcagcgcagtgggcgccggtgcggcaggggatgcggcgggattcaccgccccggcagccccgcaggccgtaaggcccagcgccagcagcccggcagacaaaagcataatgcgtctcatcggaactcctcctttttccggcctgtcaaaaaaaagcccggctgctccgatttttcagggcagaccgggtcttgctatgcgaattaaactttgaagctgtccttcagcgtgacgatgcggttgtagacgcccgcgtgcttgctgtccggcgtaaagtagccgttgcgcacgaactggaagcggtcgccgggcttggcgtccttcaggctctcctccagcttggcaccctgcagcaccttgacgctgtcggggttcagataatccttgaagtcggcgtcatcggggatgccgttcatgttggcctcggtgaacagcttgtcatacagctcggcctcggcctcaatgcagtgggcgcagctgacccagtggatcgtgccgcgcaccttgcggccatcggcggggttgccgttgcgggtctcaaggtcggcctcggcgtggatcgccacgaccttgccgttctcatccttatccacgccggtgcagcggacaagataggcacccatcaggcggacctcgctgccaagcgtcaggcgcttgaacttcggcggcgggacctcaaagaagtcgctgttctcgatccacagctccttggtaaaggccatggggcgggtggtggtatcgttcgcatcgcggttcgggttgttgggcaggtcaaaatactcgcactggtcggcggggtagttgtcgatgatgagcttgacaggctccagcacggccacacggcgctgggcgttcagctccagctcggcgcgcagcacggcctccagctggcgcatgtccacaaggttgtccgccttggagatgccggcgtccttaacgaacttgaagatgctcgtcggcgtgtagccgcggcggcgaaggccggacagggtgggcatacgggggtcgtcccagccgtccacgatgtttttctccaccagctcacgcaggtagcgtttgctcatgacggtgttcgtcacgttcaggcgggcaaattcgcgctgcttcgggaactctttgccgaacaggttggtgatgacccactcgtacaggggacggtggttctcaaattccaggctgcacaggctgaaggtgataccctcgatggcgtcctggatcgggtgtgcgaagtcgtacatcggatagatgcaccacttgtcgccctggcggtgatgcgcaacatgcttgatgcggtagatggtcgggtcgcgcatattcatgttcgggcttgccaggtcgatcttggcgcgcagcgtcttttcgccgtcggcaaactcgcccgcgcgcatacggcggaagaggtcaaggttttcttccggcgtgcggtcgcggtaggggctggggcggctgggcttgccggcgtcgttgccgcggtactcctgcatctgctcgcgggtcaggtcgtccacataggccttgccctccttgatgagctgctcggcgtactcatagcagcgctcaaaataatcgctgccgtagaaaatgccgccgttcggctcggcacccagccacttcaggtcctgcaggatgctctgcacatactcgtcaccctcgcgggcagggttcgtgtcgtcaaaccgcaggttgaacaggccgccgtagtgcttggcgattgtgtagttgatgaagatcgccttggcggagccgatatgcaggtagccgttcggctccggcgggaaacgggtatgcacaacatcgaccttgccctcggcgaggtcggcgtcgataatatccgtcaaaaagttggaaaatttctcttctgccatgattacaccccaaaaattgtaagcgacccccgcagacggcggcgctttttatttattttcctattatacaatgccgtttcctatttagcaagagccaaaaacttgctctcacctactgttatttataaaagctttgtgctataatcaatactgatttacaatgcccagggggacggctgtccctactacaagccttaacaaggaaagggggcatccctatgccgaccccgaatgaccgcggaccgcgccgtccgcgcacgaatacaagctatcacatggagggggactgggccgtccccgaccgggagcaggcagcgtcgccaccgcagcgccgcacccccacgcaggagcagcgccgggccgccgcccgcagccgcagagagctgcgccgcagacgccgccgccttgcctttgcggggacggtgtgcggtatccttgtgctgtccggtgtcatcacggcggtgctgcccaagagcgccaagggggagccggagacccccgccgccacggcggagccgagcagcacccggctggtggcccccgtgccctacggcggcgcaggggagagcagcgccgcggccccggcattgaactggggcagcgtaggcccgcagcgccagacggcggacggcggctacacctacacggcgctgccgcaaaagccggccgccctgccggagtttggccgggtggataccagctggtttgcggacgctgcatttttgggcgattcgctgacagcgggcttctgcgtcaatgagtacaatattgatgtgggcggcgcgctcgtctgcgggtatgagggcatcagccccaacaccatcgtcaaccgcacgaccgtctcaagccccgaccgcggcgaggaggtcccgctggatgtgctgaccgccgcccagcccgccaagctgtatatcctcatcggcaccaacgcgctggtccagcccggcaacgatgacagctttctggcctactacggcaaaatgctggacgagctgcgcacggcgctgcccaacacggtattctatgtgcagtcagtcctgtccgctacgcaggagaaggtcagcgacacgctgcccggccttgcgcctgaccggctggcggtcatcaacgcggccatccagcagctttgcgccgagcgcggctgctattaccttgacctgaacgccgagtttgccgatgctgcaggctgcctgatgacagactttgcccagcctgacggcgtacaccttacagtgtcgggctacagtcggtgggtcagctacctctgcacccatctgccctacagcaaaaacaatccctatcaggccggcagcacctactatctgagcgaggatatgaaaaacctgctggcagacatcccgtaatgcacaggcgataggatcgccgaaggagccatccatgcccaaccaaaacgaacgacccaagtacacggacccggagcatccctactccggcagcggcccgcgctaccagaacaactacagccgcagtgaataccacgccggggacggcccgttccagttcccgtggtgggctattgtcatcggctttgtggtatggtggccgctgggattcatcttcatcgggctgaataccgccatgaagaacggcaagctcggcggctttgcagaaaaggcccgggtgcgcacacagggctttggccgtgtcaacacaacgccggtctatgatgccgaggtgcgccccctcaacggcagcgccgaccccggcgcgcagccggccgcaaaaaggctgaagggcgcggcgctggccaccggcctgacggtggcgggcgtgctgctgcttctctgcgcgctggcggcgctgcccagcgccatctactggctgcccgaggccctgacggagggcggcagctattggagatggctggtcgaggattcgatgccgatgctgatgtcgctgaccggcggcatcggctgcctgttcggcggctgccacatccgcacctcccgccggatgcgccgtaagatcgacaagatcgtcggcgatgcaaaatatatgtacattcaggacattgccgatgcgctgccctgcagctatgacaagtgctgcaagcatctggaaagctgcattgacgagggactgttcggccccgatgcctatctggacatgcgctgcaaatgtctggtggtcagccagcgcccgcccgagccaacgcctgcccccgccccgaagcccgaaaagcagcctgaaaagcagaccgatatgcccgagcgggaccagtacaagaagatattggacgagctgcgccgggtcaacgatgccatccccgatgaggagatgagcgacaagatcagccggctggaagcggtctcggccaaaatttttgagcaggccaagtccgaccccgacaagctgccccagatgcgcaagttcatggattactacctgcccacctcgctcaagttgttgaacacctacgccgagctggataatcagggcgtggaaggtgagaacatttcggagtcaaagcgccgcattgagcagacgatggacacgctggtcaaggcgtttgagaaccagcttgaccgcctgtttgccagcgatgcgctggatgtcagcaccgacattgatgtcatgcagaacatgctgcgcgccgacggcctgacgggagatacgccgtttaagttgtaatgttaaggagccaattaccccatgtcgaaatccactcagggtcagctgcataacagctggcacaatttctcgaaataccgcccgctcatccgcgagctggtgacccgtgacctcaaggtcaaataccgccgcagcgtgctgggctatgtgtggagcatcctaaacccgctgcttatgatgctgctgcagacgcttgtgttctcctatatgttccggttcgacatcccgaacttcccgctgtacctgatctgcggcaataccctgttcaacttttttaacgaaagcaccaacatgggcatgggcagcgtgctgggtaatgcgtccctgatcaaaaaggtgtacattcccaagttcatcttccccatcagccgcgttatgtccagctttgtcaacctgctgttcagccttgcggcgatcgtgctggtcatggtgatcacccgctcgccgttttactggacgatcctgctcgtctgggcgccgcttttgctgctgctggtgttctgcgccggcatggcggtgctgctcagtgcgctggcggtctacttccgggatctgcaatacctgtacggcatcctgacaatggcatggatgtacgccacgccgctgttttatcccatctcggcgctgccgccgttcatggtgccggtcatcaagctcaacccgctgtaccattatatcaactgcatgcggtgcctcgtcatgtacggcacggtgcccggccccaacacatggtttgcctgcatcggcagtgcgctcgtcatgatgggcgtggggcttgcggccttccgcaagctgcagcgcaattttattctgtatctgtaaggagtttcccccatgtccatcattcaggtggaggatgtctcgatgcgctttaaccttgcgcaggagaaaaccgagaccctcaaggaatatgccgtcaagctgatgaagcatcagctctttttcaatgagttttatgcgctgcagaatgtctcgttccgcgtggagccgggcgagtcggtggcgcttatcggccgcaacggcagcggcaaaagcacgatgctcaagctgattgcgggcgttatgtaccccacgaccggctcagtcaccgtcaacggtgagatcgcgccgcttatcgagctgggcgcgggctttgatctggacctgaccgcgcgggaaaatgtctttttgaacggcgcggtgctgggccatgaccgcgcctatatgcaggagcatttcaacagcatcatcgactttgccgagctgtgggattttgtcgatgtgccggtcaaaaactattccagcggcatgatcgcgcgccttggctttgccgttgcgaccgaggttaaggccgacatccttgtctgtgatgagattttgtcggtcggcgactttatgttccagcacaaatgccatgagcggatggagcagatgctttccggcggtacaacgctgctttttgtgagccacagcatcgagcaggtcaagcagctctgcaagcgcgccatctggatcgaccacggccgcatccgcggcgacggcccggcggcggaggtctgcgatgcctatgtggcagcgatggagcggggagagtaaaggcttcccccaagggggaagctgtccgcgaagcggactgatgaggggcaagctttccgcggcaactcgttaccgggcaacagcggcacagccgcccctcatccgtctgtggtcgggaccacagacaccttcagtctacgcgctaagagccgcctacggcggttgcgctccgacacgcgcctgcgggcgcagccccgagggggaaggcatcccagcccaagtaagcaacacaaaggagaccccatgctgacaaaaaaacaaaacattctgcgggaaattctgaccgtcgcgctgctgctggcggcggtggccctgagtgaatactggttcttccagctgtggcgtctggactggcacgcaccgatgctttacggcggcgacggcatctactgggtcgggcaggtgcagcgcagctatggtgagctgaccggctcgctcggctggccgttctatgaggtcgcgggtaagtataacccgaactacgacctgatctacgacatctttgtctggtttgtcggcctgttcacaaaggacaccggcacggtgttcaacctctatgtgctggtcatcccctttgccaacgcgctggcggcctatgcggtgttccggatggtggggctgcggcggtggctcagcttcgcgttcggcctaaccttcggcatgacgccctatgtgcagcagcggatggcgggccatatgatgctggccgcctgcgagttcgtgccgttctcagtgctgctctgcctctggtgtgccgaggaccccgccttcaaccgcccgggcaggggctttttcaggaacaagcgcaactggctggcgctggccatggcgtggggcattgccaacaacggcgcggcctactacccgtatttcacctgctttttcctctgcgtcacggcgctctgcctgatgctgcgggaacgcagctggcgcgtgggcctgccctgccttgtgacgatcgccgagatcgtcggctggatgatccccgacttcttcccgatggtgctgggcatcctcaacgggcagggcagcacgctgaccaacggcgtctaccgcagcccggtcggcgcggacatctacagcctgcgcatcagctcgctgctgctctcccccaacgggtacggcgtgcagaagcttgcaaactggctggggcgttacttccgtatcctgaccactgatgaaggccccatgtacaacgagaatgcctacggctacctcggcattgtgggggtgctgggctttctggcgctgctcgttctgctgctgcgcaactgggactggcaggccggcaaaaccgggacgccgcgccttggcgaccgtctttggctgctgagccgcctgaatgtcatggcgctgctgctggcgaccattgcgggtttcggcggcatcatcggcatccttgtgcggttcatccgcggctataaccgcatcagcccctatattgcgttttttgcgctgctggccgtgggcctgacggcggaaaagctgctgacgcagtttaccggccgccgccgcggggcgctgctggcggcagcggtgctgctgctgggctacggctattgggagcagcaggggcttttcaccccggattacgaaaaggtccagcagatctggtatcaggacgctgcctttatggcggaggtcgaggacgcagcgggggagggcgcgatgctctttacgctgccgtatatgaaaaattttgagaacggctcgctcaacaatatgtgggactacacgctgctgcgcggcccgctgcacagcaggaccctcaaatttacctacggtgcgggctacggcacccaaaatgatctctggtacaaggagaccagcgcgctcgagcctgaggcaatggttgccgaactgcgcgcacagggcatgaccggcatctatctggatctggacggctatgccgtggaggatcagcaggccacgctggcggggctgaccgccgccgcaggctgcgagccgggcgatgtcatcacaagtgagagcgggatgctctgctacatcccgctcgggcaggagtgacggatgaaactgcaaaaactgacggaaaagcgatggttctggcctgccctctgcgcggtgtcggtcgtgttcggctggtggtatctcagcatcacgacctgcgctccgctcggcggcgatgatgagctgatcaacctgcagaactactactatattacccatacctcctttgggcagagcgtgctggattacctcggcgatctgtgggtgcagttcacgctgcagaacggacggttccggccgttctcctcgccgccggtgcgcgggctgacaagctggtttctgggggatctggtcggctaccgcctgtacattctggcgtggacctacgcggacattgtgctgaccgcatggctggtcggcaaggcgtcccgcagcaaaaagctgggcattgcctgcctctgcctgctgccgatgatgttcagcgtctggcaggactctacgggcaacagcctgtattcttacggtgcgctggtgcaaagcacgctgctgcccgcccttgtggcagggctggccgtgctgcgctggcaggacaccgggcacaagcggtgggccgtgctggcagggtactgcgccttccagtgctgtgccacctttgagatcggctttacctatatcgtgccgatcttcggccttgcgtggctctacaccgataaagtcaaaccggcgctgcggctggcggtgccggtgttcctcggcgagtgtgtgacgctggccttcaacatgggggcgcggcttgccaacacgctgcgggccgcgggcatccttgcgggcgatgtgcagggcatcgacggcatatcgccgaactttgatattcccgcgctgctgcgcacatggctgatgcagatgtcggcgggcttcccgctcaacgcgatgctggcgggccgggtccgcccgggcagcatccatccggcggatgtcctctgcggcgttatggtcgcaggggccgctgtggccgcactggccgcactggatacgctgccgaacaaaaagcagaaccttttgctgttccttaccggccttgccatgctctccgccccggcgctgctgatcggactttcgcccaaatatcagcagcccggtcaggtggactggcggcacggctacatcccccagacggtcgaaagctacggcgtcggcctgatggcgctggcggtgctggttgcgctgctgcgctgggcgcgcggcaaggcatggtggccaaagcgccgcaccgtgctgtatgctttgctggctgtctgcatggcgggctcggtcgtctggcagcgcgccgcgacccgctcggcctacgccgagggtggccgcgcctacacggtgtttggcgagggtgtcgccgctggtctggctgatgccgccggcaccgacacgccggtcgtgaccgatttcatgatctggggcggccatcctgtggcggaaaacgccttcttcctgcggtatcacgatcaggacgccaacgcccacgcgctgcaggtctggcgcaccgaggagcacgccgacgatgaggcggtctaccggctgggcttcacgctggggcaggacaagcactacgacattgcgtggtgcggtctgggccatggcgcaaaccccgatgcgctgaccgatgtgacggtctgcctgcccgccggtacagcgcagtatgccgtgctgtactacacaacagcggacggtgagcagaagcgcaccgaggtctacaccgacaaggaagccacgctgctcacgctgaccggcgagacgatccttgccgacagcatccggctggaataaaacagggaggtgccgcccttggcacaaaacaaaaaaaatcggctgctctggttcctatgccttgcggcgctggcggtgttcggcgcggcgatggtctggctgcattaccaacagatgtgcagccccggcggcggcgatgacccgtacacctccgatctggggcagcatctgtactttgcgcagcagggcatgatctactccaccgtgtcgctgctcatcggcccggcctacaatgtcgccgggcgtatcggcattgccgtgctgttggcggtgttccatctggcggcggtcgcggtgtttgcgtgggggctgcgggcggccctgccggaaagtacccgcccggtgcggctgcttgtcagccttgcggtaaatctggccacggcggtctggatgccccggggcggctactggtatcagggcacggtgggcggtacgatctaccacaatacgacctacattatgctggccccctttgcgctgctgacgatgctggcgttttaccgcgtctggcccacggtgcgcggccggctggatctgcgcagctatgcggtgtacaccgtgctgctgacggtggccaccagctttaaggccaacctgatctttgcatttgccccggcgctgctggtgcttttgattgaggattttgtgcgcagccgtgctaaaaatctgaaaaacgagatccttatgggctgcagcgttttccccggcgtagcgctctgctttgtgcaggcaagggtgctgtttgcggcggaggattccggcatccggcttattttcacggtgccgtttgaccatcaccgtatgctgtggggccccttcaacgaggccggtgtgctggggctggcccgctccttcgtctttgcggcggctgtggggctgctgctgggccgtgcggcgtggaaaagcttccgctaccggttcagcctgttcacctttggggtttcgatggccgaggccctgctgctggtcgagagcggcgagcggctctaccacgccaatctctggtgggggccgttcatctgcttctgggcattctggctggaatcggtcagcgttttccttgcgcagtgccgcgccaaagcaccgcggtggcggctggccctctgcgggctggcgctggtctggcatctggcaagcggcatctgcttccttgtcatgctgctgtgcggcgtgtcctacaatgtgccgatcctgacctataatttgtggtaagaaaagagcatgccgctgcggcatgctcttttgcgtataggcggttcggctggttattccccaaaatcctcggcggcttttttcatcattttgcggatcggcaggttgtacgggcagcgcggctcacaggcgccgcactggatgcaggcccctgccttggtctgcagggtggcgtaccgctcgcggccccactgctgcaggccgtaccggtttaagtacccctgaaacagaaagacgctggggatcgagatgcccaccgtgcagggggcgcagtagttgcagcggcggcagaactgggtgcccagcgcgtcgcggacggcctggcaggcggcctcctccccggcggtaagcggggcaatgttggccgcgcccgctgcattgttttccaactcctccaccgttgccatgcccgggatggcaactgtcaccgccgggttggacagcacataccgcagcgccagacggccgtcctcgatcgcaccgccggccagcggcttcatatcaataaatgccttgcccgccgcggcgcagcggtcgatgagcgccttgccctgctgctccacgatgttgtaggggaacatgatcgtctcgatctcgggaatatccagtgcggcctcaaacaccgccgccagatgcgccgtgatgccgatgtgcccgacaacgccgcgcgcctttgcctccagcagggcctccatcgcgccgccgggcgcaaggatggtcttgagcccctccatgctggggttgtggaactggaacacctcgatgtggtcggtgcgcaggttcttcaggctggtggcaagctcggcctccatgtcggcctttgtcagggcgcggcattttgtggcaaggataaagtcatcccgcaggccggcctcctcgagggactggccgatccacgcctcactgactgtgtaggcgcgcgctgtgtcgatgtaattgacgccggccttgtgggcagcaatcagcagctcccgcgtgccgggctggtcgatgcgctggatcgggatgccgccaaaccccagacgagaaattttcaggccggtctgaccaaagttgacatattgcatagtgtgctccttttgctctgctgcggggcgtcaaggacgccgccctctacaaattgtccgttacccacattatagcaaatccaccgtaaaaatccagcccaaagccttccccggagggggaaggtggccccgcagggccggatgaggggcgcgtttggccactattgcccggtcaaagggtcgctgcggcaggctctcccctcatcagaccgcttcgcggccagcttctcccccaagggagaagccttttttccgttgacaaaacggccccgctgtactaccattaaactgtataaaataaggtatagggggtttaccaatgaaatacggttttatcggctgcggcaatatgggaagtgccgtggcgcgcgcagtctgcaagggcgccggggcaggggatgtgctgctggccaaccgcacgcccgccaaggcggagaagctggccggtgagctgggctgcgccttcggcacgaatgagcaggttgcgggcatctgcgactttatctttctgggcgtcaagccccagatgatggccgacatgctggacgagctttctgccacgctggagtcccgcgccgagagccgcccctttgtgctggtcacgatggcggccggtctctcgatgcagcagatccggatgatggcgggcagcggctatccgatcatccgcatgatgcccaacacccccgtagcgctgggcgagggcatgatccagtactgctccgatgatgtggagcctgaaaaaatggctgagtggcttgccgcaatggcccccgccggccgtctggacgccgtgcccgagagcatgatggacgcggccagcgccgtgtccggctgcggccccgcgtgggcgtaccagtttatcgaggcactggctgacggcggcgtggctgccggcctgccccgcgccaaggcgcaggagtatgccgcccagatgctgctgggcagcgcccgcatggtgctggagaccggcaagcaccccggtgagctgaaggacgccgtctgcagccccggcggctcgaccattcagggcgtgcgcctgctggaggagcgcgccttccgcggggctgtcacggatgccgtgctggccgcctatgagaaaacaaaggatctgggaaagaaataaggcagtaggaaaagagaaaatttatgcgtattgtcgttaaagtgggcacaagcacgctggcacacaccggcgggctgctcaacatccgccataccgaggatcttgtcaaggtgtggagcgatattcagaacgccggtcaccagctgatcgtggtatcctcggcggcgaccgggctgggtgtcggcaagctgcagatcgaaaagccgtccgacatcacgaccaagcaggcggcggccgccgtgggccagtgcgagctgatgtacacctatgaccggctgttcggccagtacaaccataccgtggcccagatgctgctgacatgggaggattttgaccatgagcagcgccgccgcaacctgcagaacacgctggagcggctgctgcagctgcgtgccatccccatcatcaacgaaaatgacccggtcgcctgcgaggaatactctctgggtgacaatgacacgctggctgcgctggtggccacctgcatccacgccgatctggtcgtgctgctgtccgacattgacgggctgtacaccgccgacccgcacacccaccccgaggccgagctgatcccggtggtcgaggagatcacgccggagatcgagctgctggcgggcggcgcaggctcctcgctgggcaccggcggtatgctgacaaaggtcacggccgccaagcgtgcgaccgctgcgggcgtggatatgatcatcaccaacggcgcccacgccgaggtgctctacgatattgtggagggcaagcccgtgggcacccgctttgtgggccgtaaagcataagggaggtctgaccccatgactacacaggaaattctacaggctgcgcaggcagcccgtatgccgctggcgctggccgataccgacacaaaaaatgctgcgctggaggcgatggcggtcgcgctgatcgccgcatcggacacgattctggcagccaaccggcaggatgtagaaaacgcccggggccgggtcagtgatgtgatgctggaccgtctggccctgacccgcagccgcctgaccgacatggccaagggcatgcgggaggtcgcggcgctgccggacccggtgggcgatgtgctgcgcaaaattgtgcgccccaacggccttgtcattgaaaagaccgctgtgccgatgggggtcattgccatcatctatgagagccgccccaatgtcaccagcgatgccgccgcgcttgccctcaaggcaggcagcgcctgcgtgctgcgctgtggccgcgatgcctgggccagctgccacgccattgtggaggcactgcgcgcggggctgcgcaaggcccgcctgccggagtgcgccgtgagcctgattgaagatacatcccacgccagtgccaacgagctgatgaccgccgacgggctggtggatctgttgatcccccgcggcggcgccgggctgatccgcgcctgtgtcgagaacgccaccgtgccctgcatccagaccggcaccggcatctgccatgtctatgtggacaaggccgctgaccttgcgatggcggtcaatattgtagagaacgccaagacgagccgccccagcgtctgcaacgccgaggaggcgctgctggtacaccgggatgtggcggctgaatttctgccgatggttgcgcagcgccttgtcgcggaccgcattgcggcggggctgaccccggtggagctgcatctggacgcgcaggccgctgccatcattgacggcgtacccgctgcggccaaggattttgacaccgagtatctcgactacaagctgagcgtggcggtcgtggaggatgtcgatgcagcgatcgcccacattgccagacactccacccatcacagcgaggctatcatcacggccgatgccgccgcagcccagcggttcacggcctgtgtggacagcgcggcggtctatgtcaacgccagcacccgctttaccgacggcggagagttcggcctcggctgcgagatgggcatcagcacccagaagctccacgcccgcggccccatgggtctggcggagctgtgtacctacaagtacatcatccgcggcagcggccagatccgcggcggtgcaagcgccaagatgagctgctatacaaacaaataaggcttcccccttgggggaagctgtcagcggccccgtccgctgactgatgagggtagaccttaccgctgtagtccgttcaccggccgctatggcgggctttgccctcatccggcctcggtcggagcctcggccaccttctcccgagggagaaggcttccataacgtaaaaacacctgcgtccgaaaacgcaggtgcttttattttacccaatgttcatatccacgggcttggagatgccgttgacgcggccggagccggtgtactgccagatgttgtacttgtagctgaagctcagcttgtcgcggtactgggcgatccagatgttgtacttgctgatgttcgcaaaattcaatgcgttgtagaaccagcttgcgtaggagtagacgccggcgctgtagcctgcgccgcggatcgtctcgcagaaggcgaccgcacaggcggtgcgctcagccgcgctcagcgcgttggcacggccgccgctcacgctctcggtgtcgtaatagacgccgagcggcaggctgtagccgctgacaaggctcagcaccatgctggcctcctcgacggcctcctgctcattgacggcctgactgtagaagtagacgccgaccttgagcccggcgctgatggcgccctgaatgttgcggcggtaggtcgaatcctcaaccagtgcgccgctgccgtagccgcggtagccgcagcggatgatggcgaaggtgatgccgtcatttttgacggcgttccagtcgatgctgccttggaatttcgatacatcaatgccgcgcgccgtgcggttcagcgcgccgtccgcaccgaaggtgtagatattgccctgaatgacctgctggccggtgaccggctggtgggtcgcgggatcataatagtaggtaacaccgtctatatcctgccagccggtgtactcatactgggtggtgtcggtgcttgtcacggcaaagccgtacccggccagatccttggcctcaatgtcgctgggccagccggcggtggggtcaacgggggtcggcgctgcggtcggctccggtgtgggggcaacagtcggctccggtgttgaggtcggctccggggtgggggtgatggtcggctccggggtcggttcgggcgtggcagtcggctcattgctcggctccggggtgggctcgggggtgacagtcggttcggtagttgcttcggcggtcggctccggggtcgtttcggcggcgggggtcgcagcagcgccctcgttcaaggcagtgctctcgccgggggcgtcctcgcggtggacccacgccatgcgatggctggcggcgcccagcagtgtgatggaatcccttgcgcctgccgcccaggcggcggtgttgctgtttgcggcgtagcttgtgtcgcgggttgcgccgatgagctccttggtgccgtcccggtagacgggccagtagggggcctcgctgccgttagccagcagcagatgtccgctgctgctcagctttgcggtgtaggtggtcttggtgccgacctccgtccgggcgctgtcggcgtaggtgacggtgtcggtcacctcgttggcgatgggggccgacccggcgttgctgacgccggagtcctcggcgctctcgttgacctgactggcctgaacgatcttctccttgacggcctgcacatcggccttgtagacgaccttctccttgacggtcacggtctgcgcctcaggcattatgtacccctcaatgggctgcaccgccacggtgtagtcaccgggggtcacatcctcggccagcgctgtgccggtctcggtgtccagcgggtagtcggtggcctgacccttggcatcggtcagggtgacggtggcctccacgcccagcagcggggttttgcccggttcttcttccgtgtccggggcggcggtctgtgcgggggcagcctcatcggtgaccggctcgacaaacagcgtcacgccgacatcctgctggatcacgctggtctcaagcgtcagcggcttgtccggctcgggggtcgggcttggcgagggggagggggtcggcgtggccgcagcctcgggcgtggcggtcacaatgggggtcgggctaggctcgggggcggtgaacggcgtaaagcctgcggcaaatgcgcccagaccgatgctggccgcaagcgccactgccgtgccgccggccgccagcttgtacagcggcagccgcacaaaggtgctgccggagaaataccgcatggggttctttttattaaacattcctgttcctcacagtggtcatcgtggtatggccgcatccagcggcgctgtttttggataaaactttacatattgcatcataccatgaaaaatccccccgccgcaagggggcagggagaaaaagctgcacagaaaaacgccgaaattttccacggagaagcggcacgaatgttgaaaatgtgacacgccggaaacatttcttcagtcatattgcggttggggtgccggtcagtcaccagcggttgtgttgggcaaaaattcttcgaccagcaggtccacacaggcaccgtagctgcgcatgcccagcgtctgaccgtagccctgcaaaaaagtggtgtataccttttcgccggtctcgcgcacgggaccctcccactgcttccagtaggcgttgttggcggcaaggtcagcctgggcctcggcgcacaaaaggcggtagctctcagcggcgcgcgccgggtcggccgtgtaaagcgcattggacagatgcagatagccgaacagccacccggaataccggtacgcggccctgccgctggcggtggccgccatcacgccgacaaaatttgcctcctgctcgggcgcgacaccgcgctgatgtgccagctcatgggcaatcgtcactggcagaaagaccgccgggcaatcgacattcagcgtgctttcgccgaccagcgggcagaggtagccggtgaagccccacgcgctcatcagcttggagtagacagcaggcttggggcggcgctccggcccggaaagaaagggccagcgctccgtcagcgggtcatacaggccgctgcagccggcaaagatcccggccttgtcagcggcaaacaggccgtttgcgtcccgctcggtcaagggggccgtttcgttgaccttttcggcaaaccagtcggtcacggcggccagtgcctcggcgctgacgggcggtgcggtcataccggccttctcggcaaagccggtgccgtaatactgggtgccccacagggcgcagacccccgcatagccccagaccagcagcacagcgatatgcagtgcccaatcagccagcctgcggcggcgcaccgcccgcaccagcaggaccagcgcgcccaggcagagcaccgtggcccccagctcgcaggcgctgaagggcagcgggtccaccgcaaacgagatgccccgcttgacgggcattgaaacatgcgcaagccaccagtccatggcagtgcggctgctgcgcgccgccgcaaatacccccagcgccgcgccgccgcccaccagcgcggccagcccgccacggtgggcgcggcaccagccagaaagttttttcataaggcaaagcccccgttgttttttgtaccattatacaggcaagcgaaccccgctgtcaaaaaacgcgcattgccgttttgcagagggcggagatatctttttcttgccctattgcccaaaaagcggtataatacaatagaatatttgtaaaaatgtgtccgccgggctgtccggccggactgctatagtatggaggcatttgctatgtctggatttatcccgctttccgtcccgaatttcggcgcgcgcgaggccgaactcgccgggcaggccatcacttccggctgggtatcgaccagcggcggcaaggtcactgagtttgaggaaaagctcgccgcctatgtgggtatgccccgcgccgtggcctgcaacgccggtaccagcgcgctgcatctggcagccatggccgccggcattacccgcggggacgaggtcatcgtcccgacgctgacttttatcgccgccgtcaacccgctgacccgctatgtgggggccgagccgattttcattggctgcgacgacagcctgtgcattgaccccgacgcggtggagaatttctgtgctaaccactgcgagctgcgggacggcaagctgtataacaaaaagaccggcgcacatgtcaaggcgctggaggtcgtgcatgtctttggcaatctggccgacatgccccgcctgatggccattgccgagcgatacggccttattgtgatcgaggacgcgaccgaggccctcggcacccgctgcaccaacggcccctatgcgggccggtttgcaggcaccatcggtgacatcggctgctacagcttcaacggcaacaagatcatcacgaccggcgcgggcggcgcggtggtatccaaccacgccgactgggccgagcatgccaagcacctctccactcaggccaaggccgatatgctgcagttcctgcacgatgaggtcggctataactaccgcatgaccaatgtgcaggccagcctcggcattgcccagctggagcggcttgagggattcatcgcccacaaaaaggcgctgtatgaccgctatgtggcggcgctggacggcgtcaaggggctgcgcatcctgcccttccgggaggaggcatgccgcgccaaccactggttcttcagcctgtatgtgaaggatgccggtcttgaccgcgacaccgtgattgaaaagctgcaggcgcagcagatccagacccgcccggtgtgggcgctcatccatgagcaggccgattacccccgcaacgaggcctacggtctggacaaggcgctggactaccgcaagtatattgtcaacctgccctgctcgaccaatttgagcatggaggactgcgaccgcgtgattgaagcggtgctggggctgctgaaataaggcttcccccgagggggaagctgtccgcgaagcggactgatgagggcaaagcccacgccgcaacccatttccgggcggctgaggcacacttacccctcatccggcgcttgcgcgccaccttccccctcgggggaaggctttactaaatgtcaaagggggaccacccttgatcaaagttgaagaactcttcattgaacctaccgccacggtgctggaaacactgcgcaagctggatgagaccggccagcgcattctgttcatcgcgccggagggcaagctgaaggccgtcatcaccgatggcgacatccgcaagtttttcctgcggggcggcacgcccgaccagaccattgacaacgcggcgaactaccacccgctcagtgtctcggtggcggagcgcggcaaggcgcgcggcatcctgcagaaatactgcattgacgcgctgccggtgctgaataagcgcggcatcatcaccgatattatctttgcccatgggcttgatgtggacaaccgcaagcaggtcgatatccccgttgtcatgatggcgggcggtctgggtacccggctgtacccctataccaagatcctgcccaagccgctgatcccggtgggggagcagcccatcgccgagatgatcatggaccggttccgggatttcggctgccatgattttacgatgatcgtcaactacaaaaaggggatgatcaagtcctatttcaacgagctggaaaaggactaccatgtcgatttcgccgatgaggatgtctttatgggcaccggcggcgggctttgcctgctgaaaggaaaaattggtacaccgttcttttttacaaactgcgacacgctgctggatgtggacttcggcgatatttatgagtatcaccgctcccacggcaaccttgtcacgatgatctgcgccttcaagcactacacggtgccctacggcgtggtcgagctgggcgaggacggcggcatcgccgccatgcgcgaaaagcccgagctggatttcctgacgaacaccggcgtctatgtcgtggaaccccgcgttgttgaggagatgcgcgacggtgagttcatcggcttccccgatgtgatcgagcggtatcgccgcgccggtgagaaggtcggcgtctatcccatcagcgagagcagctggatggatatgggccagctggaggagctggaaaagatgcgccgaaagctggaaaaccagcagtaaataaaagccttcccctttgggggaaggtggcgcgcagcgccggatgaggggcagcctgccggaaggcccccctcatcagtctgctttgcagacagcttctccccaaggggagaagccacagcggaaggagttttaaaatgcctgtaacgatcattgcggaggccggggtcaaccataacggcagccttgagatggccaaggagatggcccgtgtggccaaggcgtgcggcgcggatattgtaaaataccagaccgccgtgccggagctggttgtgagtaagtttgcccaaaaggcagagtaccagaagcagactaccgatgccgccgagagccagttggagatgatccgccggctgcatttctcattcgatgcccaccgggagctgaaggaatactgcgactccatcggcatccagtatctctcggcgccgttcgatctgcccagcgtccggttcctcggcacgctggggctgccgctgctcaagatcccctctggcgagatcacgaacctgccgtatctggaggcaatggccgcgctgaaaacgccggtcctgctctccaccggcatgagcagccttgacgagatcaccgatgcacttggcgtgctggatgacggcggctgccctgaagtcacgatcctgcactgcaacacccaatatcccaccccgtatgaggacgccaacctgaccgcgatgatcgagctgtatgagcagttcggcctgccggtcggcctgtccgatcacacccccgggtgggagtgcgatgtggccgccgccgtgctgggcgcgcaggtcattgaaaagcacttcacgctcgataaatccctgcccggccctgaccagaaggccagcctcgaccccgccgagttcaaggcaatggtcgaggccgtgcgccatgtggaggcggcgctcggggacggccacaagcacctgaccgccagcgaggcccccaacaaggccattgcccgcaagagcatcgtggccgcacggcagattcaggcaggcgaggtctttaccgaggaaaacctcaccaccaagcgccccggtgacggtatctcccccatgcgctggcatgagattttgggccaaaccgcaaaacgcgattttgcggaggatgaaaaaatagagctgtaacggcaagggagagcctatgcgcaccatctgtgttgtcaccgccacgcgggcggaatatggccttctgcgcccggtggtgcagaagatagcagcctccggcacgctggcattgcagcttgtcgtgaccggcgcgcacctctgcccgcgtctgggcgagactgtgcaggagatcgagcgggacggctttcccattgcggcaaggctccccatcttcacggaggacgccggggagcctgttgcaaaaaccatcgcccgcacactgaccgtctttgacgattactttgccgcccaccggcccgatgcggtgctgctgctgggcgaccggtttgaaattttcgccgtggcggcagcggccgcagcgcggcatatcccgatcgcccatatctcgggcggggatgttacgctgggcgcggccgatgaatactatcgccactgcatctccaagatggcggcggtgcattttccgtcctgcgccgacagcgctgcgcggcttgtccgcatgggcgaggcccccggcacggtgttctgcgtaggcgggctgggggatgaaaatatccgcacaatgcccaaaatgagccgccgggaattgtgcgattcgacaggacttcccctgatgcagccctttgcgcttgtgacctaccaccccgagactgcccccgatgcgggcagcccggcggtgcaggtgcaggccctgtgcgcggctatggccgccgtggacggtgtgttctggcttatcaccggctccaacgccgatgcaggcggcgaggtctgcacccgcatgatgcaggatttcgccgctgcccacccggaccgcgccggctttgtgcagagccttggcctcaagcgctatctctctgcgatggagtacgccgcgctggtcgcgggcaattcctcctcgggcgtggtcgaaacgccgaccttccgggtgccgaccgtcaacatcggcaggcggcaggcggggcgcaccgtctgcgccaatgtgctttgctgcgatgctgaccgcgcggccatcgaggctgcgctgcgcaaggcgctgtccaaggcgttcgcccctgtggcggcatcggcgcgcagcccctacaacggcggcaatacaagcgaaaagatctgcacggtgctgcagaattttgactttgcaggacccaagatattctatgacggccctgtgcctgaatttgacccccaaaggagcgttttggtatgaaacttctcatcgttggcttaggcagcatgggcaaacgccgcgcccggctggccaagggcattgatgccgccatacagattgtcggcgttgacacggccgagggccgccgcgccgaggcaaagcagctggcgctggcggacgaggcctacccgtccattgccgaggctgtggccgccgcgcacccggacgccgcgctggtctgcacggcgccgctgtcccacgccgccgtcatcggcgagctgctggacaacggcctgccggtctttaccgagctgaaccttgtccgggacggctacgccgagaatatggccaaggctgccgaaaagcagctgccgctcttcctctcctccaccatgctctaccggcgcgagacgcagtatatcaagcagcaggtcgcagcgttcggcaagccggtgcattatatctatcacatcgggcagtatctgcccgactggcacccgtgggagaactataagaatttctttgtcggcaacgcccgcaccggcggcgtgcgcgagattttcggcattgatctgccctggctgctcgatgccttcggcgatgtggagtcagtcacggtgcagaaggacacgatcagcgatctcggtctgccgtaccccgactgcgtgaccctgctgctgcgccacaagggcggcgcgcagggcgtgctggcggccgatgttgtcagccgcaaggccgtgcgcagctttgagtgcttcggtgacggcatccaccttttctgggagggcaaccccaaggcgctgtatgagttccgcgatggggataagcagccggtggacacctacgccagctttgagcatgacagccgctacagcgacaacattgtggagaacgcctatgtggacgagctgacgaacttcttcgccgtgctgaagggcgaggagcagccccgctggagctttgagaaggacctgaaagcgattgagctgatggacaaaattgaaaattcgtaagtttttttctgtcaaaactgctttttgccttgctgagactgtaggggcgaacattgttcgcccgtccactgtgcggcggctgccgggttcccggagcgatgcaggcatcgccccctgcgcgtaggggcggattccatatccgcccgggcactttgcctttgccgcacacgccctcgggcgaacgatgttcgcccctacagagccccagaaaaatttatgcaatagggggacacctatgcgtaccatcaccgcgctgttcgtggggcttggctccatcgggacgcgccatttgaaaaaccttgccaacctctgcgcagaccggggctggaccctgcaggccgatgcgctgcgcagtgacctgacccgcccgctgcgccccggcgtggcggagctgctgcacgcccagtacaccgacccggccgccgccccggcacactatgatatggtgttcatcacgaaccccaccagcctgcacgccgaagcgctgcggcaggtcaggggccgcggtgcggcgctgtttatcgaaaaaccgatcttctcggctgagcagaccggccttgcgctggacgagctgctgcccgccggccaaaaggcctatgtggcagcgccgatgcggtggtgcggtgccatgctggccctcaaggagctgctgcccgcgctgcacccctactgcgcgcgggtcatctgctcaagctacctgcccgactggcggcccggcgtggactaccgcacggtctacagtgcccgcaaggcgctgggcggcggcgtcaccatcgacctgatccatgagtgggattatctggtcgagcttttcggcgtgccggaaaagctgtacaatttcaaggggacctactccgagctggagatcgactccgacgatctttctgtttacatcgcaaaatatcccacgctgctggcggaggtgcatctggactacttcggccgcggctaccggcgcagcatcgagcttttctgccgggacggcagctatctggccgacttcggcaagggcacgctgaccctgccggacggcacggtgcagcactatgaggaggacgtaaaccgccgctatgagcgggagatggagtattttgtggactatgcgctgaccggctgcggcgaaagctgcaacccgcccgcactggcactgaaggtgctgaaactgactttgggggagaatgtacaatgaatcgtctgctcattaccatttgcggccgtgccggcagcaagggcttcaagaacaaaaacctgaaaaatttctgcggtaagccgttggtctactactcgctcagcgccgcggagcttttcatccaaaagcatcccgagctggaggtggacgtcgccctgaacaccgacagtgaggatctggcccgccttgtcgccgccgagtaccccgaggtcatctacctgccccgcggtgccgagcttggcggcgaccgcgtgccgaaggtcgaggtctacaaggacagctttgcccgcatggaggcccgcaccggcaggcagtatgacgccatgatcgaccttgacatcaccagcccgctgcgcaccgagcaggacattgaaaatgcctttgccaaggcgcagcagcgcgaggatctgcagatcatcttcagtgtctgcgaggcccgccgcaacccatggttcaatatgttcaagatcgttggcgaccacgccgagatggtcatcgaaagccagttcaccggccgccagcaggcacccgaggtctacgatgtcaatgcgtcgatctatgtcatccgccgcgcttttctggtggataaccccgacccgatcctctggcattccaagttcggcgtcagcgtgatgatggacaccggcatcatcgacatcgactcggagcatgactacctgctcatggaggcaatcgcgcagcatctctacgcacattatccggaatttaacgcagtgcgggagaatattcgtggctgaggacatctttgaccgggcgctggagctggtcatggacgcgggccaaacgctgctggaaaacggcggcgaggtgttccgcgcgcagcagacgatggagatcatggccgccagcctcggcgtgcgggacttccatgtctatgttctgaccaacggcatctttgcgtcggcgcacctgccggggcgggatgccgtctcgctggtgcggcatgtgcctaccgtctcggtccatctgggccgtgtcgaggccgtgaatgagatctcgcgcgagctggctgccggccggctcggcgtggccgaggccgagcagcggctggcggaggcccgcacggtgccccgcatcacgccgcgggtcgagacgctggcctgcatcatcggctcggcggggttcgcctaccttttcggcggtacgctggccgatatgccggtggcggccatcggcggcctgctggaatcgctggtctgccggtatttcgcccggcacggcatcaaccggatctttaccgacatcgtggcggcgttctgctgcaccttctgggccgccgccgcacaggcggttttcccccttgtcagcgccaacgcggccatcatcggcgcgcttatggtgctgacccccggcgtcgccctgacgatgggcgtgcgggatattctgaacggcgactatctgtccggctcgatccgcctgctggacgcgctgctcatcgcgggcagccttgcgggcggcgttgtgcttggctggatccttgcgggcggactgggggtggcggcatgatgcctgtctggacgcactatctggcggcctttgtggtggccggtatcgccacgatcggcttcggcatcaccttccagatgccgcggcggcattatctggcctgcggcctgaccggtgcggttggctggatggtctatatcttcggggtcgagcttttcagcatgagccccgccgttgccacgctggtggccaccctgccgctgaccgcctgtgcacggttcttctcggtccggcacaaggccccggtcacgatctttctgctgccgggcatcttcccgctggtgccgggggcgggcatctattacaccgcctactatttcctgcagggcgaggaggtccttttcgccagcaagggcgccgaaaccttcaaggtcgcgctggcgcttgcgctcggcattgcgctggtctgcagcctgcccctgccgggaaaccacgagcccaaaaagtagtcccatgccccgttctgcaaaggacggggtatttttttgcgtgaaaatattgttttttgcaggacaaacgagtataatttaacctgtataactttgtgtaaaatgtgaggaatgagtggtatgctttccgacccccagctgcattatctcgataacgccgccaccacccgggtggacccggccgtggcacaggccatcggcacggccctgacggagctttgggcgaaccccagcagcctgtacgacccggccgtggccgcgcaggacgccatccagacggcccgcgcccgtgttgccaaaacgctgcactgccgcagcgatgagatctactttactgcctgcggcagcgagagcaacaatatggccgtctacggcgcggcccgcccgcgcagggcgtggggcagcaaaattgtcgttaccggctttgagcatcccagcgtgcagcggcccatccgcgccttaaaggacgagggcttcacggtggtggagatcctgcccggcccggacggccgcatcgacacacagaaattcctgcaggagatcgacaaaaataccgtgctggccgcctgcatggccgtcaacaacgagaccggcgcggtgcaggacattgcggctctgggcaagggcgtcaaggcgcgcaacagccgcacccacttccatgtggacgccgtgcaggcgtggctgcgtatgccgatcgacctgcaaaaatggcgcgaggtggacagcctctccgtgtcgggccacaaggtccacgcgcccaagggtgtgggcgcactctttatccgggacagccagcgccagaccctcaagccgccctacatcggcggccatcaggagcgcggcctgcgccccggcaccgagaacacgccctacatcgtggggcttggcatggccgcggcgctggggcagcaaaagctgcgcacccgcatgacccgcattgcggagctgaacgcccggctccgcgcggggctggccgcgctggacggcatcaccctcaactcacccgccgatgcagtgggggagatcgtcaacttctcgaccaactgcatcaacagccagacctttatcaattatctgaacacccgcgcggtctatgtttcgggcggctctgcctgtgataagggcgagccgagccacacgctgctggccatgggctgcagcgatctgaccgtccgcaccgccctgcgcgtcagcctttgcgcggataacaccgccgaggatgtggacgcgctgctggcgggggtaagagatggcttgaaggagctgcagcatatttgaaatagaaaagccttcccccgagggacagactcccccggtacgggggaggtggcgcgtagcgccagaaggggagcaggtggccgcaggccggatgaggggcggccttgccatggcaacccatgaacgggttatataggaaaacccgcccctcatcagccgcctgcgggcggcagcttcagtctccgcgctaagagccgccttcggcggttgcgctccgacacgcgcctgcgggcgcagcccctcgggggaagccaaggatttatatggaaaggaatattcctatgaaagaaatcatcctcgcctatcagggcgaaatgacattgaaggggctgaaccgcgccaagtttgaggcgcggcttgccaagattatccgctggcggcttgagcctctgggcaagttcaaggtctatcaggcgcaaagcaccgttttcatcgagccgaaggaggagggcctcgacatggacgaggcgttccgccgcgtttcccatgtgttcggcatcgtcaagctcagccgtgcggtcgagtgctccaaggattttgacgccatctgcgagactgccgaggcctaccttggcgaggcgctgcgcggcgtgcgcacctttaaggtcgaggccaagcgcgccgacaaggcctacccgatgaaaagccccgagatctgccgcgagctgggcgcctacctgctggataagcaccatcacctgcgggtcgatgtccacaccccccagctggagatcatggtcgagatccgcgaccatgccgcctatgtccacggccccaaggtcgaggctgcaggcggtctgcccgtcggcaccagcggccgcgcgctgaatttgctgtccggcggcatcgacagccccgtggcggcgtggtgcatggcgcggcgcggtctggcgctgcaccacatccactttgccagcccgccctacactagcctgcgtgccaagctgaaggtgcgcgatctggcgcgggaaatcgtggaatacaccggcaactgcacgctgttcgttgttccgtataccaagccgcaggagtatatccgcgaccatgcgcccgatgtgctgttcacggttttgatgcgccgcagcatgctgcgcatcgcaaatcaggtagccaaaaagctcgagctgcaggcgctcatcaccggcgagagtctggcgcaggtggccagccagacgatggcggcgctggcctgcaccgatcaggcgcaggatctgccggtgctgcgcccctgcatcggtatggacaagatcgagatcatcaatatctcccgcaagatcggcacctttgagacatccatcgagccgtatgaggattgctgcacgatctttaccccgccgcaccccaagacgaacccgacgctggacgagatccttgccgccgaggccgccatgcccgatctggcggcgctggaaaccgaggccgccgagaatgttgagaagatctacatccgcatgggagatgacgaactgctgtgactgctgaaattatctgcgtaggaacggagcttttgctgggggacatcgtcaataccaacgcgcagtttttaagccgcgagctggccgagctgggcatcagcgtgctgcaccagcatgtcatcggcgataaccccgcccggctgaaggaactggttttgcaggcgaaaagccgcagcgatctgcttgtcttttcgggcggcctcggccctaccgaggacgatctgaccaaggaaacggtcgccgaggccttcggcgatacgctggcctttgatgagggcgagtggcaaaagatactggattttttcgcccgcaccaatcgccgcccgaccgacaacaaccgcaagcaggctatgtgcccgaccaagggccacaagcttatcaacgaccacggcaccgcgcccggtgcgtggtttgaggatgagcagggccgctgcgccgcactgatgcccggtgtcccgcgcgagatgaaggcaatgtgggccgagcaggtgcgtccgattttgctgcgccgccagaactgcacgatccacagccgcacgctgcgggtgctgggcggtgagagcgccatcgccagcaaggtcgcgccgctttttgcggccgcgaaccccaccgccgccatctactgcaagaccggcgagtgcgagatccgcgtgactgcccgcgaggccaccgagcaggccgccgaggccgcctgcaatgcccgcattgcggagttcaaagagattctgggcgcagcggcctatgatgtcgatgtgcccgcgctggaatacaccgtggtacgcgctttgcgcgagcatcatctccacgccgccacggcggaaagctgcaccggcggcatgatcgccgagcggctgacgaatgtccccggcgcaagcgaggtgttcggcttcggctatgtcacctacgccgaggccgccaagcaaaagctgctgggcgtggacgccgctgtcattgcacagtacaatgttgtgtccggcccggtcgcagccgccatggcctttggtgcggcgcgcggctccggcgcggagctggccgtgggcattacgggtctggccggccccggcggggcgctgcccggcaagccggtgggcacggtctatctggccggtgccgacacccgcacgaaccgcgggtacctgatgcgccttactctgggcggctatcaggaccgccagatcatccgcacccgcgccgcgctctatgcactcgaccttctgcgccgcatggcgctggggctcgatgtgccggagagtgtacaatttaccccggagacggcgaacaacgaactggatatctaaaaccccaagccttccccttgaggggaaggtgccgccgcagcggcggatgaggtgcgggtttctgccgccgcccgtttgcgagatataatggcaaggctgcccctcatccgtctgcggtcggggccgcagacaccttcagtctacgcgctaagagccgcctacggcggttgcgctccgacacgcgcctgcgggcgcagccccaaaggaaaaggcaattcaacacaagaaaggttccaccatggtcaacactcaactgaaaatcctgcgtgttttcgggcctacgggcgcggaggtatcctctgtgctgcggggcatccgggatgacggctgccccggcctgcgtctgctggagcgggacggcgaatttgccatctgtgtgcaggtcagcgcccccaaccgcgccatggcggagcaatactgtgaaaaatgggccgcacggctgcgcaccaagttcggcgatgatgtctttgccgagggcgagacgagccttgcgcaggccacgctggacgccctgctggaaaagcgcaagctgctggtggctgtggacgaaacgaccggccgcctgctgggcgcgctgctgcagcccctgccccacagcgaggctgtctttgacttcggcaccgagagctatgccgatgcccagaaggctcgccgcatcgccgtgccggagcagctgctcaagcgcttccccggtgatgtcgtgcaggccacggcaggccgcgcgctggccgccatgcaggtgaccggtgcggactacgccgccgcctacatgcccgccagcgtcggccaatgcccctttgtgctggtctgcgaccgccgcggggcggtggcctgcgccctgccgcccgatatgaacgacaccttcatcggcaaccagatcttggatctgctgcgccgccgtttgtttggcctgcagctgaccgactcctgcatcaccttccgcccggggcatgaccgcccgctgcttgttgtgtcggaggccgccaagagccgcggaaacacggtgcggttctcgctgcgccgccgcacaccgcctacaagagatgccgaccacacggctgattttgagccgatgctggactttgacgcccctgcgccggtggcaccgcccccggcccctgtgcctgcggcgggtgaggcagggcagcaccgcacactgcgccgccatgacgccgcgccgaccctgccgcccgagacatcggagccgaccggagtcatccggtttgagacggaggacccggcgccgcaggacgccgcccccgccgatatacagacgatgggggccgagggtgcccgccgcgcccgcatccgccgcgcaagacccgtcacggccgagccgcccgcagcagcgccggacgagcaggatacccctgcccgcagcgtgctggacggtgacatcccggacttctctgccgagatcgaccccgccgcccttgcggctgcgcaggcggccgatgatgccgccgaggctgccggcaaaagcgccgatgtcgaggagtttacccgcgccgccacccagctgtttgataccagcgccatggaggaggccgcgcaggagcgcacccggaaaaaacagaaaaagaacgccgcaccgcccgacgagctgcccccgcgccagccggtgcccggcagcatccgcaaccgcagccttgaaatgatcgaaaagagcgagcgccgccgccggcgcacggtcgcactggtgctggccgcgctggcgctgcttctgctgctggtcggcggcggggtgtggatcttcctgcgcagcgaccttggggcgcgtcccgccgccaagagctacggcaccgccctctacgacagcaccgcacagagctatctgggcaaggcgcttgtgcgccgccccggtgtggtgggatacctcggctggcccggcatggacggcacactggtctacgccgccgatacccccgcgccggaaacgccggaatcgggcgaggccccgcagccgttggtgcggtttgcgaccccgagcgcactggacgccgccgcccccggcaacaccgtgctggaatgtaccggcgatacctacaagaccctcgccgaggaggagacgctccgcagcaacggcgggttcaccctttacaccgcagaaaagacctatcgcgtcaagacgatcgcggtctactattacgaccccgaggagcagggcgagggcgcgttcaacctttacggcagcaccgacctgtccgactactacgactacctgacctttgtggcgggcatccgcgcccgcagcctgtatgataccggcgtggaggcgggggagggctcccgcttcctgacggtgacgagccacagcgatgagggcagtgcgctgctctgcatcacgggccgtctgatcgaggagggcgaggcggagatcctgaacacctcggccatcgcggcagcggaggaaccgctgctgacggcggcgcagtaccagagcaagggccagccgatgccgactgtgcaggcgctcgttcaggccagcgtggagcattacgcgcagcagagcgccgccattcaggctgccaaaaagagcggcagcacgaccggtgatcttgccgccgacgcggcggatctggcccagcaggccagcgatctgcaggccatcacaagcagcctgctggccagcaccgacaagctgctggcgggcctgaccgatgtggcaggctccaccaccgcagccgaggcggacctgaacaagggtgccgagggcagcctgcctgagcagacggtgacggtggagcagctcaaggcaacgcccacccccgcaccggagcagaccgcgccccccgcgcccgaatccgcgccggagggcggcagcacccccgcgccgaccgaggccccgcagcctgacaacggtggtgccgccggtgagaccatcaatgtgacgatgaacggtacggcccagacgatggatctggtgcgctgccttgccatggtcgcacagaatgagcttggtcccaacgcccccgccgaggcctacaaggcgcagtgtgtggcgacccactgctggattctgagccagtcgggctacccgtctgtgctgggcgcagagccgggcgctgcggcgctggccgctgcgcaggaggtcgcccatgtgctggtgacctacaacgggcaggtctgctttaccccgtactttgcatcggccagcacgggcacggcctccgctgccgaggtctggggcaatgaccgcgcctggctgcaggccgtggacagcccctacgaccagcaggtggccaccaactggaatacgaacggcaacagcagcggcacagcccgcttctcccgccagaccctgcaggaccgcatccgcgatgtgatggacattgacctgtccggcgtggaccccaacagctggttcacgatccagtccgccaaccagtacggctgggtcgccaagatccaggtcggcccggacgcgggcgtcggcaccgtcagcggccgctggttccgcgagaatctgctggcccgccagagcgttgacgggcgcagcctgcgcagccagtgttttaccgtcagctacaatgcggagctggactgctttatctttgatgtctacggctacggccacggctgcggcatgtcccagtggggtgccatcggctacgcccgcaacggctggggctatcaggatattttgacgcattatttcgtgggtacgacaattacgacctattaaagctaaatccgtaggggagggatttatccctcccgtggggtgtatgtcaccgcatacggcccgggaggcatgaatgcctcccctacaagcaaagaaaaacacgcagacgaaagaaaatcgtctgcgtgtttctttgtaaggtgcgctgtgccgacagctgttacagcaggctctttccatccagcaccgccctgaccagcacatccccattataagtcaactccagatggaaaaacggcgcgtcctgagccagcagcttgaaaaagatcttgtccccctgccagatcggcaggtcctgcacggcggccttgtccacccattccagacagccctcgtcacagtcggtcatctcgccgcaaaaatccgtgcaggtgtacaggtgcatccgctcggcgggccatggggcgcagtaaaagtccacaatgccgcggtactgcggtatgcgcatcgtcaggccggtctcctcccgcacctcgcgcagggcacaggccagcgcgtcctcgcccggctcaaacttgccgccgaccccgacccatttgtcgtggttgacatcgtttttctttttgatgcggtgcagcatcagataggcaccgcccttttcaagataacacagggtcgtctgcagaaattccatggctgactccttatttactacatatttataccgcccgccgcagatactaccataaaaaaccagggaggaattggtatgaaggccactggcatcgtgcgcaggatcgacgagctggggcgcgtggtcatcccgaaggagatccgccgcgtgcagcatatccgctcgggcgattcgcttgaaatttttatggaggaaaacggcgaggtcgtctttaaaaaatactctccgctggcggaactgggcgagccggccgccgtctacgccgatgtgctggcgcggcggctcagctgtggtgtgctggtctgcgaccgggagcatatcgtggcggcagccggtgcgggcaagaatgagctgctccaccgtgagctgccgcccgagctggaccgcttgctgaaaaagcgccggctctacaccgcccccacaacccccgaccggaggatcaggctgggcgggcggtggctgctgtgcgccgcgccgattctggtacacggcgacattgagggcggtgtgctgctgccgggcagcgcccgggacccgctgcccgaggccgaggtcatccgcgcggcggccacggcggcggaatttctggcgcggtggatggaggagtgaggggcagagcgctgtaggggccgggcatgcccggcccgggggttggtgcgattgcccgtgaacgggttgcccccgtaatgctgcgggccgggcatgcccggcccctacatattatataatagggaaactgcacaatccgattgtgacgaaactgttaaacttacagaaaaatcgggaaaacctcttgacagttcgcaaaacggtactataataaacttagcactcggagataaggagtgctaaataaaccgaaaacaaaccaaaggagatgagcagcatggcgatggatgcgcgcaagcagcgtatattggaagccattgttgccctgtacgccaacggcggtgagccggtcggctccggcctgctggcgaactactttgacatggcactgtccagtgcgacgctgcgcaatgagatggctgcgctgacaaagctgggcctgctggagcagccccacaccagtgcgggccgcgtacccagcgcgatgggctaccggtactacctcgaccacctgatcgatgcaccgaaggcctgcgccctgccggaggcagaccgcgcgcacattgacgagcttttcgccgccatggacgccgagccggaaaagctggtgcccgccgccgcccgcagtctggcagatttgactggctgcgccgccgctgcaacaacaccgcaggcaccggatctctgcatcgcacactttgaggtcgtgcaggtcggccgctacagcgctgccgtgctggctgtgaccagcgcaggcggcgtgcggacccgcgtggcccgcgtggacaccggcctgacccgcgacgatgccgccaaccttgcccagctgctcaaccgggggctgacctttgtggccccgcaggacctcagcccgatgctgatggccagcatggtgctggcagcaggtgagcggctggcccccgtggtgatggccgcgcaggcacttgtcaccaccggcccgcaggcctgtctggagggcgcgcaatatctggcaaagatgcccgatgtgcgccagaacctcggcacactgctcgagatcttctccgacaatgtggccgcgaccgaattgatccgccccgagggcaaccgcatcacggccacgctcggcagtgaccttgaccccgagatgccgggtgcctgcatcgtcagcaagcggtatcttgccggcggcggcctgacaggctcggtggcactgatcggctccacccgcatggaataccagcggctgctgccggtgctggattatttcgccgccaagctggggcagagcatggccgggcagggccaataaagccaatgaatgaaagagggagagacccgcaatgagccacgaagaagaaaacaagcagaccgcacccaagacggaagcggctgaaacgcccgagaccgagacccggcagaaccccgagcaggagcctgccaagacggaaccgtgcgaggaaaagcatgagtgttgcaagcatcaccaccaccatgagaacgcggccctgcaggccaagcttgaggcggaggaaaagaagaacgaggagctgaaaaatcagctgctccgcaccgcagccgagtatgaaaactaccgcaagcgcagccagcgcgaggccgaccagaagttcaacgatggtgtgtcccacgccgtgacccagattctgggtattttggatacgctggatatggccgccaacgccgcctgtgccgatgaaaactacaagaagggcgtcacgatgacgctcgacaaggccgctaaggcacttgaggcgctgcacatcaccgagatcgaggcgctgaaccagccgtttgatcccaaccttatgaacgctgtttcgcaggcccccgctgccgaggggcaggagagcggcagcgtggtgcaggttttccagaagggctacaggatcggcgataagatcatccgccacgcaatggtcgtggtcgcagaataacgcaccgcttacttgcctccccttgcaggggaggtgcccgcagggcggaggggtagagccttccggaaggttcgctccctcagtcgctgcggcgacagctccctcgccgagggagccaagaaaacacgtcgaaccgaatcaaacgattcgtttccatatacaatgacatttactactgttcaaagcaaatttgaagggagttttatttatgagtaagattatcggtattgaccttggtactaccaatagctgcgtcgctgtcatggaaggcggcgagcccgttgtcatcgcaaacgccgagggcgcccgcaccaccccgtccgttgtcggcttcaccaagaccggcgagcgtctggtcggtcaggtcgcaaagcgtcaggccatcaccaaccccgagaacaccatctcctccatcaagcgtgagatgggcacctccaagaaggtccatgccggcggcaaggactacacccccgaggagatcagcgccatgatcctctccaagctgaaggctgacgccgaggcttatctgggcgagcctgtcaccgaggccgtcatcactgtccccgcgtacttcaacgacagccagcgtcaggccaccaagaacgcaggcaccatcgccggcctgaatgtcaagcgtatcatcaacgagccgaccgcagcctctctggcttacggcattgataaggaagccgatcagaagatcatggtctacgacctcggcggcggcaccttcgatgtctccatcatcgagatgggcgacggcgttaccgaggttctggccaccaacggcgatacccgtctgggcggcgatgactttgatgagcgcatcatcaactggatggctgaggacttccagcgcgagaacaacatcgacctgcgtaaggataagatggctgcccagcgcctgaaggaggccgctgagaaggccaagatcgagctgtccagcgccaccaccaccaacatcaacctgccgttcatcacggctgacgccaacggccccaagcatctggatatgaccctgacccgcgcaaagttcaatgagctgaccgctgatctggtcgagcgcacgatgacccccgtccgcaaggcgctggctgatgccggcctgaaggcctccgaccttgccaaggtgctgatggtcggcggctccacccgtatccccgccgtctatgacgctgtcaagaaggagctgggctgcgagccgttcaagggcatcaaccccgatgagtgcgttgctgtcggcgctgccattcagggcggcgttctgcagggcgatgtcaagggcctgctgctgctggatgtcaccccgctgagcctcggcatcgagacgctgggcggtgtctgcaccaagatcatcgaccgcaacaccaccatccccaccaagaagagccagatcttctccaccgctgcggacaaccagcccagcgttgaggtcaatgtcctgcagggcgagcgtgagtttgcccgcgacaacaagagcctcggaaccttccatctggacggcatcgcaccggctccccgcggcgtgcctcagatcgaagtcaccttcgatattgatgccaacggcatcgtgcatgtaagcgcgaaggatctgggcaccggcaaggagcagagcattacgatcactgcctccaccaacatgagcaaggacgacatcgacaaggctgtcaaggacgccgagcagtatgccgccgaggataagaagcgccgcgaggaagtcgatgtgcgcaacaacgccgaccagatggtattccagaccgagaaggcgctgggcgagttcggcgacaaggtctccgctgaggagaagagcgaggtcgagaccaagctctccgccctgaaggaagccctgaagtccggcagcattgacgacatcaaggcaaagcaggatgacctgcagaaggctttctacgccatcagcgagaaggtctaccagcaggccgcccaggcacagggccagcagcccggtgcgcagcccggcaatgacgccggcgcacagcccaaggatgacggcgccgttgacgccgacttccacgaggtctaagctgtaaaacaaacccataataaggccgccgctgggcaaacccggcggcggcccttgggggttatagagaaagttaaaataaagccttcccccggcgggggaaggtggccgcaggccggatgaggggcggcgctgccgtggcagcccgtttatgggcaatcgccggcagctcccacctcatcagtccgctgcgcggacagcttcccctcagcgggaagccttttcacaacccataaatagaggggatagattctatggcagaaaaacgagattactacgaggtgctggggatcggcaaaaatgccaccgatgccgagatcaaaagcgcctaccgcaagctggccaaaaagtaccacccggatctgaaccccggcgataaggatgccgaggaaaagttcaaggaggtcaacgaggccaacgatgttctttccgacccggacaagcgcaagcgctatgaccagttcggcttcgctggggtcgatcccaactatggggccggccagcccggcggcggcttcggtggcggctttggcggcgcaggcggtgtggatctgggcgacatctttggcgatctgttcggcggcggtggcttcggcgggtttggcggcttcggcggctcgtcccgcagcaaccccaacgcaccgcgcaagggccatgacattcaggccaatgtgatcctgacctttgaggaagcagcccatggctgcgccaaaaaggtcacgctgaaccggcagcagacctgcccggactgcaacggtaacggctgcgcccccggcaccagcccggagacctgcaccgaatgcggcggccgcggctatgttgtgactcagcagcgcacgccgttcggcgtgatgcagagccagcagccctgcccgcactgcggcggccgcggcaccatcatcaagaacccctgcaagacctgccgcggcaccggcaagaccagtgcccgcaagacgctggaggtcaaggtgcccgcaggcattgacgatgaccagaacattgcactgcgcggtcagggcgatgcaggcaccaacggcggccccgccggtgatgtgatcgtccatgtgacggtcaagcccgatgccgtgtttgagcgcgatggctatgatgtgtatgtccgcgtgcccattacctactctcaggctgtgctgggcgccgagatcgaggtgcccaccgtggacggcaaggtcgcacagcgcatccccgagggcacccagagcggcaccaagttccgcctgcgcggtcagggtattcagtacctgaacggccgcggccgcggtgaccagtatgtcatcgtggatgtggaaattcccaaaaagctgaaccgcacccagcgcgaagccctgaaggcatttgaggacagcctgaaggacgagaactacgagaagcgcaagagcttcttcaaaaacctgaaggatcggttcatgtcctgaattttaaacagccccgccccggcaatgtggaaagcattgccggggcggggctttattatataaatggcatgttgtagggcggccagtcctctggccgccgcagccgcgcccaccgctgcaggggtcggcgctcccgataacacgggagcgttgcggcggcggaaagatgcccggcggcatgtgggcatgccgccctacggcctaccgtatcgtgacttgtagggcggggtgccctcaccccgccgcagggggcaaccctttatccgacaaattccatttcggtatactcggtactgccgctcaaaaaggcgtcagcatcaatggtagcgtatcgggtcatgtagtcgtgatcgagatcatagccaatgttcaacaaaatccgtccatcctccagcatggaaatcggatagtaggactccaccccagcgggcgggtccacctgcgcaatctgcgcgccttgcaggtcgtatactgtgagggtgcccgggttgctgctcattgtgaaaagccactgtagttctccgttttggcgcaggtcacgaagcgacacatggatcataagccctaaatcttcctgcgtgccatcgctgcccacacggagcacagacattttaatgccctcctcagacgaccgggagtgttcgccggtgaagtagaaatcgtctccggatttcccaaggtaggtgtaatagacatagccgctgccatcgtctgcaccattatacggaaactctgcaattttcgtggtgggctttccggttgtggcatccgtcaggtcgtactcgagcatggagttctgcaaaagagcgtcggaaatttccgggtcactcgtgaagggaacagggtggtctgaaatgagacgcgcagtcacggcaaaattaccggcggcatccggtgcggcggctgtctcggcgggcaagtcccatggcgttgtctcaccggtttgcaaatcgagacggaacccgcttgctgtgtcataaggggcaagaccgcctgtgcaataaaaataacggtcgctgtataagacaacggtcgaggcgtatgagtcaaaaggaatctcatgtgttttggtgccatccggcgacagggcaatgattttgttgtcgcggtctctgttgcaggtgagcaggtacaccgcgtcgctcgtcacataggggtcggcaaggcaccaatcgtcgcaactataaaacagagaaacctgcccggcattcaggtcgtttttgtaaacgttcgttccgatatagtcaaactggtcattaagggcgggcatgacatcatagacaacatcctgcgcatagcggtggctgtaagtatagagtgggccggtctcggccgcagcgggctcgcttgtcggttcagcggtggtttcgggtgtggtggcgggttctgcggcagttgcagtttccgccgccggggtgcaggcggtcagggtgaacagcgcggcagcaaggacagaggcaagtcgtttcataacagaggctcctttcaacttttcatttgtgaccagcttacaccccggttgtgtccgagttgttacacgggaagaagatttgataaaatattttgtttttatgttttacgggttgttgtaggggtcggcgttcccggcgctgcaaacaaaacaggggagagcaccacacccggcgctctccccctgtttttatgtttaaaattcttttggttcttttcttataagaaaagaacacccgtacttctcgtacccttaaaagccgtgcttctccatcagcttgcggcccatcaggacgcccatgacggaggccatcatcaaaccgcgcgtccagccggaggaatcgccaaggcagtgcaggccggcgatgttcgtctccaagtcggtgtccatcttgaccttgttggagtagaacttcagctcagggctgtacagcagcgtttcggggctggcaaagccaggcacgacctcgtccatcatcttgatgaactcgatgatattgaccatggcgcggtagggcatggcagccgtgatgtcaccggccacagcgtctttcagggtcgggcgcacattggtgcgggccagctcgttggcccatgtgcgcttgccgtccagaatatcaccgtagcgctgcaccagaatgtggcctgcgcccagcatgttcgtcagctcgccgaccttctgcgcgtaggcgatgggctggttgaacggctcggtgaaattgtggctgacgagaatcgcaaggttggtgttgttgctctttttctccttgaagctgtgaccattgacaacggccaagtcgttgtcgtagttttcctgcgcgacaaagccgccggggttctggcagaaggtgcgcaccttgttgtgccacggggccgggtaaccgatcagcttgccctcatacaggaccttgttgatcttctccatgatctcgttgcggcactcaacacggacgccgatgtcaacggtgccgggcttgtgggcaatgttatgctcggcgcagatcttctccagccagtccgcgccgcggcggccggtggcaatgacgacctgcttggccagcacatcgcgggtgccgtccttctcacgcaggcgcacgcccttgcagacagaaccctccagaatgatgttctcgcactcggtgttgaagagcatctccacaccggcagcggccagatggttctggatattgaggtagagctgctgggctttctcggtgccgaggtggcggatggggcagtcaaccagctgcagaccggcctgaatggcgcgcttgcggatgtccttgatgtcggggccttcgtatacgccctcaaccttcgggtcggcgccgaattccagatagatcttatcggtgtagtcgatcagctcctgcgcgaaatcctcgcctatcaggtcgggcagctcgccgccgacctgataggacagcgaaagcttaccgtccgagaatgcacccgcaccggaaaagccggtcgtgatggcgcaggtcggcttgcagttgacgcagacgccggtcttgtccttggggcagtgccgcttttccacgggcttgcccttttcgacaagcaggatcttgtggggggtgctgcctttgcgcagcagctccaatgcggtgaaaatgccggcggggccggcgcctacgatgatcagatcatacatgggtgggggttctctcctttaaaaataacttgcgaaccttcgcgcgggaaacagaataagggcaaacggagcttgtaggggcggattctatatccgctcgtgcccgtttgctgatggcacggcgctgcgggcgcatatagaatgcgcccctacggtgtcacggaacggttattcaccgtcctccgacacatccttgctctcggcgttgtagacgacggggccgtccatgggaataccactctcggcggcctcggcctcatccagtgcatcgccgatggcggacatcgcggcgcttgcggcggcgttggccatgcggtccagcgtgcgcagctccatggccgcgtacagcacgcagcccagattcagcgcaccctcgacaatgagcaggatgccgcagagcatcgtcacgccgatggcggcgtcaaaggggtgcagcaccagcacaacgcccagtgcaaccgaaacgaggctgagcaacagcagcagccaccatttctgccccttgcgtttggcaaggtcaatggcagtgccgatgcggctcagaccgtccacaacgataaagatgccgaacacgacggggagaaagctcgccaccacctgcggctttgccagcgtaaagatgcccagccccgccgtaatgacaccgcccaccagcatgaacggcgcggtgaagcctgtgccgcggatgcgcgcatactgcaccagacagacgatgccggtgatcagcacaacagccccgaaggcgtagcagatccagagcagactggtctggggcatgacgagcagcatcatgccgatgacgatatacgcgatgctcagcagcatcattccggtcttgatatagcgcagcataggcggcagctccttttttgtgcgggcaggcccgcgttatttctcggccgcctgcatggccttggcagcagccacgatcagatcggcgcaggcctcgcggcccagagtggcgttcaggcagaggtcatagttcttggcctcgccccagcggttttcagtgtagtaattgtagtagcttgcgcgggcgcggtcatgcttggccagctgggtctcccacaggcggtcgggcatgtccttggcatcggggcgtgtcttggcaaattcaatgcgggcctccagcggcgcatagacaaaggtgcgcagcacattctcccgctcgcgcagcacatagtcgccgcagcggcccagaataacgcagggacccttggcggccagctccttgatgacattgctctgcaggatatagacctgatcggccagcggcatggtgttgcccatcatgtacaggctgtagatcaggctgccgctgcgctggttctcgctggcggcaatggcctcctcggtcaggccgctctttttggccgcaagggtgatcagctccttgttgtacagggggatacccagcttgtcggcgacagcctgtgcgatctcactgccgccggatgcatattcacgcgccatagtaatgaccataggttcctt

SEQ ID NO: 14036 - DNA, 5863 bp, Unknown
  gut microbiota DNA sequence
ctcccgcagggtgacggcaatggcatagccgtaggccgcctcacgcgagatgatttttaaaatgcacccctccagcgttcccttgcgcagctgcgcgcggtcaaacatcgtgtaccctcctgactaccttgcattaccatgttccttggctatattgtaatgcaaagtagcgctgctgtcaagcagaaaataaaaaacctccctttgaaaagggaggtgcaaaaccaaaatgtggcttgctgttcgctgttacgatttgccgcgcttgtaccagcagtttgcggcaaaatcaaagagagtctgcacgggctgccagttcagcacggctagtgctgcggcggccagcagcgtgtaccacagcacgggcagggccacgggtgcgccgcgcagcggctcaaaaagctgcagctgtacaagcaatgcaaggatcggcaggtgcagcaggtagatggcaagggtgcgccgccccagaccggtcagccggtgcccgctgctgaaggccgccacaagcgccgccgtggtagcaatgccgaccagataaaagacgatgcggtattccggccggtcgccgcccgcatagcttacatcgtggaacagctcggcgctgttgtccaaaatcgtctccgagcaaaagacccggatgaagtagaggccgtagccgaccgcaagacccgccgcaggcagcagccgtgcggcacggttctgcgcggcaaaggcggccagcgtatccagctgggggcggaacagcacgccaaaggcataaaacgggaagaaggcgaacacccgcacaagcatgaacggccagtcgatcaggccgccggccagccccacggccaccgccagcgccatgcccagacaggagccggccagccccagccggtctcgcagcaggcagagcagcggcagcgtcaggtgccagaagatcagcgcatacagataccacatgtgccgccatggcagcagcagggcggccagcacaccgccgctctcggcaaaatcctcccgcagaacgactgcgcgaaagacaagcatcagactctgcccaaggaaatagagccaaagctgctgggtaatcagcttgcgcgggttgaaccgcgccaccagaccgctgcaggcgcagaacagcgccatgtggaaggcatagatgcagaaaaaggtcgcactgacgaacgaatagttcatccggtactgctccataaagtggccgaacaccaccagcaggatgccaagacccttcagctcgtcaatgtaatcacggcggggggccatcaacggctctcccacggggagcggacaacctcgccggaatcgaccttggcgtactcagcaaccacggcccccgccttgacgatgccgccgggtgccacatgcacaccgcggccgagtgcggcatcgtgatcgacgatggctccggcgttgacaatgcagccgacgcccagatggacaccggcccctacataggcgcgcggcatgatgatgcagcccggctccagcacagcgctggggctgaccgaggcagcatcgctgatgaacaccggcgtggcatatcccgcagccgtcagtttttgcagcagctcaacacgcagcttgttatcgcccagcgccacaaaggcagggcggcccgggtgcaggatggccgggtccgggtaatcgcgcagaccgcccacggcatcgggggcattgtcgtccagaaaatccgcgctgccccagccctcgtcaaggagccagtcgttcagctgggtgccaaagccgccgcgccccaaaatcagcgggcgctttgcgttaaaggaaatctcaaggaaagccatcgttatccctcctgttggttcatgtcggggtcagccggttcagcgttggggtcatcaaggctggtgcgcgggtgaatatccagaggattggccagcgtgccgttctcaaggtccgccaaggcctgcggtatgccggggaagaaccgtgcaatgccggtgccgccgcagtgcaggccgtcaaaaaagtcagtttcctgcagaccctcgatgcaggcagggtcatagctgccgtacagcggcacattgttgtcggcgcaatactgccgcagccagttttccacaaggaaaaagcccttgtgctgctccggctcggtcagcagatacccgtacagatacggatgccacggcgacagcaccaaaatgacggtggtgccctgagactgcgcgtacttgataaaggagtcaaacgcccgaatctgggtgtcgctcagctcgtcaaagccctccatatgtacgctgttgaagctcatgcaggcctcggctgccagcgtgcggatctgatcctcggtctggctgcggaaggcaatatcgtacagcacgctgccgtccgaccgtttgatggtggtgggctggtcgtaggggtcgccctgcacggggttgaactcgatggtgttgccctcgtcatcggtgacggtggcctgaccgcggttcttgacatagtagtccacattgccctgaaagtaggccgggtcagccagcgccttccacagctcgaccttgtcgggctcctcataatcggtgggaacattcaggaccttggtcaaaaattcgttgtagagatcggcatcggcgcgggcgtcaaacgcggcctcgctaccgtagaacacccatggatcaaggctccacaaaagcgcgcggggggccttgccgtaggtgaccatcttgtagtagctggtcatgttgtcgcgcacatcagcgccggtgacgcccatgttgaagaagctctcaacaccggtgttttcacggttgaactgcagcacgcggctggagccgataccgatggcctcgggcgtttcgggtacatcctgtgcaaataattgtaccacctgacgctcgtccatctgctcaaagtttgtcacatcatagccctgcagcatcagatccacgatacggcggggcgccagcgcaccctgaaacaggccgctgcggtccacattgtagctgaatgctaccataaagacgagaatcggcaccagcagcaaaaacttgaaggcggtttttacgccgaagtagatgcgccgcgccagcccgcgcagaagcagcacaaacggattgacccgctttttccggcggtgtttttttacgggggtatttgtgggtgcgccgcgttggatcttgaccggcggtgcggggatcggggtaggggatttagccatggattacaccgccctttctcagtattgctggtagatgaacgccgactgaccgaatgcggcgaagaagaggatcgctgcggccgcggcgtagtagagcgtccagcgcagcggccagacctgctggcgtatccagcgggccacgctgcggccgccatgctccgccgcaaagacgacaaagcagccgaacagcagcacgaccggcaggcggccgtcaatgccgctgctgtagatcagccccgacacctgcgcccacgacccggccagaccgtcccagccctgcagcagcgagccatagaccgcaaacgggtcggtgttgtagatggccgaggcaaaaaagaccagcgtcaggcagaacagcgcattggtcacaaggcactgccacagcgccttgaaccagcccatacggtagagcgggttgaagcgattcagctttttgcgcgccttggccgtcatcacgccgaaggcggcgcacaggccggtggcaaggccccatgccagataccgccagtccgcgccgtgccacaggccggagcagacaaagacgatgacgatgttcagataatgccgccacggggcgcaccggctgccgcccagcgtgaagtagacataatcccggaaccagctggtcattgagatatgccaccgccgccagaaatcgttgaaggtgcgcgcctcaaacggggactcgaagttctcgatcaggtcatagcccaaaatgcgggctgcacccagcgcaatgtcgcagcagccggagaaatccatgtacagctgtacggcgaacagcacagtggccgccgtcaggttcggcccacctacggcggaaatatcaccgtagacggctgcaacatactgccgcagattgtcggcaaggaccatctttttggtgtagccccacagcatgcggaaagcaccgcccgcgcagcgctggtagctgaagcggcggcttttgcggatctgcgggcgcagctgggggtaacgctcgatcgggccgttgatcagcgtggggaagaaactgacaaacagcgcatagtgcagcgggttcgtctcgacccggcagcggcgcttgtagacatcaatggtgtagctcatggccgcaaaggtaaagtagctcagccccagcggtgccagcagattttcccggcgggagagcaggctgccgcccagcgagtctgccagaaggttccagtacttgtagtagaccagaatcccgatgccgaacccgaccgaggccagcagtgcaagaatacgcaccggcttgcaccggaccttgccgatgataagcccgcagagccatgtgatgagcgttgccgccgccatgacccagaccagcgggcggtttatgggatcatagcagaaaaagccgtagcttgcaagcagcagaaagtacggccgcagcacgcggggcagggcgtagttaatgagcgccaccgccgcaaaaaaggcaagaaacaacagcgaggtgatcgccatcgtctgatcctcacacaaaaaagcgaggatctgctcccaggttattgtcatgattcctctctccgttcgggcgcagggtcactgcttttcttccaaatcgcggacacgcttttccagtatggcgttggcctgggtcaatcgcttgcatttgtccgccagctggctgatggcgatgctcagggacagcagcaccacaagcacgaagcagaacatcagcagaaagacgaggttgaccggcatctcaatgtcaagcaggtcgcgcagcacatacaccacataggggaaggcggcggcaatgacaagcccgacagccagtgccagccagagcaagctgtattttacgctcatgaggccgcgctttaaaagggcaaagatgatgagtagcagcacaatggcgcccaaaatcataaacagctgcagatgtgcagtcatgcgcggcctcctttcactttacggatggataagcggtcgatgatgagcgccagcgaaaccttgatcatgtagtaagcgctcttgaagctgtggatgctggacacaccgccctgccgctcccgcatgatgacgggggcctcacccacgcggaaaccgaccagacttgccgccagaatggcctccggctcggggtagtcggtggcgtagtgctgcgcaaaataagcggtcatggccaaattggtggcgcggaagccgcttgtcacatccagcacgcgcttgccgcagagcagacggatcatcccgctcagccagcggatgccgacccggcgcataaagctggtctggaagccctcctttttaataaagcggctgccgatgcacatgtcatagacgccgtccagcaccggctgcacgacctccatcaggtaggcagggtcgtgctgaccgtcgccgtccatctggacggcgacatcatagccgtggcgcacggcgtacaggtagccgcactgcacgccgccgccgatgcccaaattgacgggcagatcgagaaacggataatggcggcttttcagcagtgcagcgctgctgtcagtcgagcagtcgttcacgacaagaaaatccacctccgggcaggtggcgcgcaggttttccaccgtattgacgatgttatcctcctcattatagcaggggatgatcaccagaatttttttatccaaaatgggtatacctctcaattttgggtgtgttgcattgcgtgttgtaacgaacgcgtgcttt

SEQ ID NO: 14037 - DNA, 7565 bp, Unknown
  gut microbiota DNA sequence
gtggcagagtgcgcgggtgaggcgttcggtgtgtggtttccgagaggggcaggttttggcacagtcgtatttcacagtgcctccagcagttgttcgcgcatccatttcagaatgcggcgctcgcggcgggatatttggacctgcgttgtgcctagaacgcgggccgtttcgctttgggtccggcctgcaaaaaagcgcagccggataagctggcggtctccatcgctgagcctgtccatcacctccgcaaggccgatccggtcggaaagtgcctcctccggggagtcgataggtacatcgaattccttcaggccatcctcatcatctgtcggcgtcaggctcagggccggcagcgaggcccggatggcgagggctatctgctccggggtcgtgcccagggtttctgccagttcggtgacgcccggctcctgcccggtacgcttcagacagcgctcccgctcttgattgatcttcagtgacagctccttgagagagcggcttaccttgactgtgccgccgtcccggaacagctttttgatctcgcccagaattaccggtacggcgtaggtggaaaagcagacgccgcggccggtgtcaaagccatcgcaggccttaaccagccccagacagcccgcagcatacagttcctcatattcgatgccccgccccttgaaccttccggcacaggcgtgtacgagtcccagattcttttcgataaattcttcacgcggcagctgtcggatatcggcaggcatggctgtcccctcctttttatatgtagagggtcaggtgcgggcctgcaggcgctttgtcagggtcacacgggttccgcgccccggtgcagacgaaacccggaccttatccataaagctctgcataacagcaaagccgaggccggctcgttcctcggcgtcacctgtcgtgaacatcggttccattgccttggcgacatccgggatgccgacaccacggtccgataccgtaatacgaacgattccaccctcatagatggctgccgtcaccgtcacagggccgatatgatccggataggcatgcacgatacagttggtcacagcctccgacactgctgtttttatatccgccagctggggcacagtcgggtccagctggaccagaaacgccgccagcgcggcgcgggcaaagccctcattgacagagcgccccgcgaaggtaagcttgacctgattgagcatcttcatcgtcttttcctccgttcaggcgtaggttatgtgggcaagatcgagcattcgctgcaccgcccggggcggattctggacggtcagtcgtccgcccagcgcaccgatatggcggccgcgccccagaataagccccacaccggaggagtccataaaggtgacgcccgagaaatccagcgtcagcaattccggaaggcggtcatctatctgcgcatcgatctcccgccgcagcgattgggcggcgtggtggtcgatctcgccgctgaggtaggcggcaagggtgccgctgcccgggatgaaggttactttggccatggaaggttgtccccttttgtaatagagttgcagcaggttggtggttgcgggccgggatggataaaattccccctacagcataaagaaaagcctgtatcgttatgatacaggcttcagggtgcatattttgttggaattgtgcgggcggttgttatttttctgcttccttaagcagccaggggcgggcctccgccgcaagataaagcgagccgcagaccacaacaccggccagattgttctcatcggcatagtcaatggccttgcgcagggcgtccggcacattgtcggcagcctcggcatccatgtggaagcgcgcttccttctgcaagtcctcggcgctcagtgcgcgggggcagttgggggtgacggtgtagaccttggcaaagcagggggccagatcggagagcatctccttgtaatccttgtcggccagtacgccaagcacgccaacgagattttcctcaaaatcggcgcgggtcagggtcgcagccagcattttggcaccgtccgggttgtggcagccgtccagcagcagaagcggatggcggcgcagcacctcgatacgggcgggcatccgcgcagcggcaaggccctgcagaatggcgtcgtccgaaatatcatagccgaactcgcgccagagagccagcgcgatctcgacagccatggcggcgtggttagcctggtgcgtgccgggcaggcccagtgcggcgcgatagccgccgtagtcgatgcggttttccagccgcttgccgcgcagcagagtcagatcatccttgtcgggcgtgatgatgctggtgtgcgcctcggcagcggcggtcaggatcggccccatcgcctcggcaggctggtcagggtagttgacaacgaccgcaccctccttaatgataccggccttctcggcggcgatcttgtcaagggtatctcccagaacttccatgtggtcatagccgatctttgtgatggcagccacaagcttgtgcggcacgatgttcgtggcatcgcagcggccgccaagaccggtttccagcacgacgaggtcgcacttttcgcgtgcgaaccaaagcagtgccagcgccgtgacggcctcgaactcgacaggcttttcgccgccctcagcctcgatggcatccgctgcgtccatgaccttctgggtcaggctggccagcgtgcggggcgggatcatctcgccatcgatctggaaccgctcgcggaagtccaccacataggggctgatggtcaggccggtcttatagcctgccgccgtcaggatcgcagaggtcatcgccgcaaggctgcccttgccgtttgtgcccgcaatatggatgcactgcagctccttttccgggttgcccaggtggtccatcagattttgcatgcgggcaaggccgggtttcccctgccccatacgcggcagggcgtgcagggcctcgattgcctgttgggtcgtcattcttcgtcctcctcatcgtattcgtcatcatcgggttccgggcggttcagctgtgcctcgtgggcgcggtgggcggcgcggcgggccagccgctcatgctcgcggcggcgcagctccgcgctctcggcgcgcagagcgcggttctcctgcttgacgcggatgaatgcggtaacgccgcgcacgatcagcaggatgatgagtgcaaacagcagtcccgccacgacgccggacatatcgatccagacatccaccaccgacgaggtgcggttggggctgtgcagctggatggtctcatccatcagcgccgttgtcatgccgcccagcagcggccagctcatgtggcgcacaaaatgctttgtgtacacgcggatgcagagcatcagcaggaagccctccagcgcaaactccgaaaagtgcgcgagcttacggatcagatgctccgacaatgggccgagatgcaccttggccagcgcactgttgaccagctgcatgacggcttggctgcgtgcggacgactgggcaccgttttccagtgagttgcgaaagataaacataatgcaggcgatcagcgccgccgtaaataccacgcggaacaagatcagccacggactggttctttctttttccataatactcctttatagatactcctctataaacctgtattatagcacgcagcccgcataagagcaagcgccctgctgcagtttccctcatactataggcccggccttgtaagttgtcaaggtacggtttttgtggtattctaatgaaaaaaatgtattttgcggggggaatggccatgaacatccagatcttcggcacaaacaagagctttgacaccaaaaaggcgcagcgctggttcaaggagcgcggcatcaaattccagatgatcgacatgaaggaaaaaggcatgagccgcggcgagttcgacaatgtctgccgcgccgtcggcgggtgggcgcagcttgtcgatgagagcgcaaaggacaaggacacgctggcactgctgcaatggctggacgaaagccagcaggcggacaagctgtttgagaaccagcagctcatccgccagcccattgtgcgcaacggcaggctggctaccgtggggtactgccccgatgtatgggaaaagtgggcgtaagcgcatttattatccggcgatgcccttgacaaattccccgcactgcggtacattataagatacaaatgcagtgcgaaagagtgtgcccgaatcgtacttttgcagcaagccgggggttgatgcaagcccggcagagcgcggcgggcgctgtcactttcaagcagatgcggtgagaggggcgtttcccctgccagccgcatccgggtttgccgccgttatccgggcaggcgggctgttcggcctgccgcaaagcggcctttttacaaggcaacttgggtggtaccgcgacttgaattgattcaagccgtcccatgataactcatggggcggcttttctttttgcgcaaagcgccccgcacatttatcaggaggttttatcacatgccgaaagaactcgccaaacagtacgccccgcagggtaccgaggaccgcatctaccagaactggtgcgacaaggggtatttccatactcaggtcgaccgcagcaaaaagccgtttaccatcgtaatgccgccgccgaatgtcaccggccagctgcacatgggccacgctatggacgaaacctggcaggacattctgacccgctacaagcggatgcagggctacgccgccctgtgggtgcccggcaccgaccatgcgtccattgcgaccgaggccaaggtcgtggccaagatgcgcgaggagggcctgaccaaggagatggtcggccgtgacggctttttggagcgcgcgtgggactggaagaacacctacggcaaccgcatcgtcagccagctgaaaaagctgggctgctcctgcgactggcagcgcgagcgcttcacgatggacgagggctgctctgacgccgtcaaggaggtgttcgtccgcctgtacaacgaggggctgatctaccgcggcaaccgcatggtcaactggtgcccccactgcaacacctccatctcggacgcagaggtcgagtatgagagcaaggacggcagcttctggcacctgctctacccggtcaaggagaccggcgagatgctggagctggccaccacccgccccgagacgatgcttggcgataccgccgttgccatcaacgccgaagacccgcgctacaagcacctgcacggctgccatgtcgtgctgcccctgctgggccgtgagatccccatcgtctgcgatgagcacgccgacatggagaagggcaccggcgttgtgaagatcacccccgcccacgatcccaacgacttcgaggtcggcaagcgccatgacctgccgatgatccgcgtgctgacctatgacggccacatgaccggcgctgccgacaaggctgccgtcgatgccgagaaggccgccggccgtgcagctgccgatgagccggatgttctggactgcggcaaatacgccggcatgaccgcgctggaggcccgcaaggccattctggccgatctggaggcctgcggtgcgctgaaggagaccgagcccctgacccatgaggtcggcacctgctaccgctgccactccgtcattgagccgatggtctccaagcagtggttcgtcaagatggagccgctggccaagcccgccatcgagagcgttgagaagggcgagatcaagttcgtgccggagcgcttcaccaagaactacatcaactggatgaagggcggccgtgactggtgcatcagccgccagctgtggtggggccaccagatccccgcgtggtactgcgatgactgcggcgagaccgtagtttccaaggatgctccctgcagctgccccaagtgcggcagcaccaagctgacccaggaccccgacacgctggacacttggttcagcagtgcgctgtggcccttctccacgctgggctggcccaacgagaacgccgaggattacaagtatttctatcccaccaatacgctggtcaccggctatgacatcatcggcttctgggtgtcccgcatgatcttctccggcctcgcctacaccggcaaggcaccgtttgacacggtgctgatccacggcatcgtccgcgacagtcagggccgcaagatgtccaaatccttgggcaacggcattgacccgctggaggtcattgagcagtacggcgcggacgctttgcgcatgatgctgatcatcggctccaccgccggcaacgatatgcgctacagcgatgaaaaggtgcttgcctgccgcaactttgccaacaaactgtggaatgcctcccgctttgtgcagatgaacctgcccgaggattttgagccgggtctgcccgaggaaagcctgcttgacatgagcgacaagtggatcctgtccgagctggccaaggtcgccgccgaggccaccgccaacctcgacaagtacgagctgggtctggccgccgaaaaggtcgagaacttcatctgggaggtctactgcgactggtatatcgagatctgcaagacccgcctgaacggcgaggacgcagccgccgccgatgccgcccgcaaggtgctggtctatgtgctggacaaggcgctcaagctgctgcaccccttcatgccgttcatcaccgaggagctctatcaggccctgcccggcagcagcgaaaccatcatgaccgagaagtggcccggtgatgagaacatgaagatctgggccgaggattgcgctgactttgaaaagctaatggactacatcaaggctgtccgcgccatgcgcgccgagatgaatgttcacccggccaaaaagacgagcatgatcatcgagaccgccagcccggccgcctttgagaagggcggcgcctatctggcccgcttcgcctttgcgaccgatgtgactgtcaccggcaagtacaccggcagcaccgagggcatggtcaatgtggccacccccgatgccaagggctttatcccgatgatggagctgatcgaccgtgagaaggaactggcccgcctgaacaaggagatggcgaaggccgagaaggagctgaccatgttcgagaatcagctcaagaacccgaagtttgttgagaaggcccccgccaagctggtggaggagacccgcgccaagctgaccgccgcccaggataagctggccaagctcaaggagagcatcgcggcgctggggtaagtctgaaggcttcccccgtgggggaagctgtcaccgcaggtgactgatgagggcagcgttccgcagcagctcgttcacgggcaatactggcacgctcgcccctcatccggcccttcgggccaccttcccccgcagggggaaggcttttcagccacaaacaaaaaataaccccgccccgttaggaactgcatcctgacggggcggggttttctcgttacagcacaaaaattgcagggaaaagtttcaaagcaaattacttgcggcgcttgcccttgccgcacttgcgggtgttggccttggcagcaacagtcttgacggcctctaccgtcttttcgacaacaggctcggt

SEQ ID NO: 14038 - DNA, 17264 bp, Unknown
  gut microbiota DNA sequence
caggctttgcggcctcaacggccttctcggcggcgggcttcacagcctcgaccgtcttttcaacaacaggctcagcagccttgacagccttctcgacaacaggcttcgcggcctcaacggtcttttcgacagcgggcttggcggccttgacgacctcggtagcagccttctcggcagcggccttggccttgacagtggtggccttgacgctggtcttgggcttgcgagtcacctcatcaatggtccagaactggttatcgccgttgacatcggcccagatctgcagcacagtgccgttctcggtagccatgccggggtccagcagcttaccggccaggttggacttgatcttgacgcggccgtcgttagtaggctccacgacccacagctggctggaggcctgtgcgccctcccactggtggacgcgggtgccgtcgctgacgccgcccatatccagatccatcatcttgccggtgaaacggttctggatgcggtagacgccatcgccagctgcgacaaagccccactgctgccactcgaagttggcattgtccatcagctggatctttgcgccgttgtcgatgttataatcagcaacctcaacgaccttgccgttggcggcgctgatggtgtagaacttacccgcggtaagtacggtctgtgcgatcttctttctgggtgccataatgcaataccctcctgtttatcataaaaagtaaactacctttagggcggccgttttttccctcaggccgcagcgcaagacactgcattttgcgtgtctacgcatcctattataaccacttttttcctgtccgtcaactttttcgcgctgttgcggcattttgcacaaaaactgccggggcagcacaagctatcccggcagttttgattgatttcaggctgatttgcgacctttttcgaccgctgccgtatcagctgttctcggcaaaattgccggtgtacagccggtaatagcgccccttctgggcaatcagctcgtcatgggtgccgcgctcgatgatacggccctgctccagaaccataatgcagtcggagttgcgcaccgtagacaggcggtgggcaatgacaaaggtggtgcggccgtacatcaggccgtccatgccgtcctgcacaagcttctcggtgcgggtgtcgatggaggaggttgcctcatcgaggatcagcaccggcgggtcggcaacggcggcgcgggcgatggccagcagctggcgctggccctgactcaggttcgtgccgtcaccggtcagcattgtgttgtagccatcgggcagatgcttgatgaaggtatcggcgttcgccagtctggcggcggccacgcactcctcatcggtggcggtcaggcggccgtagcggatattctccataaccgtgccggtgaacaggtgggtatcctgcagcacgatgcccagcgaggagcgcagcgcgtccttctcaatagccttgatgtccagaccgtcatagtagatctgacccttctggatgtcatagaagcggttgatcaggttggtaatggtcgtcttgccggcgccggtggagccgacaaaggcgattttctggcccgggcggccgtaaaggttgatgtcgtgcagaacgatcttcttctcatcatagccgaaatcaacatccttaaagacgatgtcacccttcagctgagtgtagctgggctttccgtcagcacccacatgcttccacgcccatgtgccggtggactcgttcgtctcggtgacggaatcgtccgccagatatttcgcgtggaccagcgtcacatcgccctcgttgacctcaggcttctcgtccagcagggcgaagatacgcgcaccgccggccagcgccatgacgaccgagttcagctgcatcgaaatctgggtgatcggctggttgaagctcttgttgaaggtcaggaagctggccagcttacccagtgtcaggctgccgccgacgccgctgatggccagcgcaccgccgaccaccgcgcacagcacataggacaggttgcccaactggccgttgaccggcatcgccaccagagagtaggcgtttgccttgtcagcgctgtggaacagctcatcattgagcttgtcgaactcgtcgatggcgatctgctcatggcagaacaccttgatgaccttctggccgttcatcatctcctcaatgtagccgttgaccttgcccaattcctgctgctgcttgaggaagtatttgccggagtttccggtcagatacttcgtggccagcatcataacgccgaccatcaccagcgtaagcaggctcaggggaacgctcaggtagagcatcgagaggaatacgctgaccaccgtaatgatggtgttgacaagctgcggcaggctctggctgatcatctggcgtagggtgtcgatgtcgttggtgtagatcgacatgatgtcgccgtgggcgtgggtatcaaaatatttgataggcagcgtctgcatgtgggtgaacagctcatcgcgcaggctcttcagactgccctgcgtgatggttgccatcaggcggttctgcacaaagacagcgataatgcccaccgcgtagaaccctgccacgcgcagaatcgcatggaacaggccggagaaatcgttgcttccatccttcaacagcggcagaatgtacccgtcaatgagggtctgcatgaacagtgtgccctgcacctgggcaaacaccgccagcagaatgcagcagagcacgatgatgacctgcgccttgtactggttcatgacatacccgaggatacgcttgaacaccttgccgggattttcgaccttggggcgggggccgttactgcgtccgccggggccgacttttaccactttcgcttgctgtgccatcaggcttcccctcccttctcgtcaaaatcgccggagcccttggtctggctgttgtagacatcctgatagatcgcgttgtttttgagcaggttggcgggggtgtcaaagccgctgaccctgccgttgtcaagcacaaggactcggtccgcattctcaacggaggagatgcgctgggcgatgataaacaccgtcgtgccgggaatcttctcggcaaaggagtggcggatcttcgcatccgtggcggtatcgacagcggaggtcgagtcatccagaatcaggatgcggggctttttcagcagtgcgcgggcaatgcagaggcgctgcttctggccgcccgagacattgttgccgccctgctcgatgtgggtctggtacttatcggggaagcgctcgataaactcatcggcacaggcctgctggcaggcctccacgatctcggcatcggtggcgttggggttgccccagcgcaggttgtcagcaatcgtaccgctgaacagctcgttcttctgcagcaccatggccacattgttgcgcagggtgtccagatcatagctgcggacatctacaccgccgatgatgacgcggccctcggtcgcatcgtacaggcggggcagcagctgcaccagactggacttggccgagccggtgccgccgataatgccaatcgtctcgccggagcggatgtcgaggtcaatatcctccagcgccttctcgccgtccttcttgtaggcaaagctgacatggtcgaatctgaccgagccgtccttgacctccatgacggggttctcaccattcttgaggtcggactgctcgtccagaacctcagccacacgccttgcggaggccatagacatcgtgatcataacaaagaccatcgagagcatcatcaggctcatcaggatgttcatgcagtagctcagcatgctcatcagatcgccggtggtgaaggcggtcgcgccggagctgacaatgagctgtgcgcccagccaggagatcagcaggatgcagctgtaaacggtcagctgcatgagcggggcgttccatgcaaggatcatctcggcgcgcataagcaggcggcggacattctcgctggcctttttgaactttttgccctcaaaatcctcgcggacataggccttaactacgcggatggcggagacattctcctgcacactctcgttcaggtcgtcatatttgcggaaggcctcgccgaaatatttggtggcgcggctcatgataaagacgagcgcgccgcccagcaggataacagcgaccagatagacgcttgccagctcacgattgatggcgaaggacatgatcagcgccacgatcatgctggcaggcgcacggatcgacatgcgcagcagcatctgataggcgttctggatattcgtcacatcggtggtcatgcgggtgacaaggcccgccgtagagtatttgtcgatgttggcaaagctgaaggtctggatgttgcggaacatcgcgcggcgcaggttgcgggcaaagccggtggccgcatgtgagccggcaacagcgcccagaataccgaacagcaggccgaacatcgccgccacgatcatctgtgcgccgaccgtgtagatgacctgcatattgcccggcgtaacgccgttgtcaatgatggaggccatcagccgcgggatgatcatttccatgatgacttccgcgatcataaagaccggtgtcagcacggataccagccgaaagccttttgtttcgcgtccgagtgtttttaacaagtggtatttcccctctcttgtgttatatttccttcttccagaatatgctgcgcgtttttcagcgtcagctccagcaccgcgcgggccgcggcggtctgctgcgggtcaatgccggcctgcaggtcatcctcaaactgtgcaatgcaggcttcgatctgttcatggcaggcacggcccttgtctgtggccaccagccgtttcaggcgggcgtccttctcaaccgcacagcgggtgataaatccgtcctgctccatcccctgcagcattgccgtcacgcttgagcggcggatattgaaccactgctcaatatcgcgctggtatacatcccgcccgctgcggttgccgcggacgatgtcgcccaacaccatgccccgcacgccggaaagatccgggttgacgccggaaatgcgggcatcgagcgccctgcgtatgacccgcgaggtctggttcagcagcgcgccgaagtgaacattggcacagcagctgcattcattttgcgattcatcgcacatttcttccctcctgttctgattttcgggcaaaatcagttagctttctaattgttcgtaatctaactgttcgtttgcgtactttacaagtatagcacaggtttagggaatgtcaagagggattttcagcttgtgcccgcgctgttttccggttccacccccagatacggcagcgcctttttcagcacctcggcgcagaccgggccggagagtgcgccgccgctggtggtccagctgtggggttcgtccagacagatcagcaccgctattttggggtcgtctatgggcgctaccgacacaaagctggcgatgcgcgccccctcgttggcgctgtccagcttctggctggtgccgcttttgccgccgacacggtagcccgccacagccgcctgcttgccggtgccgctggtcacgacgccctccatcaggcggcacatcgtggccgaggtttcctcgctgatgacctgccgcttcaccacaggctctatctcctttatgacttgcccgtccggtgccgtgatcctgctgacgagatacggctgcatcagcttcccgccgttgaccaccgcgcagacagccgtaagcatctgcaggtagctcaccttgctgctctgcccgaaggagcagctcgccagctccaccgggcccatccggtcggcggtgtagtactcgctgcggcgtatctcgcccggcaggtcgatgccggtcggcgcacacagtccaaatgccgcgaaatagtcacagaagcgctccttgccaagtctcgcaccgatctggataaagcaggggttgcagctgacggccagccccttggcaaaggtctcgctgccatggatatggccgttggcgcagcggaaccgtgtgcccgccaccgtgatcctgcccgcgcaggtgaaataatccgtggccttgcaggcaccgctgtccaacgctgccgcagccgtgataagcttgaacacactgcccggctcgtacaggtcgctgatggccttgttgcgccactgcgcctgctgcgcccgctgcagggcggcgctgcgttcctcgccctgcagggcgttcaccgtgtcgcgggcttccttgtttataaggctgcgcggcgcgttggggtcgtagtccggctggcaggacattgccagcaccgcgccggtgtgtacatccataacgatgccgacaccccgctcggcaacatgatgctcggtgacggcggcggacagcgcactttccagccagtgctggatctgggcgtcgatcgtcagggtcagcgtattgccgggcaccgcatccacaagggtctggtagtgggtgggcatgtcgtagccccatgcgtttttggcggtcaggatgcgcccgttctcccctgtcagctcgtcattatagcgcagctccagcccccacagccccgcattgtccacatcggtaaagccgaggatgccgcccataaaattcccctgcgggtagacgcgcttggtgtcctgccggatctgaacaccctgcacactattgtcgcggcaccagtcccggaccgcatcggccatcgccttgtccacgcggcggcgcagcaggcaatcgttggaggtccgctggctgaattttgccagtgtctcggcgtagtccagctccagaatctcgctcagcgcccttgcggcaggctccacggcttcatccgccatctcccgcggggcggcgcggatcgtccagcaggtctcgctggccgcaagcagcgtgccgtccgcagcatagatctctccgcgcgcggcaggcagcgtggccccgcgcagctgctggtcggcggcacgcagcgcatagccgccggggtcgcgcagcatcaaaacaaaaagccgcaccgccagcccgcccagacacccgaccgccagcaccgccgccagcatccgcgtgcgcaggcgcatttttgtgttcagctgcggtgtgatatgacgcataacaccagcccccttccccatacgataagcgtatgaggacccgactggcaaaatgccgaataatcgcggagaagttctccatattgacgattgaccttttagacaaaaaagaggtatactgttaatacttaattgtgacatttaattgtcaaagtacggagcattattataaggaggcaatccctatggctagatttactttaccccgtgacctttaccacggccccaatgcactggaggcattgaagaccctgcccggcaagcgcgccatgatctgcgttggcggcggctccatgaagcgtttcggttttctggatcgcgtagaggcttacttaaaggaagccggcatggaggtcgagctgtttgagggcatcgagcccgatccctccgtcaccaccgtcatgaagggtgccgaggcaatgctgaagtttgagcccgactggatcgtagcgatcggcggcggctcccccatcgatgcagccaaggcgatgtggatcaagtatgagtaccccgagatcacctttgaggagatgtgcaaggtgttcggcatcccgccgctgcgccgcaaggcacacttctgcgccatctcctccacctccggcactgcgaccgaggtgacggccttctcgatcatcaccgactatgacaagggcatcaagtatcccatcgcggactttgagatcacccccgatgtcgccatcgttgaccccgagctggcccacaccatgcccaaaaagctggtcgcccacaccggtatggacgccatgacccatgcgattgaggcgtatgtctccaccgccaactgcgactttaccgacccgctggccctgcatgccattgagatgattcaggcggatctcgtcggcagctacaacggcgatatggaaaagcgcgatgccatgcacaacgcacagtgtctggccggcatggccttctcgaacgctttgctgggcatcgtccacagcatggcccacaagaccggcgccgcctttgctgattacggcgctcacatcatccacggtgctgccaacgccatgtacctgcccaaggtcatcgccttcaacgccaaggatcccaccgccaaggcacgctacggtgtcatcgccgacaagatgcatctgggtggcagcaatgacgatgagaaggtcgcgctgctgatcaaatacctgcgcggcatgaatgacgacctgaacatcccgcactgcatcggccactacggccccgactcctacccctgcgagcagggctttgtcccggagaatgtcttccttgagaggctgcccgagatcgccaagaacgccatcgcagacgcctgcaccggctccaacccgcgccagccgagtcaggaggagatggaaaagctgctgaagtgctgctactacgacaccgaggtcgatttctgatcataacaagcccgcagctgcttttctgcgctgcgtgaccccctgccccggccgcataaagcggccggggtttttgtgcgccgcaaaagtgggcaatatacttgcgatttgattttttgcgatttcgcctgcaaacgctgtaaccgcaagcttttccgcgcatttttgcagcacggcccacccattgatttcgcatacattttgctgtatactatccatgtaaagcctatgcaaaacgcatgtaaaaaggagcaataccatggcagtcaccgcaaaaccgcaggcacccatgtttaccaaacgggcgctgtttacactgatctggccccttctgctggagcagaccctcagcgtcacgatgggtatggccgacaccctgatggttgccggcgtgggcgaggccgccgtctcgagtgtttcgctggttgacagcctgaatgttctgatcattcagatcctgtctgcactggccaccggcggcgcagtcattgccagccagtatctgggccgcaaggataccgaaaacgccgggcgcagcgcggcccagctgtacagcgtgcttggcctctcgactgtggcggtgggcatcctctgtatgctgctctcccgcccgatcctgcgcggcgttttcggcagcattgatgaggatgtcatgcggtttgcccagcagtatttccttatcagcgccgtgtcctaccccttcatcggcctgtacaatggcggcgcggctcttttccgcgcacagggcaacagccgcatcagtatgctggccagccttgtcatgaatgtaatcaacattgcaggcaacgcactgctgatctacggcttcggcatgggggtcatcggcgcagcgctggccaccctgatcggccgcgtctttgccgccgtgtttatcctgtggcagaaccagaagttctgcaacccgctgcgggtccaaagccttgccgatctgcggccgcggcgcgcccccatcatgcagatcctctccatcggcatcccgtccggccttgaaaacggcatgttccagatcggcaagctctgcgtcagcagcctgacctccacgctgggcacctcggccatcgcggccaacgccgttgccaacacgctttccacgctggcaaacatccccggcaacacaatgagccttgccatgatccccgttgtcggccaatgtctgggcgcaggcgagaaaaagcaggccaagcggtatgtgtttctgctgatgagcattgccatggtcggtctggccgccgccaatgccgcgctgttcttcctgatccctctgctcgtggtctggttcaatctctcggcggaggcctccgccctctgcaccatggtcgtgcgcatgttcaacattgcgagcgtctttctatgggcctgcagctttacgctgcccaacgccctgcgcaccggcggcgatgccaaattcaccatgacggtcagcatcataagcatgtggctgttccgcgttatcctgagctatgtctttgtgctgcagttccatctggggctggccggcgtctggctgggtatgttcatcgactggctctgccgtgacatctgctttatcgcccgctttatcagcggcaagtggatggagcataaggtcatataaaatacaagcctcccccgcccgtggtatgcgcagtgcatatcacgggcgggggaggttttttatgggtcagatttttcgggcgatcaatcgaccatatactcaaagtcgatacggcccagcgccacatcggcggcggccacctgaatcttcatcgaggagccgagcatccagctcttgccggtcagcgggtcgagcatgctcaccccgtcaatgacctgcggctcgcccttgcagagctgcgcggcgggcacaaagccctcgaccgtgttctccagctcgacaaagacgccgcgcggcgtgatgcccgcgaccgtgccggtatagacctcgcccagatggttgtgcatatactcggccttatacaggtcctcgacatcgcgctcgatgcggacggctgcgacctcctgcttgctggacttctcgctggcctgctgggcaaactcgttgaattccttctgcagctggctggcggacgcaccgagcagcatctcgctcaaaatgcggtgaatagcaaggtcgggatagcggcggatggggctggtaaagtgggcataatctgccagcaccagaccgtagtggccaaggggctgcggtgcgtagcgggccttctgcatactgcgcaggatgccggtgtggaccgggatctggatgggctggtcgcgggtctcatcgagcagggcggccaactccagctgtgtcggaatggggttcttgaacttggcgttcagcccgcaggcaagcagcgtggcggacagcttttccatcttctcggcatccggagcctcatgcacacggtagaggaagggcaccttgttggtgcggcctgcgttggcggcgcactggttggccagcagcatgaactcttcgatcatgcactcggaggtgccgcggtcgcgcttgacgatgtccacgcagcggccgttctcgtccatgacaagctttgcctcgttggactcaatgtccatgccgccgcgggccttgcgcagcacaaggcgcttgcggtacagctcgtccatggcgggcagctgatccagcacagcctcatacttggtcctgaggtcagtcaggtcggcgtctgtttcagattccgggggctccagcagagcgttgatctccttgtagacgcccttgacgcggctgcagatgacgctcttgacgaacttatagctgcggatctcgccgttctcgtccagacgcatcaggcaggagaacgccagacgatcctcgccctcgttcagcgagcagataccgttggacagctgggtcggcagcatcggaatgaccttgtcggcgtagtagatgctggtcgcacgctcataggcctcctcgtccagcgcagagccggggcggacatagtggctgacatccgcgatgtgaacgcccagctcatagccgtcctcaagcttctgcaggctgatggcatcgtcaatatccttcgtctcggcagagtcgatcgtaaagatgggaataccgcgcagatccagacgcttggcagcctcggtcgggtcgatgacggcgttatcgtatgcatgcgcctcctccagcacctccggcgggaattcctgccggacattgcggccgtagaggatcgccttggcacactcggaggcgtagtcggaggagccgaacttttcgaccacggcggcacggtggtcgctgtggcggttgccgcggtgggtgatgaggaagccgaccttatcacccagatgtacgccctcgctcccctgcttggccagcaggaacttcacatcacggcagccgtccggctcgaccgccatgcggccgtcctcagacaggcagaccgtacccgcaaagcggttgttggggacagtgacctccacgacctcaccctcagaggagccctccacgcggggatggtcgaacagcttgacattgatcttgtcgttgggcatcgcgccgtgcagggcgcgccccgggataaagatgtcgccctcgccgtcatcgcggctggcaaagccgaagcgggctgccagcttgaccagcgtgcagggaatggccgccggggcgtttgtgttctcataggtggcaaagcccggcacataggtgccgttgcgcatcgacagctcgccggtggcgaccatagccgatacgctggtgcgcaggcgggaattgtccacctgcaggttattctgcagttcacgcagcgtcatggggcggcgcttgactgcgtttaaaatacttttctgtaacggtgtcatgtgtactcctttaatttacgccgcaccgccgtccggcggtgcccttccgatatactcccacaaaaaacggcccgccggggcgctgcttgcaaagctgacgcgcttggcggacccattttgtttctttgcttaccctgcgagcatcacaggcgtgcgctcaggacgcagacgaccagcgtaacgacgaagaaaacaacgccgaaaaccttggtcagcttagccagcttggcgtccacgccgcgctcacggccggcagccatcgtagcagagctttcgcccatgatagcgccggacaggccctgacccttctgctcctgcgcgagggtaaagacgatgatcaaaacagacacgacgacgaggacgacgccgagagcgatctcataccagttcattgcttagcactccttctatttctatccacgccgccatggcgcgaaaagtctcatgcaccgtacagtatagcatagttttctgtgcgttgcaagcgcttttttcgcgtttttaaagcaattcagttctgaaaggcaattttctccccctgcaccagcggataacgcaccagccgagtgccgtccagatcctcacggtgcatatccaccgccgtgatctggtggttgccgtaggtcgtgtagtagtaaattcccctgtcggtgttgcagcagcttgtatacagcgtgatctcatacttgccgccgtccagctcacagcagccgcgctgctgttcgaccgcgtgcaagatgtggaagaactgccccacgctctcggcctcgctgtcaccggattttgagttcatcttgacgaatgccgcccgcacaaaacgggactggctggaaagatcccccggcaggcccagtccgcccagtccgcggctgtagaccggcaggtcaaggccgtccgcaaaggtattttcgggggtacggggcgacagcgcgcggtagttgttcagcgcaaaaagctgctgcgggaagggcgggttgtttgtcagcacgcccacggggttgtcgtagatatgcagcccatcggcggtggattccaccgtaatgctgccggtcttgtcggccacaagccagtgcagctgggccagcggcagctggtcactgaacgggatatttacaatgttggccttctccagcagggcgcgggcctctgccagcgttgcacagctgcccagcagccaagggatcagctcaaattgggtgatgttgtttttaccgtctgccgccgggtggtagacggcgttgcccacaaaattcagcccagcaacgccgaggcccttttcattgatggcatcgtaatacagcgggtactcccctgccacataggccatgccgatcatagcataccttgtgcggaaatcccccatgcagcgcagagcaaacggatggctgcgcggcgtgaccgtgacttcatccccgtaggagaattcatagtcaagattgcgtccaaaatagaaatctgctgtcttataagttgctgcggtacacatggcaaatgcccctttcctatttcctgatacggctagtgtagcacgcgggaggccggataatccaccataaattgtaaacaatccggccgtcagccgctcttacaggccggcaaccgagtcgatcggcatcgacataaagatgccctgcgccgcactgtgcataccgcagctttcacccaaggattgcataagggcgaccttgttggcagattccgtcaataccagaacgatttccttttcatcctgcacgctcagtccccaaaagccggttgcctcctcattgccgatgcgccggctgcggatgacggtgccgccggtggcacccgccgcgcgaaccgccttcatcacatcatcgctgaagccgctgttcacgatcgctgcaaccagagagtgtttcgtttcagacatactgttttcttcctttccgctggtattcagaacatccttgcctgcatcgtggtccagaatacgcaagatcatgttgtttgcaccgttcaaagggatcgtaaaagcaatgccgctgttggctttgtgcagctgcaattccgtatggagcttttccatcaaaatcagggacaaatgcttcgggaccatgctgaccagaacacttttgtcaatgctgccaaagccaagcatatccatgatctcgctggaggccgtcccctccgcattaaagcggtattgcagcggcagcgcccctttcctgaacatctcggctgcgtgttctgccagcttcggcgttgtgatcagcaccagcagctgaaatgacactttcttctcatgctccattttagtcgccctcctcaagatcaacgatcatgtcgcagtcatcggcgatagcagccggcacggtctgcgtccgcttagcggttttcagcttgtataccagccccataagctggatggcgatcagcggcgtcagggcaaccagcgcaacaacaccgaacgcatcggtcatcaggttaccgcccagtgcctcacatacgccgatgctgagcggcagcaaaaaggtcgaggtcatcgggccgctggcaacgccgccggagtcaaacgcaatgccgataaaaatatccggcaccaaacgggacagcaccagcgcaatgatgtacccggggacgacgagccactggatggatatgccggtcagcacgcgcagcatggccagaccgacactggctgccacaccgatctgcatacagcggttcatcattttgaccgagatggcgccgtttgtgacggcctccacctgatggttcagcacctgaatggcaggctctgctttgacaatgtagtagccgatcagcgcaccgacaggaaccaaaatccagcgcagcgatagccctgccagctccttgccaaggtaggcgccaacgggtgcaaacccgacattggcaccgcacaaaaacagcaccagcccaatataggtatacccaaagccgacgatgatgcgcttgatttgcagcccatggtagcggtgggtcagccattggaaaatcaaaaacacccagaggatcggcaccagtgaaagaagcacctccctggcgtagagcggcagcccctgcgcaaacacccgggcaacatcctgcgtggtgacaacggcggcaacatcggtaagggtgtaggccgcctcggtcggcttaaagaaacagccgaggatcagcaccgccagaatcggccccacgctggaaagcgccaccagaccgaagctgtcatttgccgcatttttatcgctgcgcaccgaggccagcccgacacccatggccataataaagggtacggtcattgggccggtggtgacgccgccggagtcaaaggccaccgccaaaaactccttgggtacaaacatagacaccagaatgagcgccagatagcaaacgatcagcagcatcgacaggctgattttatagcggatacgcacgatagccagcgccagaaacagccccacgccgacagccaccgtcatgatcagcaccatgttcggcacagacggcacctgccccgcaagaacctgcagatccggctccgacacggtaatgatgacacccatgagaaaccctgtcagcaggactgtaagcagttttttcattttggagatctgcacgccaacgccttcgccgagcggcgtcatcgccatctctgcgccaagctggaaaaagcccatgccaacgatcagcatcagggcgcctgtcaggaacatgactacgcttcccagctccatcgggatcagaaatatgctgagcatcaggacgatcccggtgatcggaagcacggcagagagcgactctctgattttttctttcagttttacattcaattctacgcccacctttcaacagagagttgttttttgcacggtaccttcggggcgccgcattcccctaaaagcacaccacgttgtgcatttgcgcgttcacgcaaatttctttaccttcattttacactacaaacgcccccgccgcaagttgtctgcggtaactgtattcattctggttttcctgaaaatgttttacaatgctccttgccgctctggtatcggcgcataaaaatttcccggtaacagaagcaaaattaccggggaaaggtggaacaaaaaaccgctgcaaaccccgaaaaaaggcttgcagcggtgctttctggcgtcccagagaggatttgaacctccgaccccacgcttaggaggcgtgtgctctatccagctgagctactgagactgatattcaatttcttgctgccacgcaagggtgctgtgacaaagctattatacctgctcccaacgcaaattgcaagtgcacaagagaataaaaccaagttgggggggcaacactgtaaaatgcagctggttcggttgccttttacagtgccgaaacaaagaaaaagtcgcggcaatatacttgccacgactcttttgtctggtagttgcagaaaggatacccccgttttggaatattccgcgggatatatggttcacatgtcatccaatatattgcgcaaatcctgaacaaatggttccatatcttcaaaaacaacttcgacaataattgaccaatttatgccatcgtagacatgaacaagtctatgctttaatcctgcaaccatattccaaggctggttcggatatctgctggcacgcacagactctaaaggccacttcatagcgtagccgatgtgcccactttcagaagaatgtgaatttacgcaaaatctatgaagtagaccacgtagaaaaagactgcaacaattgttgcagtctttttggtgaaacatcgggatctgccgtttggcctatgccttttcctcagattacctccaattcaagcgttttggccggcaggccttttgctttcaccgtgaccgtaatctttccgggggcatcgccgccgcggaccacggccaatgccttgccgtagtaggtcgtgtgggtatcggagaaaaagttttcccccatgttaggacgtgcagaaccaaggg

SEQ ID NO: 14039 - DNA, 6294 bp, Unknown
  gut microbiota DNA sequence
cctgctccatctgatcgaggagaccggctcgctgcgcagcgcagcggcgcagatggggctttcctactccaaggcgctgcggcttgttcagcacgccgaaaaagaactgggctttgccctgacctgcaagaccatcggcgggcggggcggcggcggcagcaccctgaccgccgaggcccgccaatttttagaaaggtatgaggcctaccgtgatgcctgtgtacagaccagccgcgagctctattctgcgttctttcctggccagcggtaagcgccatctgctgctgaccggcgggcgcggcagcggcaaaacaacgctgctgcgcgcacttataccctctctttgccccgatgccccagtgcttctcaccgctgctgtcccgggcagatgggtcgagatgcgcgatgccgccggggcagcggcggtcatcggccggtttgatgccgccctgccccccggagaaaaccggatgcgccccgtaccggccggctttgccgccgtgggactgcccgccctgcagcggatggcggcagccggcggctgggccgtgctggacgagcttggctatctggagagcggctgcgcggattttcaacaaagcgtgctggatatgttgaaagtctgccgcgttctcgcggtggtccgcaagcaggacaccccgttcctgcgcgcgctctgcgccgacccggacgcctttgtgtacgatctggactgtcctgtgccgccgctgggctgcatcgtcatggcctcggggctggggcggcggttcggcggcaacaagctgatggccgagctgaacggtcggccgctggctgcccatgcgctggcgctggccgccgcgccgatgtttgccgggcgcattgccgtgacccgctcagccgaggtcgaggccctctgccgcgcagagggtttccccgtgctgcgccatgccgaaccgcgccgcagcgatacagtgcgccttggcctgaccgcgctgctggcgcagcagcccggcctgcaggggtgtgtgtttctgccgggggatcagccctgcctgacccggcagacgctggaggcgctggcgatcggtgccgcgccggacacgatccggcggcctgccggacctgacggcacaccgggcagccccgtgctgttcggccgggattactttgccgccctccttcacctgccggagggctgcggcggcagcgccgtgctgcgcgcccacccgcaggctgtccgcctgctgcccacccccgccgccgagctgcgggacatcgacacccgcagcgaccttgaggcgctgcaagggggcaagggataaatgccgcatttttgatttattgtccgccgttttccacaaagaagcaccccggatgttgaaaccttcagcatccggggcgctctttttttactctttttccgacagggggatcaccgtgttgtcccgctcggtatagctgccgccgcccatgtgggggcggacgaaggggacgccgtcacggacatagaaggtgttctcctctatccgtgcgtccgggttttcggaggggctgatcgtgccgcccagatcgtcatagctgacattgcggcggaaggtgttgtgaatggcctcctgcaggcagaacatcacgcagccgccctcgttcatgcggctgtaattgtactcatacaccgtgccgtcaccggagtccgcatcgtaggccatgccgtcctgattgaggcgggtgtcaacggcctcattataacggaacaacgcgtccttgcacttccacggccagatggctgccgccaccttgcccagacggttgcccggctcgctgtagatgcggtcgttcatctcgcaggcaacggaatccgccgtgttgtgctcgaccagcgggcgcagcgcatacatgacggtgatgccgtcaccgccggccgccttgacatagttgtcgcggatgacgatgttctcatgcccgtatgctgcaaagggcttttcgtccagcgccgcgccctgaaactgtgcatgcgcgtaggtatagcccacggcgatgccccagcggctgacatgcgcgacatagcagccctcgaccagaatatccccgaagcgcgccgcgccggtggcggcctcgttctgcgggcgcagggcggtcatatagatgccgccgttgttcatgtgtttatcgtacacattgccgtttacatcatgcacctgcaggttttgcagcgtgatgccgcggcggatgcccttgtccttagccaccacagccacgccggtgcgctgcatcttgtcagcctgagagtaacgctccccgggcacagcctcggcgcggttggtgatctccagctcgcgcaccgtgacataggcggcatcatacagcagcacggcggaggaaacatagccgtgatgcacatgggtgggcgagtccagcgcacatccatagtcctgataccagatgccctgtccatcggcggcgatgcagggggcgcagccttcaccataagcgccgatggtgatggggctgccctcggtgccgctgcactgcagctgcaaaaactgcttttcaaagcggcagccgcgccgcagcaggacggtgtcgcccggtgccagcgcaaggcggttcaccgcaaacagcgtggcaaaggcacgatcctcatgcaggccgtcattctcgtcattgccggtcagcggattcacataatatgtcttgcacaagggcatcgtacacctcctcccgcatacgcttttcaatgatctggcgcgattcctcgtaggagaagctgtccccgaaatagcgggtaaacagatcgcagttcgcgtcataccacgcgcgggtctgttcgtcggtaaaatcggggcagacgccgagcgtgcggattttcccgcacggctcggcaaagtccagcttaaagcgggtcagctcaaattgcaggtaggccggggcggaaaagtaccgtgtgccgtataccggcgcgccctctgcctcgcggcgggatatttcggcatttttggcggcgcggcgcgcctccagcgcggcaggggtgtcgtcctcgatcagcccccagcgcttggccagcgtcaggcagccctgcgcatagcgccactccgccggggtcaaacagtaggtctgctccatcacttgacggcacccgtaatgccgttggcaaagctcttctgcaggcagaggaagatgatggcggtgggcagcgtgcagatcaggacgcccagcatcagcataccgtagtcaacgctgtagccgctcttgaggttggcgaccagcatcggcatcgtgatggagctgttgttctggaatacgatcttcggccagaggtagctgttccatgcgttcatgaaggtaacggtcatggcagcgccgtaggtcgagcgcatgatggggataaacatccggaagaagatgccgatctcgctcagaccctccagccgcgcggcctcgatgatgtcattggggaagctgcgcgcggcctgacggaacagcatgatcatgaacggggtcgagatggacggcagcacaaaggccgcccagctgttgacaaggccccagccggagatcatcttgaacagcgggatcatgatggcgacaaacggcagcatcatggccagcagcagaacgctcatgaggatatccttcgccttgtcgtgataaatctcaaagccgtagcctgcgatggagcagaccagcagtgtgatgaaggtcatcaggatcgcattgcggaaggagtttgtcatggcaagcgccagattctggttggcgaccagcgccttgaagttctcaaccagataggtgccggggatcagcttgccgcggataacatcaatgctggggttcgtagcgccgcacagcatgtagtacagcgggaacaccgataagaagcttgccaaaatcaggatggcgtgggtcagaatctttttgcccttagtcacgcttgtcacctactttcatctggatcgcggacagcacggccactacaacaaggataaacaccgacagggccgccgcatagttgaacttgggcgtctccacaaaggagatattgtagatataatgcgtcagcgtcatggtcgccttaccggggccgcccgccgtcaggttgaccgactcgtcaaacagctgcagcgtgccggaggtggacatgatggcggtcagcagaatcgtcggcttgagcagggggatcgtcaggtggatgaactgctgcagtggggaggcgccgtcaatacgggccgcctcatagatcgagtaatcaatgttctgcaggccggccagatagaacaccatgttgtagcccgtccagcgccagaccagcgcaatgacgatgacccagcgcgcagcccatgcgttctggaaccaatccactgtggggatgcccacggtggacagcacccggttgacaaggccatcgttggcaaacagcgacttgaagatcatggagtaggaaaccagcgaggttgcacacggcaggaagatcatggtgcggtagatgcccttgcccttcagatcggggctgttgagcagctgcgccaaaaccagcgccagaatcagcatgatgggcacctggatcacaaagtaaaataccgtgttgaacaggcactgctggaaggtggcgtcctttaaaatgcgcgcgtagtttgcaaaacccgcgggctgtacattgctgcccatacccttctggaacgagaggatcagcgcctgtaccatgggatagaagcagaatataaatatcaggatcgtagcaggcagcagaaacgcccagccgatcaggctgcgtttttgctccatatcaagtccttttttcttcatcgtagtgtctcctattttgccacaaaagcaagggcgcggcttgcagcggacgtatcagatgcaaaccgtgcccttggcaaattctcagttgtaaccggacacagtgtgtgtcatgttttgcttagccagcgatattgaactccacggtatcctgggcgttctgcatctcgctgtcaatgtcggcgttgttctggacgatgttggtgacggcatcggtcagggcgctgcgcacgtcagagtagtaagcgccgcagtcgaatgcgggaaccttgcctgcaaactcaacgatgtccttgtaaacggtctggccgccgtagaactcggaaggctggttgtagacgtcgctctcggcagcgggcaggtagctggcgatagcaccggcgttgggcagcaggtcgtcatacagctcgacgctggaaccgaaggtgctcttcaggaagtcgaaggccagctcggtgttcttgcagttggaggaaacggcccagcttgcgccgccgcagtttgcgtagttggtggcaccgtcgatgccgtccagcttgggcatattcacgatagcccacttgccggactgatccgcggcagcctgcacgctggacatgatccagcagccgttgatgacgccggcagccttgccgtcattcatggaagcaatgtactggtcccagtcggtgtactcggccagaatgcccttgtcgaccatgtccttgtagacggtcagggactctttcagcgcggcattgtcggcgatcttgacctcgccgtccaccacgggggaggcaccggcagactgcatcatctcgatgatcagctcggaaccgccggaggaggtcagcatcggcacgccgttggcgtccacgaccttctgcgccttctcctcgaactcgctccaggtcaaatccttgaagtcatcgacggtcagaccggcattctcgatcatatcggaacgaaccgccatgacggaagcgccgttgtcgaagggcagaccgtagtggtggccatcgacggtagaatcagccagcttgccgccggagaacttgtcccaatccaagccggagtcggtcaggtcggtgtagatgccggggaagttggcgaccatcttgtggaaggagtagtcctgcatcaggaagatgtcgggcagggtgctgtagtcctcgctggtggcagcggtgatcagcttggtctcgatgtcgctgtagacattctcctcaatgttcagcttgaagttggggtgatccttctggtagatggcctcagcctgcttcagcgcatagatgttgaagttggggtcccatgcccagacggtcagggtctcgtcgccgtcagcggtggtgtcggcggcagtggattctgcggtggactcggcgggcttgctctcagcggcagaggtggtttcgctactggcggcaccgccgcagccggccagcatggatgcggccatagcggcggccaaaagggctgctgcattcttctttttcatagtggtttcctccttggaatttctccattctttat

SEQ ID NO: 14040 - DNA, 2104 bp, Unknown
  gut microbiota DNA sequence
caagcggatcgcgctgctggtcggcagcacgagctacgccgtcaacaccgaccgcacgcgcggatacctgcgcggctttgcagaatcctgcgtgccggtggaccaacgccttgttcattccggcattaaatcaacagggcagaccattgatgcgctggaggcgtcgcttgagcaaaaggcggactgcctgctctgcggtgacgatgagattgcctatgaggtcatgcgagagttgcgcaaccggcatattctggtgccgcacgatctgcgcgttgccagcctgtatgacagctcgatgctggccagtatcacgccctcggtgtccgcagtgcagtacgatgccgagcagctggggcgcacggcctgccgtatgctgcttgaccgcctgcttggcaaggaaatggtgcagcgccaaattgaggggtatcaggttattttgcgtgagtccaccaaatggaatagccgtacccacgatggacgatagcccgcgtccctctatgggataccccgcagattgtgcagcaggggaggtatgctgtcctgtaatctttctgaaaatatatagcgcttccggcccccggttttacgccaaaaccgggggctttttttggagaatacacgcctgttgcgcaaaagttgcgcgtaaagtgggctgtgtcacgggtttttccgtcagaatttccagttttcgggatgtaataccgtgaatatcacccattgacggaggcttgaaaagagagtattctatgtttgtaacgagggggtgctcaaatgtgcgcaacataagtgcgcaacttttggcaacataccacttccaaaatcagaaatgaaggagaactcgatcatgaaaaaatggatttcccgtcacaacgctcttgctgctgtgagcaccgtgacggcggccgctatgctgaccgcctgcggtggtgctgcatcttcctctgctgcgtcctctgccgcatctcaggccgattccgctgcgtcctccggtgaggcttcttccgccgcagaaagctggggcgatgttaagctgaccatgtggggtgctgaggaagaccagaccatgctgcgtgagatggccgatgccttcatcgcggagaatgccgacaaaggcaacgttacgatcgagatcggcgttcagtccgagtccagcgccaaagataccgttctggctgaccccgaggcagctgccgatgtgttcgcctttgcggatgaccagctcaacgagctggtggcagccggtgccctgcaggaaatcctgctgaaccccgaggatgtcaagagccgcaatctggctggctccgttgaggccgcgaccatgaacgacaagctttacgcctaccccatgaccgccgacaacggctacttcctctactacgacaagagcgtcctgagcgaggatgatgtcaagagcatggacgccctgctggccaaggccgatgcctccggcaaaaagttcatgatgagtttgaacgatgcttggtacatttacagcttctacgccggtgccggcctgaaggctaccctcgccgatgacggcatcaacaccgtctgcaactggaacgaggcccccggtgccgatgtcacgcaggcaattctggatatgagcgcccagtccgccttcaagtccggtgcggatgcagatatcgtttccggcatcaaggacggcagctgctgcgccgccatctccggcacttggaacgccaaaaccgcgcaggatacctggggcgataactacgccgccaccaagctgcccacctacaccctgaacggcgagcaggtacagatggcttccttctccggctacaagctggtcggcgtcaacccccacagcgccaatgtcggtgttgccatgatgctggctgactacatcaccaacgaggacaatcaggccaagcgcttcaatgaccgtcagctcggcccctccaacattgctgtgagcaagtctgaggccgtgcagagcgcgcctgccatcgccgcactggctgagcagagcgactacgccaccctgcagcgcgtaggtgccaactactggagctccgctgcaagcctgggcgagatcctggtttccggcgatacgcagggcaagaccacccagcagctg

SEQ ID NO: 14041 - DNA, 18141 bp, Unknown
  gut microbiota DNA sequence
aggattatatggccgtgaccggcgcctgcctgatgacaaaggcatcgctgtaccgcgaatgcggcggtctggacgaggagaagttcgctgttgcctacaacgatgtggattactgcctgaagctgtggcagaagggccttttgaatgtttacaccccgcgcgccgaggcataccattatgaaagcaagagccggggccttgacacattaagtgaaaacgcccgccggtacgagcgcgagaaagcaaatttctacgcaaaatatcagcagtatatcgacaattacgacccctattacaacccccatttcaacaatttgtttgaaaatttcgggttgaagtgaggaggtgttttgcatggaaaataagtttgatacccagtttttaatcgaaggccacggcctcgacgaggacgccatccacgacggcattttgaacagcgccaagggcgattgcctgttggtcgtcggcgacgaggatgtcgtcaaggtgcattaccacactgacaccccgtggaaggttttggagtacgccgccgccctcggcgaattgaacaccatcatcgtagaaaacatggagcgccaagcaaaagggttgcacgggtaaattggcaaggcgcaaggttaaccgcctgacggcgtatgattacgcccaaaacggtgcgtatttcatcacgatttgcacgcatgggcggcagaaaattttgtggaaaagcgatgtccttacggcggttgaggatgtaggggcgcacagtgtgcgcccgcgccttgccccggagttatcgccttacgggaaagccgttgaagatgccattttgcagatttccattcggcatcccgcagtaaagttaataaaatatgccgtaatgccaaatcatgttcatttattgttgttgattcagcgggaacagggcgggcgcacactgtgcgcccctacaatttcactggtcatcaaacagatgaaagaggctgtcacgaaagcgattggctgccccatctggcaaaaatcctttcacgaccacattgtgcgcaccgagcacgggtacgcgcagatttggcagtacatcgacacaaacccccaaaactggcacaaagattgcttttatgaggagccaccccatgagccttgaaacaaaacgcatgaaagagctgttcggctatgcgcggaccctgacaaaggaacagggtgtcggcgtcatggccgggcgggccgttggcttttttaagcggcggttcttcggcaaaaaggcgcggtacctgccgtcaaagcagacgctggacgcccagcgcgccgatgccgccgcaaacgccgcaggctggccgaccatcagcatcctgaccccgctgtacaacacaccgccgcagtttctgcagcagtttctggacagcgtgcaggcccagacggcgcccaactggcagcttgtgctggtcgatgccagcgatgacgcccacaccgatgtcggcagggctgtgcaggcgcgcgccgcgcaggattcccgcatcgtctatgccaaaatcaaaaatgcgggtatcgccgccaacacgaacgaggctgctaagctcgccaccggcgactatttagcgctggccgatcacgatgacatgctggccccccacgcagtgtactgcatgagcaaggccttggccgaaagcggcgcaccctttgcctacagcgatgaggccctgtttgagaaaacgcccgagcatccgcgtgtcggccacttcaagcccgactacgcccccgaatacctgatggcggtcaactacatctgccatctgaccgtattcaaaaaatctctgtttgacgcggtcggcggcgagcgccctgcgtgtgacggcgcacaggatcacgatctttttctgcgccttgtggatgagatgcagcgcagtgaccctgccgccaaaccgctgcacatcccgcaggtgttgtactattggcgcgtgcatgcggcatccaccagcggcggcacggcagccaagccctatgttgagcaggccgcgcagcgggccgtagccgaccatctgaccgccaccgggcggcggggcagggtggaggccgggcttttccccggcacctgccatgtggtgtgggatattcccgagccggagccgctcgtttcgatcctgatcccgaacaaggatcacaccgatgatctggaaaagtgcctgcacagcatctacgccaaaacgacctatgaaagcttcgaggtcatcgtcattgagaacaactcgaccgacccggccacggcagactactacaaacgcctgcccgaccggtacgaccatgcccgcgttgtgacctacaagggcgggttcaacttcagccgcatcaacaatttcggccgtaagtacgcggcgggtaaatacctgctgctgctcaacaacgatgtcgaggtcatcaacggtgactggctcacccagatggtgggggagtgcagccagcccggtgtcggcatctgcggcgcgatgctctactatcccgatgacacgatccagcacgccggcatcatcacggggctgggcggctatgcaggccacagccacaaataccacaagcgcggcggcagcgggtacatgttccgcttagccaccgtgcaggatctctccgctgtgaccgccgcctgcctgctggtgcgcaccgccgtctatgatgccgcccatggtctggacgaggagttcaccgttgcctacaacgatgtggacttctgcctgcgggtgcgggacgccggctggcgcatcgtctggaccccctatgcacagctgtatcactatgagagcaagtcccgcggctccgatgaaaacgacccggccaaaaaagcccgctttgacgccgagcatgaccgcctgtatgcggtccacggacgggagaacatcctgcatgacccctactacagcccgtccctctccctcgattacgaggatttccgcgaaagcggcgatttgaggaatctgaaatgagttgattgccttcccctgtgggggaaggtgcccgaggccccgaccgagggcggatgaggggcgggtttgccctattgcccgtcagtgggaaattcccggtaagtttgcccctcatcagtcagcgggcggggccgctgacagcttcccccctctggggaagccatactgacaaaaaacgcacgccgtaaatttcacggcgtgcgtttttattattcttttttatccggcgggaattcaccctgcttttcggcctcgaggcggctcaggcgggcctccagctcggagatgcgctggttgacgatatccggcagatcctgctggtcgaggtcgtccgccgggcagcacttgatattgcccacacgcacgatctccgccgggacgccgaccgctgttgcgttggcgggcaggtttttcagcaccacactgcctgcacccacgcggacattatcgccgatgtagaccgggcccagcaccttggccccggcaccgatcagcacattgttgcccagagtcgggtggcgcttgccggtatccttgccggtgccgcccagtgtcacaccgtgatagatcgtacagttatcgccgatttctgtcgtctcaccaaagacgatgcccatgccgtggtcgatgaaaagcttgcggccgattttggcaccggggtggatttcgatgccggtcagatgccgcgccagctggctgacaaggcgggccagaaaaaagcagcggtgacggtacagaaaatgggcgatcttatgtgtcaccagcacatgaaagcccggatacagaatgatgacctccgcgacattgcgcgccgcagggtccttatcgcggatgttttttgcgtcttcccaaagccccataattcttttcctctttgctttacgatacttgtttattagtatatcacaatcccgggcagagtgcaacgcgggatcgttgcggttccttcaacttttcccgcagcaccgcccttgcaaaatgccgcgctgctttgtatactgatagtatcataaaagaaaagaggctgcatggtcatggatcatcagaacatccgctttcacaatgtcgaggagctggagccggtcgagggcggctggctgctccgccgcgtcggtgccgcggcacgcgcccgcatcagccccggtgtgcaggaaaactgctttgccaccggcattgagctgcgtttcacgatgccggatggcgcagtcgatctgctgctgaaaaccattcctcaggccgaggccgccaccgcccacatcttcttcggctcatttcagggcgggtgggagtactcctccaaaaacatcggcgcggatgtgacccgcatccacatcgaatacccggccaagctcgccacgctgcgccgcatcacggcggaaaagcagcttgcctttgcgcccgaggtcgtgcgggtcgtgctgccctatgtgccggtgatcttcgcaggggtcgagggccggaccgccctgcccgccgccgaccagctgccgcagaaaacctatctggcctacggctcgtccatcacgcacggcagcctctccctgatccagccggattgctatgtgttccgcaatgcgcaggcgctcggggtcgattatctcaacctcggctttgccggcaacgccctgatggaggaggagatggcaaactacctcgtatcgcgcagggattgggactttacctcggtggaaatgggcatcaacaccgccgagcgggtgaaggagttcccgctcgaggtgtttgaggagcggatcgaccgtttcaccgccgtgctggcccgcgatccgcgcccggtgttcgcaacctcgttcttcggttatctggacgaggacaccgaccgcaccgataaaatgcgccggattgtgcggcgctacgccgccgagcggctcatctttaccgatggcctgcagctgctggacgatgagacccttatctcggcagacggcacccaccccgatgcccgcgggcaggagcagattgccgcgcgctggagccgcatcatggcagaaacgcttgccaaccgcacggcgcggtgagttttctgtgcgtttatcattttgtacaaaactcggcgtaaaaatccataaaatccttactttcgcaatccgggcgtttgcattgacactgccgtccctacatggtacaattaagtaaaatccatgtaagaatttggggaaggagtgcgccgcaatgatgatgcagtttgtttcttgcttcaaaattcacggtgccgtgttttttcccgttttcaaaaccggtgcttctttttgacttttcccgtccgggaaaagtttttttttgcccaaaagcgcgcccgcagaggcgggctgaaaatctggtagagtatatctcaggaggttcccactatgctgatccgcaacgcaagggactgtgcaggcaagccgatcgaggtctggctgcacgacggaaaaatcgccgctgtcggtctgggcctgcttgtcccggagggggaggagctgctcgacgccaagggccgcacgatcctgcccgccttccttgacacacactgccattggcgcacccccggctttgagtataaggaggatatctccaccggctctgccgcagccgctgccggcgggtacaccttcgtgaacctgatgcccaacacaaagccggtctgctccagcgccgagatcgcccacgccgttgaggccgaggccgcccgcgtagggctgtgcgatgccaaccagaccgtctcgatcacgaaggactttgacggcaaaacgctcgaccacctgatgacgctgcccgaggatgtcaaattcatcaccgaggacggcaacggcgtcatgaacaacgccgtcatggcgcgggcgttcgccatcgccaccgagcgcggcctgaccatcatgtcccacgccgaggaccgcgagatcagcccgtgggactaccgtctggcggaaaacatcgagaccgtgcgcaactgccatctggccgaatactacggcacccggctgcacatgtgccatgtttccaccaaggagtccgtggacgccatccggatgagccgcctgcgcggtgcgcgtgtcagctgcgaggtgacccctcatcacctctggtttgacgacagccgcctgcagtacaaggtcaacccgcccatccgcaagtcggaggatgtgaccgccctcattgaggccatcaaggacggcaccgtgacctgcatcggcaccgaccacgccccccacaccgccgaggaaaaggagaagggcgccgccggcatggtgggccttgagactgccttcggcgtctgctacaccaagctctgccgcgagcagcgcctgccgcttgagctgctcagcttcctgatgagcgccggccccgccgccgtgctgggactggccgaccgcaagggtatactggagccgggctatgatgccgatgtcgtgctggcggatcttgaccacatgtatgaggtcaaggccgacgagctgcacagcaagagcaagaactgcccttatgacggtgcgctgctctacggtaagatcgtgacaacgatcaagggcggaaaggttacgttccagattgaagagtaacgccacttcacgcacaaaacacccgtaggggcgcattccatatgcgcccgtgcaaggctgccgctggcacagccccgcgggcggatatagaatccgcccctacgatttccaacattatatacattatattgtagagccacaatttgtatacatcaaacggaggaatcagcatgcttaccaacatggacaaactgtacgagagcgttgccgcgaacggccctgtctgcgtgggtctggataccgaaatcagctacctgcccacgaccgacatcgccaagacggcgggggagaatgtggtcgaattcaaccgtgccctgatcaacgccaccaagggcgtggccggctgctacaaggtgcagatcgcctactatgaatccctcggtctggacggcatgcgcgcctacgccgagacgctgaagcttgcacgcgccaccggcctgccggtcattgccgacatcaagcgcggcgacattgccaagaccgccgagatgtacgccaaggcgcactttaccggcgactttgaggccgacatcatcacgctggccccctatatgggccttgactcgatcagcccctatctgccgtactgcgccgagcagggcaagggcgtctttgtcctgtgccgcacctccaaccccggcgctaaggactttgagtacaaaaagcttgatgatggccgccatgtttacgacctcgtcggcgacagcctgactgccctcggcaaggactacatgggcgagcacggctactccagcatcggtctcgtcatcggcggcacccataccgaggaggccaccgccatccgcgctgcctacaaggacaccttcttcctgatccccggttacggcgcgcagggcggcaaggcagccgacattgcccagtacctgaccaagggcaacggcggcgtggtcaactccagccgcggcatcctgctggcctacaagaagcagcccggcgttgcctttgacgaggccgcctacaacgaatgtgtgcgtatgcgggaggatattcagggtgaatgcaacaagctgtgatctgaaggtcctgcggcaggagactgtcgcagctgacatcatgcgcctgacggtccagtggcaggaccccagccgcgagccccatgcggggcagttttatatgctgcgcgcctgggcagccgatgccacgccgattttgtcccgccccatcagcgtggatgacttcgacaaccagaccggcgcgctgacctttttgtatcaggtcaagggcgagggcacccggaagctggccgcgctggcagcaggggacacgctgactgtgaccggcccctgcggcaacggctttgacaccgccgcgctcgcgtctgcccacaagcgcatcgccgttgtcggcggcggcatcggcaccgcgccgctgctgctgctctgcaaggagctttgccgcgccggtgtgcggcccgacctctatgtcggcttccgcgatgcctcctacggcatggagagctttgtgccttggtgccacagcatccatctggctaccgattccggcagtgaggggcaccacggccttgtgacagacctgctggatgttacccactacgacattgtgctgacctgcggcccgatggtcatgatgcgcggtgtggcgaagctttgcgctgctgccggcgtaccctgcctcgccagtctggaaaagaagatggcctgcggtctgggtgcctgcctcggctgcacctgccacaccaaaatcggccccgtgaccgtctgcaaggatggcccggtctttaacgcacaggaggtgtttgactgatggcagatctgcatgttgattttctcggcaagcgtctggccgggccggttgtggctgcgtccggcaccttcggcttcggccctgagtatgcgggcatcgaggatctgcggctgctcggcggcatctccggcaagggtctgaccctgaacggccagcccggcaacgagggggagcgcctgtacgagaccccctccggcctgatgaattccatcggcctgcagaaccccggcgtgcagcatttcatcgaccatgagctgcccgccatgcgccgctgcggcaccaccgtctgggccaacctcggcggccacaccatcgaggaaaatatcgagggcgtggctatgctctgcgccgccggcgtggacttcattgagctgaacatcagctgccccaatgtcaagcagggcggccttgcgttcggcatccgcgcgcaggacgccagcgaggtcgtttccgccgtgcgcaaggtctgcacggtgccgctcatcgtcaagctgagccctcaggccgagagcatccctgagatgtgcaaggcggtcgaggccgccggtgcagacgccatcagcctgtgcaacacctttcaggcgtgcgcaatcgatctggaaaagcgccgtccggtattcaacaacacctttgcgggcctgtccggccccgccgtgcggcccatcgccctgcggatggtctggcaggccgtgggcgccgtcagcatcccggtcgtgggtctgggcggtatcctgaccggccgtgacgcgctggaatttatcatggccggtgcgacggcagtgcaggtaggcactgcgaacttccttgacccgaaggcctgcacccgtatcaccgccgagatcggtgcatggatggatgcccacggcgtcaaaacgctggacgagatcagagggtgcgcacggtaaatcaccggttgccttcccctcaggggggaaggtgcccgaggccccgcccgagggcggatgaggggagagtccccgcaaccgcccgttcacgggctataacggcaagcccggccctcatcagtcggcgggcgggccgccgacagcttcccctcaagcgggaagctgtcaccaagataagcattcatatatcttgcagttttatacgaaatatgctatgattacacaaattatatacaggaggaacatactatggcacgcgaagcacttgaagttttgaaggaatgtgaagcatttttggagggtcacttcctgctgtcctccggccgccactccggcgcttactgccagatggcctttctgcagcagtaccccgataagtgcgccgaggtcatggccccggttgccgagaagctgaaggagctgaacattgatgtcgtgatcggccccgccatgggcggcatcgtctatgcctacgagctgggccgccagatgggcaagcgcgccatcttcaccgagcgcgtggacaatgttatgaccctcaagcgcttcaagctcaaccccggtgagcgctgcatcattgccgaggatgttgtcaccaccggcatttccagccttgagaccaagcgcgtcatcgaggaggctggcggtgtctgcgtaggcattgcctgcgttgtggaccgcacccgcgccgaggctccgtccccgattcccatcgtggccagcgccctcaagctggacctgcccaactacgcccccgaggagtgccccatctgcaaggagggcaagctgcctctggtgcatctgggcagccgcaagatgaaagaggccgccaagcaaaccctgtaagcgttgcttatgcaaaggcaacaccgcacaattcccgcctgacggcttaagcaccgctccggcggctacggcacggcatctgcgttgccaaaatgctcgataatacacaaagtattatctgcgcttttggcttagcagctgccgcacctcgctcgccgtatcggcacttagaattatgcggtattgcccaaataatactaggagataattatgcaggcatatctgatattggcaaatggccgggttttccgcggtgtcagcgtgggctgccccggcacaaccatcggtgaggtcgttttcgccaccggtatggtcggctttgaggaaacgctgaccgaccccagctactacggccagatcatcacccagacctaccccctgatcggcaactacggcatgaacagcgaggatgtcgagagcggcaagatctgggccaagggctatatcgtgcgcgaggcatgcaaaaagccctccaacttccgcagtgaggaaacactggattccttcctgaaaaagaacggcatcatcggcattgagggcatcgacacccgcagcctgacccgcaccctgcgcgagagcggcgtcatgaacggtgccatcacgactgagttcgaccccgatgccgagccggagaagaaggcggcgctgctgcctgagatcgccgcctacgctgtcgtcaacgccgtcaaggccgtcacctgcagcgaggcaaagacctatgagccgaccgcggccggtgcctgcggcgacaccccgctgcatgttgccctgcttgatctgggctgcaagaacaacatcgtgcgctgcctgcagaagcgcggctgccgcgtgaccgttctgcccggcaccgccaccgccgcacagctggccgcgctgaatcccgacggcctgatgctctccaacggccccggcgacccggccgaaaatgtcgagatcatcgccaacatccgtgagatgctcgacaccggcatcccgaccttcggcatctgcttagggcatcagctgaccgcgctggccgccggtgccaagacctgcaagctcaagtacggccaccgcggcgccaaccagcccgtcagccatgtcggcaagggccgcaccttcatcaccagccagaaccacggctatgcggtcgaggctgagaccctgcccgcggaagtgggcaagatgagctacttcaatgccaacgacggcacctgcgagggtgttgactacttccgctggaactgctttacggtacagttccaccccgaggccaacggcggccccaaggacaccgaatttctgtttgacgagtttgtcagccacatgctggctgcgaaaggagtgatcaacgatgcctaaggacccgcgtatcaaaaaggtgctggtcattggctccggccccatcatcatcggtcaggcggcggagtttgactactccggcacgcaggcttgccgcgccctgaaatctgagggcgtcgagacgatcctcgtcaactccaaccccgccaccatcatgaccgaccctgacattgccgatcatgtttacattgagccgctgaccgccgaggtcattgagcgcatcatcgagaaggaaaagcccgatgccatcctgcccaacctgggcggccagatgggcctgaacctctcgatggagctggcccgcagcggtttcctcgaccgcagcggcgtccgcctgctggcctgcaagcctgacacgatcgaccgtgccgaggaccgccagctcttcaaggacacgatggaaaagctgcaccagcccattatcccctccaaggtggtcgaggatctggacgatgcgctggattttgccgaggtcatcggctatcccgtcatcgtgcgccctgccttcacgatgggcggcaccggcggcggcatctgcgaggaccgcgaaaagctgcgcgagatcgccacgaacggtctgcgcctgtctcccatccaccagatcctcgttgaaaagtgcatctccggctggaaggagatcgagtatgaggtcatgcgcgactccaagggcaatgtcatcacggtctgcaacatggagaaccttgaccctgtcggcatccataccggtgactccatcgttgtggcacccagccagaccctgtccgacaaggagtaccagatgctgcgcaccgccgcgctggacatcatcaccgagcttggcattgagggcggctgcaactgccagtttgcgctcaagcctgacagctttgagtatgcggtcatcgaggtcaacccccgcgtgtcccgctcctccgcgctggcctccaaggccaccggctatcccatcgccaaggttgcaaccaagatcgcgctgggctacaccctcgatgagatcaccaacgatgtcaccggcgagacctgcgcctgctttgagcctgcgctcgactatgtggtcgtcaagtacccgaagtggccgtttgacaagttcgtctacgcggacaaatccctcggcacccagatgatggccaccggcgaggtcatggccatcggcaacaactttgagcatgccatgatgaaggccgtttcctccaccgagctgggtctggacacgatgacgctgcccgactttgagaagcttcccaccgaggagatcatcgagcatctgcatgtgcaggattccgagcgcgccttctgcgtctacgaggccctcaagcgcggcgtgccgcatgagacgatctacgacatcaccaagatcgactggtggttccttgacaagctgcagcatctggccgacatcgagatgggcctgaagaacggtgaactgacgaccgagaagtacctgaacgccaagcgcttcggcttcctggacaagaccatccgccgtcttgccggcgtggacaccctgcccgaggccccgaaggccgcctttaagatggtcgatacctgcgccgcagaatttgctgccaagacaccgtatttctactccacctacgatgaggacaacgaggccgcacagttcattgccgagcgcagcgaccccaacaaaaagaaggtcctcgtctttggctccggccccatccgcatcggtcagggcattgagttcgactactgctccgtccacgctgtctggacgctcaagcagcacggctgcgaggccgtccttgtcaacaacaaccccgagacggtctccaccgacttcgacaccggcgaccgcctgtatttcgacccgctgaaccccgagagtgttgaccacatcatcgagaccgagaagccggacggctgccttgtccagttcggcggccagactgccatcaagctggcaaagcacatggacgagatcggcctgcccattctgggcacccctgccgatgccatcgacgaggccgaggaccgcgagcgctttgacgagctgctcgagcgctgcggcatcccccgcccggagggccgcactgtctttacgctggacgaggccctgcaggctgcgcaggaggttggctacccagtcctgatgcgtccgtcctatgttctgggcggccagaacatgatcgtggcctacaattccagcgacgttatcgagtacatgggcgtcatcacgaagcacgttgacatgagtcaccccgtgctgatggacaagtacatcctcggcaccgagtgcgaggtcgatgccatctgcgatggtaccgattatctggtgcccggcatcatgcagcaggtcgagcgcaccggcgtacactccggcgactcgatctgcgtctacccgcccacgaccttcagccagaaggtcattgacacgctggtcgattacactggccgctttgcccgcgagctgaaggtcgtgggtctggtcaatgtgcagtatgctgtacagaatgaccgcgtctatgtcatcgaggtcaacccccgttcctcccgtaccgtgccctatatctccaaggtcaccggtgtgccgatggtcgatctggccgtgcgctgcacgctgggcgaaaagctcaaggatatgggctacggcaccggcctgtggcgcaacggcaagagcccctactacgccgtcaaggtgcccgtctacagcttcctgaagctgcatggcgttgacacgatgctcggccccgagatgaagtccaccggcgaggttctgggcattgccccgaccttccacgaggccatgatgaagggtctggtcgcagccggctatcagttcaagacccccggccccggctcctgcgtgatcatctcggtcaaggacagcgacaaggcggaggccgcccagctggcgtggaagctacatgactacggctacaagatctacggcacccccggcacggcccgctacctgaacagcgagatggtgccctgcagcgttgtccgccagatgagcggcgcgcgcccgaatgtcatcgacctgctggaaagcggattggtggattacatcatctccaccagcccccacggccgtgacccgcaccgcgactctgtcaagttccgccgcaaggctacggagctgtccatcccgaccatcacggctctggacacggcccgtgtgctggtcgatgccctgcgcggcgaccatgacatcagcgaaatggagctggtggatgtggctaccctgcaccgcgaggctgcaagcggtaaataatggctaacgcaaacgcctgtgcctgtaaaagggtgcaggcgtttttttggctgaatgtagcgccggcaacagcccataacacccccgctgcgcgctgcctgccttttggatatttttacatagtgcgtgcattttttgccaaatgccactttttgatggcctgcactgcgaaattttagagtttttgacgaaaaacacttttttcgtcaaaaactcttgattctgcgcacaattttctctataataaacatcgtaataacaacgggcattgtgtgcctatacggataggagttagaaatatcatgacgagatctcagttgattaccaaggtagccaacgacaccaacatgaccagcgccgaggtggagaaggttatggacggcatcttcgggaccattggcgatgtgctcaagagcggcgacaaggtcacgatcgcaggcttcggccgttttgagatgcgtgagcgccagaccaagaatttcaccaaccccaagaccaaggtcaccagcaagctggagcccaccgcgatccccggcttcaaggccagcggccgcctgaaggagaaggtctccggctgatctcgtcaggattcatacagcttttgcggacccgcataacagcgggtccgttttattgcaggcatcaaaaaacggagcatcgctttttgcgatgctccgttctcttttttacagatggatatgccgcggcacgccgttgatatagatgggcgtcagctccgcctgaatgagcgggcgggcatagcgctcaaagttctcattgacatgcataccgtcctcggtgatccagtccagcgggaccttcttctcaaagtttgcgaccttcgtcacatcgaccatctcggtttctgcgcggtagggctggtcgctcttgcgcttgatggcggccatctttgcggtctcaccgcgcatggcggcctcgaccgcagcaccgccgacctgataggcctcggtaatgtcagtgcggcttgccagatggctggcgcagcgctgcagggtagagaactcgattgcgcgggtcttgcagcccagacgcacccggatcaagtccgccagataacggctggtgccgctcaggatcgccttatggccgaaggcatcaagctgcccggctgtggagacaagatcgcagaggaacacgccgtccttgttcttgacgccctcgctgacggcgatgataacattgtggcgttccttctccagctctgcaacccgcttgaggaaggcctcctcatcaaaggggcgctccggcagcaggatcaggtcggggccgttgcagtcgggaccggcggccagactggccgctgcagccagccagccggtgtggcggcccatgatctcggccaccgtcacgctgcgcaggtcgtacacgctggaatcgcagatgacctccttgaggatcgtggcaatatacttggccgcgctgccgtagccgggggtgtggtcggtcagcatcaggtcattgtcgatggtcttgggcacgccgataaagcggatatcgctgttgacggtcttgccgtaggcgctcagcttggagatggtgtccatcgagtcgttgccgccgatatagaacaccgcgccgatgtcatacttggcaaacagctcaaacagccgcaggaacggtgcctcgtccacggtgggatccggcagcttgtggcggcagctgcccagaaagctggacggcgtgcgcttgagcagctcaatatccatcttgtcacccagtacgccatccagatccaccagcttttcctccagcagaccctcgatgccgtactgcataccgtagacatggggtgcgccgcaggccttggctgtctcatagacgcccgccagactggagttgatgacggcggtcgggccgcccgactggcctaccagaacattcttcataactgtacctcgcgttatattttatttaaatattacagagcgtatttttctattgcctttgccacgccgtcatggttgttatcatcggtcgttgcatcggcaatttccttaatgtcatcggtcgcgttgcccatggccacccccagcccggccgccttgatcatggcgcggtcgttgccggagtcacccacggccatcgtctgctcccggcgcagacccagatgcgccgccagcgccagcaggccgctgcccttcgtcacaccgggagcgttgatctccatgttgccgggcaggctggaggtcagctccatgccggggcaggcggcctcgatggcacgccatgcggcatcgcgctcggcctcattgtggtagatcatgctgtatttctcaatctcatgggcatgcgcctgcagggtggtgcgcatgtcctcgacctccacgcgggtcgtgcggaaatattcccgaagattttcgggcaccacatccatgtgatgcgcagcgttttcgcgggtcgtgtagcttttgccgccgataaaaatactcagcatcccgccgtaccgggcaaggatgtcatagatcttcagcgcatcggcagtggcaaacggctgctttacaagctgctgcccggtctgcagatccaccacgctggcgccgttggaggtcagcgcataccgtacaccgggtatcgaggtgaacgcggccgggatgccgctggccgtgcgcccggtggcgggcagcaccgctacaccgcgcgccacggcgttgcggatcgccgccagcgtgcggggggtgatctcctttttgtcgttaaaaactgtaccgtccagatccaatgccacaaggcggatatcctgcattttcttcactccttataccggcttattgtaccgcaaaatcgccatgattgcaagccgcacgacattgtgttagaataaactcggtaattctttgggaaagagggcgtaaatttgcttgtgcttcacacaaaaacggggcggatgtggctgccggacgcgctgcgggggctggcgctgctgaatatgctggcctaccatgccctgtacgactgggtatatgtattcggtcataccggcggttggtacaatatctcggccccgggctgccatctttggcagcagtacatctgctggagctttatcctgctttccgggttcagccttccgctggcccgccgccccgtccgcaatgggctgcttgtggcagcgtgtgcggccttgctgaccgcagcaaccgtcctgtttctgccgtcggagagtatctggttcggtgtgctgcatctgaatgcggctgccgtgctgctgacctgccttgtccgcccgctgctgcagcgcatccctgccaaagcgggtctggcggcgtctgcggcgctgtttgcgctcacgaatcagctgccgcagggatttatcgggtttgaaggtctgcggctctgtgccctgcctgcggggctgtacagggccaacctgttctggctcggcctgcctgacctgacgcggttctcctccgctgattattttccgctgctgccgtgggtgtttctgttctggtgcggggtgtttctggcgcggctctggcatccgggcaggggagagcccc

SEQ ID NO: 14042 - DNA, 3855 bp, Unknown
  gut microbiota DNA sequence
tcgaaaaatcagagcgcgtagcccttggccttgatgacatccacaacctgcgcaacataccgctcgcaggtctcatgctcgggggcctcgaccataacgcggaccagcggctcggtaccggactcgcggaccagaatgcggccggtatcgcccagtgcctcggccacggccttgacggcggcctgcacatcaacatcgtcctgtgcagcacgcttgtcggtgaccttcacattcgtaagcacctgcgggtagatcttcagcggggcggccagctcgctcatcggctttttcttggccagcatgacctccatcatcttcaggctcgtcaggatgccgtcaccggtgctggcgtacttggagaagatgatgtggccgctctgctcgccgccgatgcggcagccgtttttcgccatatactcatacacatacttgtcgcccacggcggtcttggcgtagtcgatgccctgctcatcaaaagccttgtacaggccgaagttggacataacggtggtgacaaccgtgttggtgatgagcttgccccgctccttcatatagcagccgtagatgtacaggatatggtcaccggtgatgacattgcccttttcatccacgcaaaggcagcggtcggcatcgccgtcataggcaaagccgatgtcaagatgattctcaaccacgaacttctgcagcccctcaatgtgggtggagccggcgttgaggttgatgttcaggccgttgggcttgttgttgataacataggtgtcggcgcccagtgcgtcaaagacgctcttggcaatgttccagctggagccgttggcgcagtccagaccgaccttgacgccgcggaaggagtagatgcccaagctgatcaggtaccccatgtagcggttgcggcctgccacatagtccacagtgcagcccacatggtcgcggctggcaaagggcagctccggccagtcctgatcgaaaatgtgcagcttgccatcgaggtaatcctccaccagcagcagcgtttcctcgtccatcttctcgccgtagcagtcaatgagcttgatgccgttgtcatagtaggggttgtggctggctgagatcatgatgccgcagtcgaaatcgtccacgcgggcgatgtaggcaacgctcggggtggtggtgacatgcagcaggtaggcatcggcgccgctggcggtcaggcccgcgacaaggctgtactcaaacatgtaggagctgcggcgggtatccttgccgatgacgatgcgcggggcagtcgtctcgccgttgcgctggcgcagcatgccgtagtaccagcccagaaaacggccgaccttgtaggcgtgatcggcggtcagcgtgacgccggcctccccgcggaagccgtcagtgccaaaatattttcccataataaacacttgtcccttcaaataaaggtaaaatttgtggtaaagcaatatgatataatatcattcttagtataccactttatgccgccgatgacaagtccgcattatttgcaggctgtgtatcggtgcagtattgcggtgcagccctccagcacatcccgccaggtggccgagaaatccccggtataccacgggtcggccacatcgcccgggcgggcggtgtagtcgagcagacgatgaatctttccctccgggtcaccgccgcagatgcgcatcatattgcggatgttggcgctgtccatgccgatgagcaggtcgtggcggccatagtctgcccgggtcagctgacgcgccgcatgcccggtgcaggtgatgccgtgggccgcaagctcccgccgcgccggcggatagaccgggttgccgatttcctcggtgctggtcgcagcagatgcggccaaaaagcagtcccctgccccggccttcgccgcaaggtccttcatcacaaattccgccatcgggctgcggcagatgttgccgtggcaaacgaaaagtattttgatcataacagagtttcctttataatgctgcaattttcgggggcataaaacattgacaaacggcccctgtttcactatatttattagtatacacgaaaacgccgaacttgtctgcctctgcgcgaatttttatgcggaggcggtgcggtttgtaagggagatataactatggcagaagaaaaacgcaaacgcatcctctcgggcatccagcccaccggcacgcccacgctgggcaattatatcggcgcggtgcgcaactgggcccttttgcagtctgattatgagtgtctgtatatggtggcagacctgcacagcctgactgtgcgccaagtcccggccgagctgcgccgccgcacccgtgagctgtccgccctgctgctggcggtcggcatcgacccgaagaaccatgtgctttttgtgcagagccatgtgcccgcccacagccagctttcttgggtgctggcctgcaacacccagtttggcgagctgtcccgcatgacccagttcaaggacaagagcgccaagcaccccgacaatgtcaacggcggtctgttcacctacccggtgctgatggcagccgacatcctgatctacaacgccgatctcgttccggtcgggcaggaccagacccagcatcttgagattgcccgcgacatcgcaggccgcttcaacggcatctacggcgacaccttcaccctgccggagggctatgttcccgccagcggcgccaagatcatgtctttggccgagccgaccaaaaagatgagcaagtctgacacaaatgtcaacagctttatcctgatgaccgatgacaaggacgccatcgtgcgcaagttcaagcgcgccgttacggactctgacggtgtggtgcgctttgaccgcgaggcaaagcccggcgtgtccaacctgatgtgcatctacagcacctttaccggcaaatccaacgatgagatcgccgccgagtttgagggaaagggctacggtgacttcaagatggccgttgccgaggtcacagccgatgcgctggcccccgtgcaggctgagtacggcaagatcctggccgacaaggcctatgtggacggcgtgctgaaggacggcgccgagcgcgcagcccgccttgccaaccgcacggtcagcaaggtctaccgcaaggttggcctgctgcagctggataaataacgctgtgtcttgacaaatcccgcttgaaccattataatatgtaagttagtgcggctccccagttggtgccgcacaacttttactatccattttacgttaggagacactgctatggctaaagaagttgtcgttacccgcgagggctataataaactggagcaggaactggaaaacctgcgcaccgtcaagcgtaaggaagttgccgacaagatcaaggttgcccgcggctatggcgacctgagcgagaacgccgagtacgatgccgccaaggaggagcaggcttctgtggaggcccgcattgccgatctggaggccaccctcaagctggcacgcatcatggacgagagcgagctgtccaacgacaccgcctccattggtatgcatgtcaagatcttggccgagggcgatgatcctgaggacgccgaggagtacgacctgaccggctccaccgaggccgatatggacctgaaccgcatcagcgatgagagccctgtcggcgcagccctgatcggctgcaaggtcggcgaccactttgatgtcaccctgcccaacggcaacatcatcacctacacgctgctcgaagtaagccgctcgaagtaagaaaataatagagcgcccgcgggcggatgcggacatttgcccctacgcccttcccgcaaaggccaagctcaatagaacaaataatcacgaaaggacgatctctcatggagcagaataagccccag

SEQ ID NO: 14043 - DNA, 19961 bp, Unknown
  gut microbiota DNA sequence
attatgcggtattgccccaaaaaataacgcccggagtgaacaagccgttttcggcttatttactccgggcgtttgctttccgcaagtggcagccggttttgtaaatagcttatgaatttttgctgtaatttcttgacctgtccggctttgctatgcttataatagatgtatgaaatttttttatggaggaacccatgacaaaaaacactccctcaacggacaggccaaatatcaccgcgtcccgccccagtgttattctggataaagaaaccgcccgctacatattccgcgcgttgctgctgacgattgtatttgcgtgggcgctggttaatctgcaggctgtactgcagttttggggccgagtattggcggtgttctccccatttcttatcggcggtgccatagcctttgtcattaacattttgctctgccctttagagcgcgcttggcagcgcatctgcaaaaaagcgcccgacaagctgacgcgcccggtatgcctgaccctgagcacgctgttggtgctgggcattttgtttgctgtggtgtttatgatgctgccgagcgtacaggaatctctctatgaatttgtgcgcaatctgccaacctacgccgaaaagctggggcaatggtgggcaggcatggtgcagtttgctgcaaaatacggggtcattttaccggaatatgcgatggataccgatctgttgatggataaaatcacggggctgctccacgatgaaggcagcggtatcatcaccgtgactctgggggcggcaacctcggttttttccagccttgtaaatgtgctgctggctctggtgtttgctttgtatctgcttgccaaaaaggaggtcgtttccgcgcacctgaaaacccttgctgtgacggtgctgccgcaaaaaagtgcgcagcgggtactgcacattgtatcgctgaccagacagacctttaccaattttgtgaccggtcagcttaccgaggctgttatcatcggtattctgtgctttctgggtatgctgattttgggcctcccgtatgctggggccgtttctgcctttgtcggcgctacagcgctgattccggtgttcggcgcgtggatcggcggcggtctcggtgcgtttttgattctgctggccgaccctctcaaggcggtgtggtttgtggtattcctgctgattttgcagcaggtcgagggcaatctgatttaccccaaggtggtaggcaaatccgttggtctgccgggtttgctggtgctgatggctgtcacgctgggtggtgaggcgttcggcgttttgggaatgctgttcagtgtgcctgtctgcgcggtgctgtacagcctgtatcttgaatttatcaaaagcgcacagccgcaaatgccagccagcgctgaaaccgaggcgtaataaggtttttatatgaagagggagatgcacaagagtatgaaaagcagaagaaagcacggctttcggcttatgacgatactgtattttgcaatcgtgttttgtatgtgtatatcccgctttaatatcattatgacccttatcggtggtcaactaacacaaattgacgcaatcaatatggtgcctttccatagcatcagagagaacttgagctatggccacagccctgtttcatgggatatgctttataatatggttatgtttgtgccgttcggcattgtgtactgctattaccaaaagaatttttgcatatataaagcgattggattatctttcttaacaacacttttaattgaggcagcacagtttgttttcaaaaccggcgttgtggacatagatgaccttatgataaatacaatgggaagtcttgttggaattttcctttacactgtgtttcgtaaaatgctgcaatggaaacaggccggagaaatacatgaagtgattgacaccattgcaacgatacttccgccaatatttattgcctttgttatagagaggttttttggtgacggctcaacaaggctgtttcctgttcatggtataatactgacaatctacggtatattcgattatctattcttactggaagattttgcgtggaaatccaaattgctttacgccgtattttatgtcgggattttctggctgacgcttatcgcactatgaaataagtggtaaaaagttgtcggcatggacgaaaagaccaccctcaagaccttaaccatcatggaagcgctggtcggcggtgtcgggtttctggttgcacttgtcatctccttttttgcatagcagcatatatcctccgaaagaggggccgctcaggcggcccctctttccttacagcactcccctattgtccggctccacagaaacagattttaatccagaatctttccgtcaatggagatcgtcacaacctgccacgggataaactttccacttgcctgcagtgcttttttcgccgccatctccagtccgccgcagcagggcacctccattcgaacgatggtcacttcctgaatctcattgctgcggatgatctcggtcagcttctcgctgtaatccacagcgtccagcttcgggcagcccaccaaggtgatcttgccgcgcataaattcctgatggaaattcgcgtatgcgtaggcggtgcagtccgccgcaatcaaaagctttgcattgttgaagtatggcgcgttgatgggggccagcttgatctgcaccggccaattccggagctgcggaacctgacgcatcggcgcggcggtattgctgccagcctcccccggctgctccagcatacgcatccgcgagccggggcagccgccctcatgcaggtgcttcatcttttcctgcagttcttttttcttcttgttttcctgcacggccgcctcatcgtacgccggggcctcccgctcttcaaaggtgatggctcctgtggggcagcccggcagacagtccccgaaaccatcgcagaaattttcccgcaccagctttgccttgccgtcaatgatgtcgatcgcgccctcatggcacgcagttgcgcacagaccgcagccgttgcacttgtcctcgtcaatatgaatgattttgcggatcatatttttacctcccggtttgcatcgttttgcttttgcagccctattatagtataataaagcaagcctgtatgtttgatttcaaacgaggagatttcttttatgcaaaaccatatttccgtcctgcggagctgtcctttttttgccggtttaaatgaggatgagatcttgtccattctgcactgtgtacaagcagtcgaaattgcccgtcagcgcgggtcatatattttccgcgccggggattccaccgaggtcatgggccttgtactgtccggcaccacccttgtaatacaggaggatctctggggtcatcgcaatatcctgtccaaatgcagcgccggagatttttttggcgagccttacgccgccaccccgggtgctattctgaacatcagcgttgtggcggaggaggattgtgagatccttttgctcaatgtcaagcggctgctcaccgcctgccccgccgcatgcgaccaccaccaaaagcttatccgcaatctcgtcagcgttcttgcaaacaagatcctgatcttcaacgacaaggttacgcatatcagcaagcggaccacccgggaaaagctgctctcctatctttctgctgagtcgcttcggcagggggcactttcctttgacattccctttgaccggcagcagctggcagatttcctctgtgtggagcgcgctgccatgtcggcagagctgtcaaagctgcaaaaggagggccttttgatcacgaagaggaatcactttgagctgctgaccctctgatctcagccctactcagtcgatggtgattctgtcgggtgaggtgcggcagctgtaagagcggtgcttaaaccgttaggcgggaattgtgcggtgttgccctaaagctcccggcctccggtgtgccggtcatcgcgcctattgtgccttgatctctacaccggcagcgggcagtgcggctgagattttccgcacaaaggccagcgccctcggcccgtccccatggacgcagacagaatctgcctgcagcgcaacggtacttccgtctacggcacataccgtcccctgctttgccatctgcagtacccgcgcaatggcctcctcctcgttttcaatcatcgcgccgggcttgccgcgcggcacaagagtgccgtcaggctgatagccccggtcggcaaatacctcgctgcagacacgcagccccagtgcctgtgcggctttgatcatctcactgcccgaaagcgccagcagcatggcctcgggagcagccgccttgactgcgcggcagatggctgccgccaactccgggtccttggctgccatattataaagcgcaccgtgcggcttgacatggtgcagcggcaccccggccgcatcgcagaaggccttcaacgcgccgatctgatagataacatccgcctcagcctgcgcaggtgagatcgccattttgcggcgtccaaacccctgcagatcaggcaggcccggatgcgcgcccacctgaacgccatactttttgcagagcagcacacttttttgcatcacggacggatcgcccgcatgaaaaccgcagatcaagcatgtcaggtcggtatatggccttttgcgccgcattgtgaaaaacaccttttataagcgcagtccctttatatccttgatgcgcgacaaaatcatattgcagctgcagctctgcacaccgggcagggtgtcgatgactgtgtgcaaaaaggtttccatttcctcggcagaagccgccacggcgtgaacatgcagcttatccctgccggtcacgcggtagatctgcgtgaccgtgtcgtgccggtccaaaatctgcgtgacctgtgccagacagtcgggcgttgtctcgatctcgaaatagcaggacaccgcaccgctgattttctgcgggtttatgacggtcgtatactcctcaatgatgcccttttgctccagcgtctggattcttgccttcaccgcgactctggatatgccgattttctccccgatgtccgagtaggaaatgcgcgcattttctatgagcagctgtacgattttctgatccagtgcgtccagcccatccagatacatagcgtcccctccgtctgtaaaccttctatgcgtatcatagcaccattctttccaaaagtaaatatgctgttgacgcaccggctttgccgcgctataatagtttcgattcgtaattatcagctttcgttttgtgaggattcgctatgaaccgagatttaacaaagggtcctgttctgcggtcgatgcttctgtttgctatccccatgattttgggggatcttttgcagcagtgctataacatcgctgacacgctcatcgttgggcaattcttaggacgaaacgccttggcggcagtcgggtctgcctttacgctgatgacctttttgacctcggtcattctggggctttgcatgggcagcggcgcactgttttccatgcgtttcgggcagcgggacgaaaccgccctgcgggaaaacctctgcgcatcattttattgcattgcgcttatcaccgttcttttgaaccttatcgcctttgcgtgccttgacgggcttcgcatttttctgcgggtccctgccgaggtttggggcgatatgcgcatctacctgtttatcgtctttttggggatacccgccattttcctgtacaacttttttgcttcgtttttaagggccatcggcaattcggtaatcccgctggcctttttggcggtttcctcggtgctgaacatcgtgctggatctcttatttgtcgtagggttaaacaaggcggtcgccggtgctgcacaggccaccgtgattgcgcagtatatttccggtgtgggtattgccgtctacacatgggtgcgctttccgcaggtgcgctcggttgcaagaccgcgcaccttacgcacacagagaatccgggaaatattctcctattcctcgctgacctgcgtccagcagtcggtgatgaatctcggtattcttatggtgcaggggcttgtgaacagctttggccccgttgtgatggcggcctttgccgctgccgtaaaaattgatgcttttgcttatatgccggtgcaggatttcggcaacgccttttccacttttattgcgcagaactacggtgcaaagcaaaacgaccgcatacgctccggtctgaaaagtgccgtcctgatatcggttgctttctgcgtggtgctatccacgcttgtttgcgcatttgccaaaccactgatgctgctttttgtcgatgccggggaaactgaaattctgcgtgagggtgtacggtatctgcatattgagggttcgttttactgcggtatcggctgcctgtttttgctgtatggcctctaccgcgcattgggtaagccgggcatgagcgttgtgcttactgtcatctcgctgggcacccgtgttgccctcgcctacctgttgtcctccctgccctccatcggcgtgaccggcatctggtggtccgttcctatcggctgggcgcttgcagattttgtgggatttgtgtattataaaaagaaaatcaacttatatgacggcagccagccataaaagaccaccgaccgcctttaaggggagcagctatgcagatcagccagttttttctcaacggagacatgaaaggcgctcttgcctatatgcgcagccatgaggagtacaaggagattcttcccgcctataccgcaatctttgaggattgtatataccgcacctatgaaataccggacatgctcaactctgttttgcgattgtatcaggtatatttccgggacaccttttattgcggctcaccggaagcggcggccgcagacaagctgttgaccgggctgaagcatcttctgaatatgccggatgccgatgaagatactttagtcgaacaccttcagtccgtgtttgaagcaaacggctatcatgcgcttttcgggaaaacacagggctattacggcccgtatgtctggcgtgacacggttccgaccgtctaccgtgtcgaattgccgggtggtgcagccgaatacaccgtcaacattctgaaaggcttcgtgttccggagttggctggattatctgaccttcggcaagcagggtacgggcggctgggcttcgcccgacggcacgatcaactgcatcgagcaggcgtatgattttgaaagcgagcggtttcttgtatctcttttaaagcacgaggcacagcacaccgttgacatgaagcgatttccgggaatcactcccgcagagttagaataccgggcaaagctggtggagctgcattactgcagcgatttaggattgctgcaaaagttcctgtcaacagcggatgaacgaaagatcgcggatagtcatgcactggcctgtgcgcaaatcaaacttgcattcgcacatacaaaccaagcagacctttcccgcatacagacaaaggcactggagttgcttcacgcgcacacgaagaaactgagcgaaaaatatcagggatacaaaacggcgtgccccggttaattgcatcgcagctgcgtttttagttttttatgccagaaatcttaccacaaccaaaagcactgtatggcttcacccgcaatgcgggtgttctacatcggtgcagcgcgaacagagcgaatgcaccgcggccatacagtttgcccggcagcatggcattcgacaacacatgatggatgcaattttgctgatacggtacatagtgatttctcccttcgcagtagttgtttggattcgatgggcgtatgatacgccagtttacctactatgtaaatatgtatataggaatttattttgcttctgctcttatagccagaattacagcattgtgataaatacatttgtgcgatttgtcacatcatgtcgtagcaaacccttatgcacagcaccgcacaggtatattttactttttctttaccgtatacagatacggcacctacattctgctcttgaaaaatcacggttgtgtgctataataactctgttactctgtctcaatatttatctgccgcataccgggttgcacatttttggtatgcgcaaagccctgaatagaccgggcagaatggatacaagtgatgaaaatcaggaaaattcttgttgctgtaatttcgctttttatggcagccgcacttcttaccggctgcgacactgcaaacaacgccagcaaagcggctgacctgcctgttataaagcttggcagtgacagctacccgccgtacaactatctcgatgaggacggcaacccgaccggcattgatgttgagcttgccaccgaggccttcgcaaggatgggctaccgggtcgagatcgtacagatcgactgggagaaaaagaaggaactcgttgagagcggcgcgatcgactgcatcatgggctgcttttctatggagggacggctggacgactaccagtgggccggtccatatatagcaagccgtcaggttgttgccgtgaacgagagcagcgatatctataccctgcaggatctcgccggcaaaaaccttgctgttcagtccacaacgaagccggagggcatctttctgaagcgcactgacgagcggattcccaagcttggcaacctcatcagccttggccacagagagctgatcttcacctttctggaaaagggctatgccgatgcggtgggcgcgcacgaggaatccatcgtgcagtatatgaaggattacgatgtccgattccgcattttggaggaaccgcttatgacggtcggcatcggcgttgcctttgcaaacaacgatgaccgcggcctttgcgaagaacttgaccgcacattggaggaaatgcggcaggacggcacttccttgaaaatcatcgggaagtatcttgatgagccggaaaaataccttgaggtggatacgcttgaaaaagataactaaatctgctgccccgggcaaaaaattctggatctgcggggcgctgctgggaatatgtctgctctgccttgtcacgctgtcgctctttcagagcgataaggcccgcgagcaggccaatcttttggacaccgtaaattatgtcaagatccaatgcgcaacctatacctattataatgaggcgtctgaatccaaaagcctgctgcgctccatcgaaagcacccgtcaggtcagcataaatattgaggctgagaccgcggccgggcaggagcttacccgtaagctgctgcgggagagtaccgagcagctgtggctgacgggcattgtcgtgctggacccggacggaaacaccgtgtgtgaatacagctcagatgaccgcgcgctggcgagggtccacggcaatcttaaccgggatattattctggataccgccattcatgacgaaaaggtctattcgcagcggatcaatcataacgacggctcacacattgatatgtctgcctgcgcgcgcagggatgcgcccggcgttattgtcaccttctattatacctccgctgaatttgccaaccgctataccctgacactgcaaagcctgctgagcggctaccagaaggccacggatggaacgatcattataaccgatggcggcgcgatcattgcatccaacgacactgcgctgattgggcagagttcaaatacacacgacgcgatccagaccttgaaggaaaacgccgacagcaagcacctggtgcatctgaatgttgacggtgtgcgttcctatggcatcatgctgcgccagcgcgatcactatatctacgcttatattcccgacaccatcaccttccgcacactgccccagagtgtggtcgtatttgtacttgtctatctgggcgtgctgctgatgatctggcagctgctgcgtagggacaagctgaaaagcctccgtaagcaggaggaaaaggagcgggcgtatcagaaaagcctgctggaggaggcaaaaaaggccgaggccgcaaaccgcgccaagacggaatttttgcagcgcatgagccacgacatccgcacgccgatcaacggcatcagcggtatgcttgatgttgcagagcattacagtgatgatctgcaaaagcaggcggattgccgtaaaaagattcgggaggcctccgacattcttttggagcttgtcaatgaagtccttgacatgagcaagctggaatcgggcgagattcagcttgaagaaaagccgtttgatgttgtaaccctccttgatgaggtcaccggcgtagtcggccgccttgcggacgaacgcaatatcacggtggcgcacaagggaagaaccattgagcatcgcaatctgatcggcagtccggtccatctcaagcggctgctgatgaacatcatgtccaacgcggtcaagtacaaccgggatcacggtcatatttatctgtacacccgcgaactgccctcaactgacagcagtatcgcaacgctgcagttcgtctgtgaggacaacggcatcggtatgagtgaggaattccagcagcgcatcttcgagccctttacgcaggagcagaagggcggtgcgtccaaattcggcggcaccggtcttggcatgtctatcgccaagagccttgccgaaaaaatgggcggcaccataagctttgaaagcacgcagggcgtaggcacgacctttgtaatcacgattccctttaagatcgacacacaggtcggcatccatacgcccgagccatccgcccctgcggggtccatccgcgggctgcatatcctgctggtcgaggataatgagctgaacatggaaattgccgagttcctgatccagaacgagggtgccatggtcacgaaggcgtgggacggccagcaggccgtcaccctctttgcaaaaagtgcgtccggcgaatttgacgccatccttatggatgtcctgatgccggtcatgaatggctatgaggccacgcggcaaattcgcgcgcttgaccgggcggacgcaaaaacgatccccattatcgccatgacggcaaatgctttcaccgaggatcggctgaaatcgaaagaagccggtatggatgagcatatcacaaagccgatcgacggcaagctgcttgtaaaggtcattgctgcgctgaccggcaaaaacgcccagcgtccgacagcggaataagcctttgcgtcaagcctgcgggcaagcaatgctcgcccctaccttctctgcgacaggaacagcgtatatacaaaagcgcggctgtatcttacgatacagccgcaattttatttgctatttgtttttttacagaatcttctgcagctcatgcaccaattcttcaatgatgatcggcttggagaggaagccgttcatgccgcagtcgagcgcgctctttttatcttcctcaaaggcgttggcggtcatggcaagaatcgggatgccggcaagggccgggttttccagcgcgcggatctgccgcgtggcctcataaccgtccatgatcggcatctgcacatccatcagcaccagatcatagcagcccggcgcggaggtgcttaccttttgcaatgccacagcaccgttttctgccgtatcgacccggaagccgtactcgcccagaatctctatcgcaatctcacggttcagctcgttatcctctaccagcagaatgttcttgcccttgaaatcctcgctcttgttggggagcagttcttcctcctccccggtcaccttctggccgagggcggtcatcagcgtctggcgcaggtcggacatgaacatcggctttgagcagaacgccgtaacaccggcggctctggcctcgacctcaatatccgaccaatcgtaggcggtcagaataataatcggcgtatcatcgcccaagccgcgaatctggcgggtgacctcaatgccgttcatatccggcaggcgccagtcgatgatatacgcatggaaggcatcgcccatctccatcgactgccgcgcacgcagcacggcctccttgccggagagtgtccattccgaccgcatacccaccttgatgagcattttggtcacgctgtcgcaggtgttgaagtcatcatcgaccaccaaggctttcacgccctccagcgctgcgatcttctcgaccggtttacgctccgactggatacgcagcggcacacggacaataaattccgtgcctttcccctgctccgtctggatctctatgctgccgcccatcatgtctacgatgtttttggtgatggccatgccaaggccggtgccctgcgtcctgctgaccgtggaggtgcgctcgcgctcaaacggctcaaatatctttttggcaaactccgggctcatgccgatgccgttatccttcacacggatttcatactgcccgcagccgcgctttttacctgtaagctgcttgagccgcaccgagaccgtaccgccggcaggcgtaaacttgatggcgttggacaacaggttcaaaagcacctgattcagccgggtcttatcgcagtagacatcctcatcggtgacatccattgcgtccatgtacagctcaagctgcttggcgtggatctgcccgctgacgatggttttcaaatcatgcagcacatcggacaggttcgtctcggtttcatccagatggatcttgccactctcaatgcggctcatatccagcacatcgttgataagggaaagcaggtggttgctcgatgcgagaatcttgcccagatagtcccgcaccttttctttgttgtcaacattgctgacagccagtgtggtaaagccgatgatggcgttcatcggggtgcggatgtcgtgggacatattggaaaggaaggtgctcttggcacggttggcagtttccgctgcatgaacagcctccgagagcgcctggttcacctttttgtcggcggttcggtccgacaacacaagaatgtacttgcgcctgccctcgacctcactgcccatggcaatattatggaaccagcggtgttcccctgtttgctgatgaataaaatcaaagttccattcgcgctgctgcccgcttataaggcctgctaagaaatctttatcccggtccggggcatccttctggtgcaggtttttcagcacctcaatatcctgccgcaccttctgccccgggatgcccagcagccgctcaatgttcgggctgacataatccacccgggcggtctttgcatccaccatcatgaacacatcgtccacattcagagagagctttgcaaacagctcctcccggtagagaagctcagtatttttccggcgcagcttgacatggcttttttgcaggatcagcaggatggccagcaccgcaaggcagagcgcaaaggccgtcacgatcagcacggttctggattgcagcgtattcatgccggcgtttacgatgtcagccgggacaaggctcaccaacatccaatcctgcacattgacgcttacataggtcaggtaatagttcacaccgtcaagcgtcacccgcgttgagctgctgtttccctgctcaaagtcccttgccagcgcccgtatctgcgcctgcgtcaggtcagaatactcctgcaggacagcaaaaaggttgtagatggtatactccgggtctgccttgccattgatgacaatgcgcccatcggagtggaccacatagcggatagcgctgccctgaaaggcggaaatatccagcaccttcacgattgcttcattattataggcaacggcaatcgcatcataggcaaagccctgatagctgccccgtatctccgggcaggcaaatacaagcatctggggcttgccgggcaggacggcgctcatgactatatcgttcccctgcgagatattttcctccagattgccctgcagaccaagatagcccgtctcgccggtcacggtcatataatttccctccgccgagaggaagtaaaactcggtgaatccggtttcctgctgggcagcctccataaactcacggatctctcgctcatcagaaaaacgctgtaaagagccggaccacatatgcagataggtcatattcttgttgaccgtttcattcagcatcttgttggactggtgcaaaacctccaccagatgggcggtgctctcctcatagatcgtctgcgtcacaaatttggaatactggataccggcaataaccagtgcagccaccacaagcagcacggcggccgctgcggcaagccagcttttgatgcggtgcttcttatgcttgttcctgcgcgggctaaactggacgccgttcttttgctcagccattttcatccctcaaaacgatgtagctttccggctcggcaagaagtgcgctgcctgcggaaacatagtccagccatgcgtttctgacggtcatatcctcttcttcaaaggcgctgccgccgtccgccagcaggggctgcatatacttcggcgtggaaaggcagctcacggtaaaggtatcatcatcctgcaccggctgcccgtcccttgtaacgccggtcagcgtatagctgccgccgttctcctttacctcgatggcaataccgctgacaacgggcagcgagccgcggttgaataccggcagcccgccctcatagccttccacaaaggccctgacggtttccttcagctcggcgccggtcatctcgcaccggtaggaccggagactgttcggcattaccatagcggcggcctccttcttcgtatacgccgcctgccgcacactgccggtaaagctgttggcagcggcgatcagcacatcggtgccatagatgccgcgcaccgtattggccatagccgaataagacgcattgccgccgtttttgtggaagatgttggaatagcccttctgcacggtcaaggctgtttcatcaggcgcaggctcttcctcaataagcaggtcattgaaggcgcggtaggcctgcgcggcatcatactcgcccgcaatcattttggaaacaacctcctgagaggcggcaaaaaagtcgttggaggcaatgcggatatacatgtgattttcttcaaccacgggccgcacatcgctcagcgcatcggtaaagcgcaggggcacatcctgactgtagctcaaggtatcctgtccggcgcagacaaggttctgcgcatcggccgacatcatgacctttagcacccgcatggccttattgcggcgcgcctcatcgttttccagctcgcggttcagcgcaatttgaaaatacggcgtggtcatcagccatttctcgccgttgtcattaaaaaacggcataaaaaccgtgtccagcccttggtcgcggtattgctgcacaccaacggagctgccaaaatacatggcaagctgctcctttgcaaacatctctgcaatcgtatcgtagttattctcaaggtcgctgcggttcagcccggtatcggtgatgaactgctccatccgcgcaaacacctgcggccatactgtttcatccagccccacacgggtcgtattggccgggtcggaatacgccgtgcgccacttcacccctgcggaggaggcaagcgccgaggcagacagcccctgcagcgtttccatgcaggtgtaatcgaaggcataatccgccgtaaagccgcgcacacccacctgcgcaaacgcctgacaggcagagacaaagctgtcatagtcggtcggcagcggaatatcgtacttttcaaacaggccgcggttgacaacgaagccgtgcgcatcggcgcatatcggcagccagttaatactgccgtcctcattcataaagctggtgagatagttgttgtagactgcgcccgcctcgttggtcatggcgagattcatcaggctgcccttgagcggcgcggcatcatgcagagagaagcggcagcaggtaataatgtccggcagaccgccgttttcctgcaggaatttatagaaatccagatcgttatgccccacgacgaattcaatattcacatcgggcagctgggactggatatagggcgcgtaggtatcgtagaggtttgttgtccacaggtagacctgtatagtctcggcatcctctttggacgctgcggcttcggcgctttccgcaccgcagccggccagcagcgacacgctaagccccagcacaagcagcagggcaagcaggcggctccatcttttctttttcattcagattccccttcaggtaaatatcggctgcagggtctgccattcagtacactcttgacttcctctatgttaagctgcaaccaattactttatataataacacagcttttgattttatacaaccaaaaattggcatttttatagcaatttcccagcaaatattgcacattttttagccgggcaagggtttttatacatctgtttacatcaacttgattataattccgctttccgcaattttacgcattgcatgcacggcccgctgcggttacacaatcggggcattgttcgattgactttccggtatgggtgttgtatcattataataattattggggggtactatggatcagatcgaacagtttatcagggattccgggctggatattccggcctattcggtatgcttttacgacagcaacggcaccgatgagatactggacagcattataagcggcaaaaagcacgccaacaccggcctgtacagcctgtttcaggcccagatgcagcttttgcccaagaccggggaccacaccgtagtgcttgacagccagatgcagccgcgctgcattacccgcaccgtcaaggttgagatcatcccctttgcggaggtaacgcaggactgcgctttggctgagggggacggcacactcgcgcaatggcgggaggttcaccgtaaggcgtttgagaccgcctgtgcggagatcggcaccacctttgacgagagcatgaaatgcgtttgcgaatattttgaggtggtttatcaggcgcaggggtgacctgcttgaataaactgctgcagggatacaatcaaattcaggcaaaatctctatcagggctttgcgcgctgtataacaaaaaatgccccggagggcttaacggctctccggggcatcttatgtgtgttgtgctttggcgcacatggccggcgttttactcgattgcaatcagattcgggttctcaggcaaagccttcgtctgctgaggggcaggcagcgagatgcgcaggataccatcctcgaacttagcgcggatgtcctccttctttacaccttcacccacatagaagctgcgggcgcaggtgccggagaaggtctcacggcgcagatagtggccgtccttatccttctcatcgttgctgtggctgcgcactgcctgaatcgtcaggtagccatcgttcagttccatctgaacatcttccttcttgcagcccggcagatcaacggccacctcgtagccgttgtccgtctgtttgacatcggtcttcatcatgtttgcaccgcgcttgccaaacgtatcccgcgcctcacggttcatcatacgttcaatcgaagcgtcattccagaacggatcgaagaaatcatcgaacaaattttcatggaaaacagtcggcataagcataaatcattcctccaatcccggcgttcgggtcgggcaacaattttgaagcgtccattcagaaaagtgtcccgcgaagctttgcagctcctcgtttgctcttcctcctgagcacatcttcgttatagcaccgttcgttagcaatgtcaagcatagagtgctaatgttcacaaaagaataatagttttgtaatatcccatgcaatttttcggctggcggcagcgtccgttgccaatacgccgcccaagccggtatacccttataagaggctgcatagaaaaaccgcgcacaaatacaaaaaaaggattgaaaaatgcgttccatggtgctataacaataataagcgataggcatcaacgcacaattcccacgctgcgggccttcaggcccctcccgcagtacgaatcctgcggtgttgcttatgccctattgtttttgagggagtgtggtcttttatgtattccgtattccgcgatttggcaatcattctacttagtgctaaattctttggtcttgtagcccgcaagtgccgggcaccgcaggtagtcggcgagatcatcgccggcttgctgattggcccctgccttttgaatctggtgcagaccaacgataccatttccacctttgctgaaatcggcgtggtattgcttatgttcacgaccggccttggcaccaacctgaaggagttgctgcgcgcaggccccatcgcaacccttatcgcctgtgtcggtgtgctggtgcctttggcgggcggcacgctgctttacagtgcgttctacggcttttccgccgtgggcagcccggaatttttccgcgccctgttcatcggaacgattatgacagccaccagcgtgtccattacggtggccacgctgcaggaattagggcacctgaaaagcttcctcggcacgaccatcgtcagcgccgcagttattgatgatgtcatcggcattatcgtgctgacctgtgtgctgggtgccagctccggtgagggaaccggcatcggcggtgtgctgatccagacggcgcttttcttcctcgttgctgtcggcgtcggctttatattccattctattatgaagtggctcgatgcccgcaacccccatacccagcgcattaccattgtcagcattgcgttctgctttgccatggcctacatcgctgaaaagtacttcggcattgccgatattaccggcgcgtatattgccggtatcgttctttgcaccctgcacgatgcctcctatgtggagcgccgcgttgacatcagcaattatctgatttttgcccccatcttctttgccagcatcggcttaaagaccgacatcagcggcttgacacctgagattttgctgttcagcatctgctttgtggtcgttgcgctgctgtgcaagatcatcggctgcggtctggccgccaaaatctgccgtttcaactggggtgattccttcaaggtcggtgtcggcatgatgacccgcggcgaggttgccctgatcgtagcgcagaagggtcttgaggtcggtgttgtcgatcctgtttatttcacagccgttattttgctgatcgtggtatccagtgttgccacaccgctagccctgaaggccatgtttaccaaaatgccgcccgtcccccacccgagcgaggccaaagcctgacaagcggccgtccgttctttctgtaactgcataagggaggccagatagcatctatggcaccgcgcattttctggatcggtgattccaccgtgcaatacaacaatatttcgacttggccgcaatgcggcatggggcaggctcttgatctctaccttgcccccggcattatggtttgcaatcacgcccgcaacggccgcagcaccaaaagcttccgtgaggagggcctttgggcgccggtcgaggctgcattgcacccgggtgacctgctgctgatccagttcggccacaacgatgaaaagtcggaggatcctgcccgctacgctgcacccgagcaatttgctgccaatctgctggcctacgcccgcgaggcccaggccaagggtgcgctgcctgtgcttatcacgccgctggtgcgccgtcattttgagggtgaccgcctgacgccgacccacggtgcctaccccgatgcagtccgtcagcttgctgcgcgggaggcgctgcctctcattgacctgactgccgccagcgcccaactggtgcagcagctcggcgagcctgccagccgcgagctgtacatggtatttgcacccgggctctacccgaactaccctgatggcaagaccgacaacacccacctgcgcaatcccggtgccgttgcctttgcagggctggtggccaaagggctgcaggtcctcggcgggtcgtatgccaatgtattgctgggcacccctgagcctgacaagtacgacggaaggggctacgagaagtaacaccttccgtcctctcccctgctccgctcataaaatgaaacgcactttcccgccggacagt

SEQ ID NO: 14044 - DNA, 9430 bp, Unknown
  gut microbiota DNA sequence
gtcagtcttttcttgaccatccgccttgcaggcagctcccgcttcgccgtgcgctgcctgacctttgccttcaccgcatcggccgttctgtgcagcatcggggccaccgcgcttgtgcctgccatgcacctgaacaatctgaacctcaaccctgcctcggtcaagcagctgatcatcacctatgtccagaatcttttcggccgtttcggcctgttcgctctggtttacggcgcccttgccgtgatcctgctggcgctgaccttcaccgccggaagccgcaccaaacgccgccaaaacacttaatcggaggatacgcatggaaaacgaagagtacgaaaccattgaccttttggaggtcctgaatgccgtccgccagcacctgctggccgtcattctcacaaccctgatcttagcctgcgccggctttggtgtctccaagttcctgatgacccccaaatatcaggcgtccgcgcttatgatcgtcaacacccggcaggacacgaccagcaatgtcaccagcgaccagatcaactccgccaccaagctggtctccacctacagcatcattatcaagagcgataccgtgctgcagcaggtcatcaacaatctgggcctgagcctgacctaccccgaactggctgagcgcgtgaccgtcagcgccgtggacgacactcaggtcatgaaggtcaccgtcctgagtgacaaccccgagtgggcgcgtcaggtctgtgagcagatcaccgtggtttcccccgatgtcattctggaatctgtcgaggccggctcggtcaaggtcatttccagcgcctcgatcaaccccgatcccgtctcccccaacacgatgcgcaataccgccatgggcggcgtggccggtctggtcatcagcctcggcatcatcttcctcaccgtcctgctggacaacaagatcaacaccgaggaggatgtcacaaagtatctggatctcaccgttgtcggtgtcatcccggaatatgagggaggcaaaaagaaatgagcaagcctgcaaaaagcaaccgccgcaagctgtttacggtcggttccgacgccccgttccagtttaccgaggcctataagtccctgcgcaccaatctggagttcctttctgcctccggcaactgcaagaccatcctgatcacctcctctgtcccggaggagggcaagaccaatgttgccgtcaacctcgccatcacgctggcctcctccggcaagcgggtcgtgctggtggactgcgacatgcgcaaatccgctgtctcccgctatctgcgcatcccgcgcagccgcacgggtctgacgaatgtcatcacctcccacgaggaaaacgcactgtcctctgcactcgtccgtatgaaggacaccggcatcacggtcctgccggtcggcaccatcccgccgaaccccgcagagctgctggcctcctccgcgaccgagaagatcttcaaggcgctgcagaacgccttcgattatgtgatcgttgacacgccccccgtctctgtcgtcaccgatgccgccgtcctctgccgcgtggcggacggtgtgctgctcgttgtgcgccccggcgtcaccacgattcagggtgcccagctgagcaaaaagaacctcgaggccgtacacgcccacattctgggcgtcatcatgaacggctacaacgccaaaaagaccggccgccgcgacggctactcctacgcttattcgtacggctactacgactccaaacaggaaaccgatgaatgaaaaactctcttgtagagctgcactgccacatcctgccgggcattgacgacggcgccagagatctggatatgtcgatgtcgcttatgcgccgggaggtatccgacggcgttgtcggcgttgtctttacgccgcactttcattatgagcgcatcacggtagaaaagtttgtcgaactgcgcaaggccgccttccggcaggtcgcggctgcggtccgcaccgaggggctgcgcgtagccggcaagcttggggcggaggtgtactattccaccgctctgcccagccttgatctgagcaagctggcctttgccgacacaaactaccttctgatcgaatttcccaccaccatccagccgccgggcattgatgaaacgctgtttgccatccgtgctcagggctacacaccgatcctcgcccatgtcgagcgctacccctttgtgaccgaggaccccacccttttgtacaactgggtcaatgcggggtgccttgcgcagatcaacgcaaccggcctgatccgcgaggggcacaccagccgctggctgcacaagctgctggactggaaccttgtgcatctgctctccagcgattgccaccaccccgaaaaacgcccgcccaacctgcgggagggctttgagcatctgcccccggccgttgcccgccgcctgcagaaaaacgcaatcgaggtctacctcggcaatgagctccgtgtgccggacccgacagagcccagataccgcttcgggcattgggtgtaaacaaaaaaaccgtcgatgatacatcgacggtttttctattacccggccctgccgtacggcgggcatcacgcctctgcgactgcaaccagatatttatagatctgcggcttgtactcctcatacaggcccagatgttcatacagctccttgtaataggcaaacagcgtggcacgggtggccaccacattcaccgggttcagcgccgtatgcaccgcgctgcccggcgtgttgaagtagttgtagatcggcgttgacagcgcgtagaacttctccgcatagcggatatagctcaggttaaagtagagatcctccgaccagtccatatcctcggcgcagatgacatcatcgtgggcgcgcacgatgtcggcgcggtagagcttgttccacatcacgccgtagtagaagctggccggctcctgcatcagcccggcggcaaattcctccttcgtcatcggcccctccatcaggaaaccgaaggtctgcacccgggtcgggcgctcgggccgctggctgccctcggcgcggggcttgggcggcgagatgcggttgtaatgggcaatgaccagatccgccccgctctcctcggcatggcggacgagcagctcggtggcgtagggctggatcgtatcgtccgcatcgacaaactgcaggtatttcccctttgcttcgcgcagacccatattgcgggtggctgccacgccgctgttggccttgtcgatcagcacgatgcgggggtccaccttggcgtacatcctgcagacctcaaggctgacatccttgctgccgtcgttcagcagcaggatctcaaggttctggtaggtctggcggcggatgctctccacacagcgcgcgatatgatcctgtgcgttataaatgggcacaataatacttacaagcggcttttccgtcatggcggcgggcctcctttttcccgatagtataaccacaataccacaaaattccccgcttggcaatggaaaaagtgcgcgagatgtggtatgatgcttataaaggcttccccatcgggggaagctgtccgcgaagcggactgatgagggccaaccttccgccgcagcctgtccatgggctgcccccgcagacctgcccctcatccggccttcggccaccttcccccaagggggaaggcatcactatgaaacgaggtcaccaacatgaagccttccatcatccgcctgcgtgcgctggaaaagcagctttttgcctaccgctacgcgctcaacaccgttgatttcgacgccgagaccgttgcccccgagggcagcgccgacggccgcgccgaggcctgcgaggtgctgagccgcgccagctttgagctgcttgtcaacgcagacaccgccgccctgctgcagcaggctgccgccgaggccgagaccgagcaggagcaggccgaggtccgccagctgcagcgccagtacgatgagattgcaaagatcccggctgaggagtacgccgccttcaccaagctttgcaaccagagcatcccggtctgggtcaaggccaagcgcacgaatgatttcagcctgtttgcgccgtatctggaaaagatcgtagccgcccgccgggcgcaggcgcattattttgcccccgaccgcgacccatatgaggtctggcttgaccggtacgagaagggcctgaccatcgcccagtgcgatgcgttttttgccacgctgcgcgaaaccatcgtgccgctgctcgccgacattcaggcccggggcaaggccgtgcgcaccgattttctcgatcaggtgtggccgctggacggtcagcgcgccgtcagcaaaaaaatcatggagctgtgggggctggacccggctcactgctatctggccgagagcgagcatcccttcaccaccgaattctggcgcggcgatgtgcgcatcacgacccactatatggagcgcgacatgttctccaacctctacagcgttgcccatgagggcggtcatgcactgtatgagctgaacatcgaccccgcctacgactacacggccgtgaccggcggcgccacaatgggcctccatgagagccagtcccgcctgtttgagaaccttgtcggccgcagccgcgcctttgtcagcttcctctacccgaccctgcgggaaatcttccccgatcagctggccgatgtcactgccgaggaggtctggcgcgccgtcaaccgcgccgagcccggcctgatccgcaccgaggctgacgagctgacctacgcgctgcacatcatggtccgctatgagctggagaaggcactgatgcagggcacactggccgtggccgacctgcccgccgcatggaacgccaagtacaaggagtacctcggcgtggatgtgcccgatgacgcccacggctgcctgcaggacatccactgggcgatgggcgacctcggctatttcccgagctatgctctcggcagcgcctacggcgcacaggcggtcgatgatctgcgcaaaacgatggacctcgatgcccagtgggccgccggtgatctggagccgctgaaggctgccctcaaggcgcgcgtctggcagtggggctgcatgaaggagccgcagtggcttgtggaaagcctttgcggcggcaagttcgacccgcaccacttcaccgagtatttgaagaagaagtataccgagctgtacgaattgtaagcagacagctgccgcagcatccgtcaaacgcccgctgccccattacataacctccccggcgccgcaaagccattccggtcttgcggcgccggggctttttcagcacaggacgctgtcggggtagtgcaggcaggtgtacaggtagcccagcgcctgctccatcgtatcaaactcgccgttgtcactgtcggcggggtgggcgggcagggtggatttatcaaagggaatcccctgctcctgccgccattcgtcaagctgcgcggcgatgctgcgggcgtaggccgggcggtcggtacggctggcctgcgcatctatgtaggcgcaggcgctgtatctgcccggcgcgggcagataggccagctcgaccagtgtgccgcggtcacaatcaaggtaaaacagcagcttgccgccgtacgcggcaagctcagctgcctccgcctcccggtttgtgatctggggtacagcggccgtcagccgctgcagctcggcccgcagggcatcgccgtcctgcgggtaagcgccggtatccttcgccgcggcgagctcctctatgcagtaatcctgccagcagggtgcgcagtccccctgctttgcgcgctcgacagcgtacaggagatccgcgcgataagcggctgccagtttgttcatctgctgattttccatagcgtataaccatcctttgcattcaggcatccccacataagacagcgccgctgccttgcgtggggatgctattctttcagtctgcttttcttcggcttgcaggtatatcgtagcacagcgcgctgtcgaatcctgctggtttataagaccgaacgccggtttattttggggatggttgttttccgctgtcgaaaaaggccggtcacacgcccagccctgcaaagcgtttttccgctatgcggaaggccgcagcacctcgtccagcgcgtccagcctttggggtactgcgctcaggtcgatggtgcaaaagtccgttgtcacgccggcagcctccaacaggccgctcctgtcagccgggtcctcgcagatctgacgggcgttgtacaggatgccgtcccagttcaagacaagcagctcctgctgctgcgcgtccagcccgccctgccagtcggtcacggtctcggcgctgatgtcggcgcggctcaggtattctaccagcacggccgccgcctgtgcgcttttcaggctgcagccggccgtatccgctccatagcagacaaagccgtccagcaccgccgctgcggtgtctgcggcagacggtgccccggcagctgcgctttgggctggtgaaggcccggtcggcggggccgcccccgcgccgcaccccgccaaaagaactgccgccgccaaaagaactgcaagcctacgcatcatgatcccccctgtgtgctacttttcctctgccgtatactattcgcaacagccccgccttgtatccggggcgcagcagctcttgcaggtatttttgcggatatagtcctgaatatcatcaaagatcggcatcagtgcctcgccgttcggggtcagccggtattcgacccggggcgggacctcgttgtagtcgatccgctcgaccagaccgtctgcggccagctccttgagctggttggacagcatcttgtgggtcacaccgtccagcagcctgcgcagctcaccatagcgcagggtgccgtgcgcgcccaccataaataatatgcgcatcttccatttgccgctgatctggtccatgacctgttccatcttgtcacagcccacatcggcatagcggcagttgcagtgttcgttcgggtgcattgtcacactctccttttgggtagcggtttccaaaaagtgcgtacttgtcaaaagtgaccattggaatatactgagtatagagcatttttcccgcgtttgcaacttgtttctgcaccgcttttgcgttagaatagtaacatacaatgatcgccccgcccttcgcgcggggaaatatgcaagaggagaaaacaacctatgtacgatgatctcgtagaatttttgcaggaatccgtcaccccgttccatgccgccgccaccgccgaaagctggcttgcggccgccggcttcacccgtctggaggaggccgactactggaaccttgagcccggcaagggctattacatcacccgcaacggctcggctgtcattgcatggcgggtgccgcagcacgctatcggcggctggcgcatcgctgccagccacagcgactccccctgctggaagatcaaggccgacatgcccgagaatgagggctgccgccgcctgagtgtggagggatacggcggcatgatcatggccagctggctggaccgcccgctgaccgtaggcggccgtgtgctggtcaaaacgccggacggcgtgcagagccgtcttgtctacatcgaccgcgacctgctcgtcattccgtcactggccatccacttccagcgggatgtgaacaagggcaaggtgttcaatccccagatcgacatgcagccgctgtgggggcccgcaggcagccgcacgctgaccgaccttgtctgcgaggagcttggcatcacggcggcggagatcctcgactgggatctgcagcttgtcacccggcaggcccccgtgcagatcggccccgacaacgaatatttcatggccccgcgcattgatgatctggagtgcgccgccacaacgctgctcgcgtttttggatgcctccggcgaggccgacagcgcctgcgcccccgtctgggccatgtttgacaacgaggaggtcggctcctccagccggatgggtgccgagagcagcttcctgcgggatgtgctggaccgcatcctcgacgctgtgccccacagcgggcaggctgccgcgcgcgcgatggcgaacagctttatgcttagcgccgacaacgcccacgccacccacccgaacttcccgcagaaggccgacccctgcgcccccgtgcggatgggcggcggtgtcgtgctgaagtacaacgccagccagaagtacacgaccaacgccgtgagcggtgcggttttccgcgccgtgtgtgagaaggccggcgtgccggtgcaggtctttaccaaccgcgccgatgagccgggcggcagcacgctgggcaacctgcagagccacaccttacccatcccgatggcggacatcggctgtgcgcagctggccatgcacagcgccgttgagacggcctccgtggcggatgccgaggcgatgaccaaggctgtggccgccttctaccgcgtccacctgcgtgccctcggcgacggcacctacacgctggaatgacgaccggacgctacgcacccagccccagcgggcggatgcacctgggcaacctgatgtgctgcctgctcgcctggctgagcgccaaaagcaagggcgggcaggttttgctgcgcatagaggatctggacgcccagcgctgcccgcgccgctatgcggacgccatcatagatgatctggcgtggctgggccttgccgccgacggccccgagccgccggtctaccagagcgagcgcagcgccgtctatgcgcagtattttgaggagcttgcccgccgcgggctggtctacccctgcttttgcagccgcagccagcttcacgccgccagtgcgccccaccgcagtgacggtcaggttgtctacgccgggacctgccgcagcctgacgcctgccgagattgccgagcgtgccaagacccgcgcccccgcctggcgggtgcgggtgcccgatgaggtcatcgcctttgaggacggccacatgggcccctgcgccgagaatctggcccgggactgcggggatttttacctgcgccgggcggacggcgtgtttgcctaccagctggcggtcgttgtggacgatgccctgatgggggtcaatgaggtcgtgcgcggcagcgatcttttgtccagcacggcgcgccagctctggctttaccgtgagctgggcctgcgcgccccgcagttttaccatctgccgctgctgctggccagtgacggccgccgcctctccaagcgggacggcgaccagagccttgaacacctgcgcgcccgctattcgcccgaggagatcatcggcaggctggcctttgcctgcggcctgcaggatacccccgcccccgcgaccccgcaggagctggcccgcaccttcgactgggccaaggtgccgaaaaacgacattgttttgccggaagggctgttttaatggaagcagcccccaaaggcttcccctgagggggaagctgtcgccgcaggcgactgat

SEQ ID NO: 14045 - DNA, 46090 bp, Unknown
  gut microbiota DNA sequence
cgacatcgtgtaggcagcccatgcgttggcgcggccccacttgatgccggacatatggtcgccggtgatgttgttgtagccgtggtagtacagcccgctctcagggtcctgcaggtacttgatgtgccagtaatactggttcagcgcatcatcaatcagggcctcgtccttcaaaagcacgcccatccgcagcaggaagaagcccgccataaagagcgtgtccgcccacgcctgctcggggaagtcgttgttgaccgagacggtgtgctgcaaaacatgatccccgaagcgcagcgcctccttttccagatactcgaccttgcttttggcgatgtccagatacttttcatcaccggtatgctcatacagggtgatcaggcagtgccccattgagcaggtgttgaccgtccagctcggcaggcccagctcaatatactcgtccacgcggtccttgaccagctgcaggtagcgctcgtttttggtgacctcatatgcctcgcagatgccgtagtaggcaacaccgcagggccagtcccatgtcatgtccatccgcatcgtgcggtccacgatcttgtcgatggtggcctcaatttgggccttgtcaaaaatcaggtttgccataggaaatcctcctttgttgtacgaaattctttacagcaatgcttttttcatccattcgccgctgtgataccgcgctacggggatgatgcagcccgccgcccagctcagcggcgtggccagccatataccccacacgccaagccgcggggccagcagacctgcaaaaagcagccgcgcgcccatctcaaacaaaccggcaatcaggctgacattcacatcgcctgcgccgcgcagtacattcagatagctgttcatgacagccgcgatgatgtaggcaaagaccatcacgctcaagaaatcagcgccctgtgcgatgctggcggcatcggtggcagggtcgagaaaaatcgacagcagccaccgccgtgcggcgaataccgctacagccagtacaagacagcttgcgcatagagctttcagcgttgcgcgcagccccagccgcacgcggtcaagatcacggtgccccatgttctgcccggtgtagatggccagtgcattgcttactgccactatgacctgaatcgtcagcgagtcgatgcgctgtacggcggtgtaggcagccatcgtcacgctgccgaagctgttgacgatgccctgcacggtcatgccgccaagggtgatcatgcagctttgcagcgcggtgggcaagccgaagcgcaggatcagcacggcatcgtctttggcaaagcagggacgcaccgatgcaaaggcaaacggcgtgttctgccgccacaaagcccaaaggcagatgcctgccgacagaaactgcgcggctactgtggccagcgctgccccggccacaccccagtgcagacctaagatgaaccatagatccagcgcgatattgcacaggctcgatgcagccatggcggcgagcggtgtgcgcgaatcacccgtgctgcgcagcacggccccggcagcgttatacagtgcattgcccagcagcagcccagccgtgatgcgcaggtatgtgacgccggtaggcaacaactctgcgggaagctgcagcagacgcagcagcggctcggccagtgccgcacccagcgcagccagcacagcagaccccgccagcagcagggtcgtgaatgtgcccagcagcctgcgcagctcatcgtattttttcgcgccccaatactgcgatacaatgacgctgacacctgtagccaagccgcccagcagcaaaaacaggcaggcgttgatgttgcccgtgctgcccacggcggccagtgcgtctgccccaagggcgcggcccacaatggcagtgtctactacattgtacagctggttgaacaggttgccgaccagcagcggcagcgcgaaggaaaaaatgactgtcagcggcttgccgtgaaccatatctacatgggaacgcaaaattcttccggtgatgcgcataagcttaccattgcccctccttggggcagtgcatgtcaagccgcgccgcgcgcatctccacatagcagccgcactgcatacaggtcccggcgttcagggcatcgcatgccttgcagcaggccagccgggcggcgtatgccgcgtccggtgtgcgctttttggcgggcagtgcggcgcggtagcgcaccacactttggtagtagtcgttttcgtccgtcatttcctgtaaaaggcagcggcggcattggttggacgcgctcactgcggtgttaccgtaaaggcggctacactgcaggcgggcagtgcggccgtaaagccatcggcggtcagcacggcggacagcgccttgggctgcacggcatcgggcgcagtaaaggtgttgcgggcatcggcggtgccgcaaagcaccgtgccgtttacggcggcagccttcacgccgccgagcagcacctgcgcttcggccggatgggccgcgtccagattcgcaaccgtgatcagaattttcccatcggcggcgcggctggcgctgacatgcagcgtgggtacagcctcctcgtcatggcgcaggatggatgtctccgcgtagctttccagctgctgtgcgccctgatgggcggcatacagggcaaagacatggtaggtcggcgtcagcaccattttgctgccttcagtcaggatcatcgcctgcaggacattgaccatctgcgcaatgttggccatgcagacagtgtcgcagtggttattgaagatgttcaggttgatggccgccaccagcgcatcgcgcatcgtgttctgctggtagaggaagcccggattcgtgcccggctccacatcgtaccaggtgccccactcgtccacagccagaccaattttgcgcccgcctgcaaactggcggataatgcggctgtggttttccaccagctcctccatgcgcagcgtcttgtgcagggtggtatagtattcgctctcggtgaactctgtcgcggagcccttgtgctgccagtcctgatgcggcagtgtgtagtagtgcagcgacacagcgtcaatgacatgccccgcgcgctcaagcacggtgcgggtccagtggtagtcatcgacattcgcgcccgatgcaatcttataaattttgtggtcgggtgagtagctgcgcagataggttgaatactggcggcagaggtcggcataatattcggcgcgcatgttgccgccgcagccccaggcttcgttgccaatgccccagtatttgacatggaagggcgcttcccgcccattctcgcgccgcagcgatgccatgggggaaacaccgcccatgttgcagtactcgacccagtcggagaactcctgcacggtgccgctgcccacattgccggagaaataggcctcgcacccgagctggcgggtcagctccatgaactcatgggtgccgaaggagttatcctcgctgacgccgccccagttggtgttgacgatggtcttgcgctgcatctgcgggccgataccatcgcgccagtggtaggtatcggcaaagcagccgcccggccagcgcagcaccggaatgtgcagcgccttgagcgcattgacaacatcgcagcgcataccgttgatgttgggaatctccgcgttttcaccgacataaatgccctgatagatgcagcggcccagatgctccgagaattgaccgtagatattcgggtcaatggtgccgagtgagcggttggtgttgataaagatatgtggcatgatgccctccttttgtcagcgcagcggcataatttttgtttccagcgcgtccagcgataccgtgacctccccatcgggggtcttgatgcgggtggtgcgcggctcctcactattgttgatgacgaccagcgtcctgtctgcggggaaccaggcggcctcggtgtacgggtcatcggtcagaaaatcgctgcccagcggcagccccttggcccaaagcagcaggttcagcagcatccgtgcgttgacgggactgtaggcaaagccggccatatatacgccgcgccccttgccgaaggtgtgtgcagcgatggcgggcaggccgtccaccgctgccagtacgcgggtatccccatcggtcagatagagatgctcatgcgtttccagcgtggcaccgtcggggatcaggccgtccacaggctgctcctgtactgcccagcggccatggcagacgcgggcacccatatcctcatccacgcccagcacccgcgccatgcggaaggtgtcgccgcagccgcccacagcggatggctcctcaatacccagcagcacaccgccattgtacacccagcggttcagcgatgcaacaaggcattcatcgcgccacgcatcgccgccgctccacgccgtgccggcgcggcctgcattgatgatcacatctacatcggcgggtacaccgttctttacatcgtcaaagctgataaatttcacatgtacgggcaggcccgacagtgcctcattgatgtggatcagcgtatgcatgtaggtttcgtggaaatgccccgacagcgtccaggggcgcaggccgccccaactgtgcaggacggctacagtcagcggcagggtggccacggggccgcgagtgtgcagcgccttgatggcgcggaattcatccgagatcgcggcgatatagtccacaaaatccgggaaatcgttcaaaagatgcaggtagccgcccaagccgatgcggtcaatcttggcgcgcagcagcgcacggcggacatgattccagtaggcggcagcatcgtgggtggggttgccgccgggggcaaaggtcggcgcgccgcctaagcccacagggaacagataagggtggagccgcagctcatgcacgggggcggcaacgcccgcgcacatccgggcctcatagccggaaaatacacatttgatgatgccgtcaaagccgaactccttgaaatgcgggccgtagggctcaacaccgacccagctgtcgtcatagaatacataggcgcgcttaccgtagcggtgtacaaggtcaaccagctttttgccaaagcctgccacaaactgctgggtgaactccatataatcacgcttgtgggctgtgggcggcatgtgagtgacctgaaggctgcctttgttgatgaaatcctcggcggtcagcgcgtagccgtaggcggcggcaaaatcgtccagtgccttttccgacaccgtaaagtcatagctgccccagtcggtaaacaggttgcggttgcggtcatcgctgccccagatccagacaaaattgtagaacatgctggtgaaccgcacaacattggtctgggggtggctctcacaccatgcctgcagccagctgtacagatagtcctgcgcctcggcggtgcgcggatccaccggcagcagatgctcgctggtccagtggttggtcacatggttatacatgttgatctcttcccacaggcgccatgccagaaagctgactgtgtaggcgtggaacggcacaggctcggccacggttacggtgccggcagaggcatcccaccgccatgccccggcgggcagcggcttatcagccgtgcggtcccacacctgccagtagcgcattgcctcggggcggtcgttgatccgaaactgctcggcaaagaagcccgccatcgggcggacagtcagcggcccttcggcggcaatgaccgggtcggtggacaaaaagctctgctgcaggcactcggggtgctgcttcgcccattcgttgtggtcgcgaatgatgcacagggtcgagtagatgtcatacccggcgtcaaggatctcgtccgagagctttgtgccgtcgctgtcgcggatgacatcggcaccccatttttcggccagctccagcgtcagcttttcctgcccggattcgcccggcagcgtgaagccgccgcttgtatgctcaaatttcatggatactcgctccttatcaaatatgcagacgccggcagagggctgcggcatcgctgcgggttatgggatcgttcaggctgtcagcggagatcagctgctcagccacggcctgcccggcggcaaaacgcgcgtaggccggtacggaatctggcaggggagagggggccgccagcggacggcgcccggccgcgccgggcatcagcacggccaaaaagtcggcagcggttaccgtgcgctgcgggtacagcctgccgtcggcaatccacgctgcagggatcagatcattttgcgcggcgcactgcacggtgccggcataggtctcatgaccgacaatgtcggcatacagatcgttgtagacattgatggggaagagcttcagcgccttgatggccagctccagcgcctcggcgcgggtcagcacctcctgcgggcgggtggcgtcataatcggcaaaggggtctgtgtcgggtgcgggcagggcgcagtccttcgggggtgtcagtggtgcaaagggcggtgcaggcgtccatgcggggacatcggctaccggcaggcccactgccttgccgagagcaccggccacaaacccggccatccggtaggcaccaaagtcgtttgtgtgggtgtaatcgccggggtagaaccaccgtttggcggtttccagtccctcctgtcgaatcagctgcatggcgtaggcgtgcaggtccagcacggggacagcttcttctttccctaaatccagcacagcgtccgcaaagtccgccaaaaagtcgttgtagtgggtgggatctctccagctgttgcgggccagcggtgtgataagcaccggcacggccccggcggtgcgtgtttcctttatataggtgcgcaggcggtcggtgtagccgccgcgggcctgcaggtgtgccagcttttggtcattgtggccgaactggaacaggcagatatcgcctgcccgcaggcgaggcttgacgatggcccaatgcccctcgctcaaaaagctctcggtcgtcaggccgctgtgcgcgtggttcgtgatgcagacctccggcaggtaggcgggcagcatctggccccacccggcgtagctggtgccgggggcgtagggcagctcaccggtctggtcagtgacagtggaatccccgcagacccagatacggcgggtgtggggtgcctctgccagcgcaacggcacttaatgcgccgcccactacggcgatgttcacggcatcactggccacagcgtctgcctgcccgcgcggcacgatggggaagacatcgcaataggcagccacaatctgctgcgcccccgcgggcaaaacaccgcgccacgcaaggcggcgacgccccgtaaagaccagcacctctccaccgtccgtaccggtcacggtgatctcggcacggtaaacgccctcgccggggacttggatccgcagccacaccggcaggcggcggtcggcagcgtcctcagttcgcagggcctcggcagcggttgcctgcaggccgtattcgctctgccgtatatcggaaatcggtgtgcccgcataccaccacagcggcagaaaaccgctgtttgtctccgggatatgcagcgccgcatcggcagtgtagaccgccccggtcacaaagccgaagcctgtttcgcagtcatagtttggcgcgccctgcgtatggttccatctgaattgcatcggtgtaccctccttggtacattcactgacccctttgataaaaagtggggccgctgcccggcagcggccccaacagcgcataaggtatacgcgattttgtttttgcttattttacgaccagaacagcgccctcatcgatcaagctctgcttctcgtccagaatctcctgatagccggcgtccagatactcctggctgtactcggcatacttggactcaaactggtcggggctgcaggtgatgcagtcaacataggcttcctgccacaggctgttcaggtcggtgctgtactcggaggtggactccacagccttggtaaagatgggggtgatcaggccgccgtcaatgcccttctcgcagatgtcgtaggcctggtcaatgatccagtcatagccatcgggagccagcaggctcttgttggccttaaggtcggtctccttgtcgccgtagcccatgacctcctgaacgaggcaccagtagtccttgttgttgttctggctcagcttggcatcgccgctgtagtcagaaatctgggtggcaatgccgtcggcgtcaacggtgtaggtctcgccctcaatgccgtgctgcaggtaggtcaggttctcaggctggctcatccagtcgaggaacatgtaggtggcggcgcgctcctcatcggtggcgttggcgttgatgcccatgatcatgccgtagctggggtactcatagtagtgggcggtgtagccgtcggccacggtgccggaaacggtggagcccagaacagcgacctcagcgttgggatcgttggccttcaggctgtcgaacacatcggtgccgttggacatgtagaagctgtaggtggcgcactggccggagacaaacttgcccttggcgagggagtcatcggtggtcaggtagaactcggggtcgatcagaccctcgttgtacttggtgttggcgtcctgcaggtagttcttggtggcttcccaggtgaagggggcaacattcagatccagatacttggccagctcatcctcgctggtgccgtccttgatccagttgtagaagtaggtgaagctcttggtgatcagcggagagttctcaacgccgaggccggcctccttgaaggccttcatggcggcgatcagctcttcgttgctggtgggaacctccagaccgacctgatccagccagtccttgcggatcagggtgacccagttgtagtagatgggctcgcgctctgcaaaaatgaaggcattctcgccgtccagcttgccgtaggtctcgatggtatccttcatcttgtcccagtaggtgggagcgtagaaggcaacctcatcgaggtcgatgggctgcatggcaccctcagaccagtagttgacggcctgcggcatgtcgtagtggaagatgatgctcggagcgttgccggcggcgatcatctggttgaagtcctgcacctcgttggagcgggcaatagctacatacttgacggtgacattgtacttgtcgccgaactcggactggatccacttggtatagtagttgtcggtggggttccagccctcaaagccacggtcgtagacgggaatctggatggtgacattctccgggaagccggcagaataatcggtgtagctgccggtgctctcagccgtagaggtggcctcggtagaagcagcagtgctctcagccgtagaggcggcggagctggcggacccgccgcagccggcgagcagggtggcggtcatggcagcagccatgccaagtgctaatgtttttttcattgttttcctccttattgaaaaacaaattcagtaacaaggttgggttgcaggcttcccgcaggggaagggggtggccgcttagcctttgacggcgccgaccatcgtgccctgcacgaaatacttctggatgaacggatatacgcagatgatgggaacagcggcaaagatgatgcaggcggccttcagcacctcggggttggtcatcgaaacggtggcaacaccctcggtctggaagctctcgcttgcggcaacgatcaggtagtagagcttgagctgcagcgggcgcagcgcaacattctgcttgatgtagtacagtgcgtcagaataggcgttccagcggccgaccgcgtagaacagagcaatcgtagccataatgggcttggacagcggtaccacgatcttgccgagaatcgtgaagtgagatgcgccgtccagacgggcagactcgatcaggctttcagggatggagccctgaaaattgtttttcatgatcagcaggttgtacggtgcaaagcagagtggcaggatcaggcaccagatggtatccagcatgtgcagctggttcatcagcaggtaatcgggaatcgtgccggccgtgaagtacatcgtgaacatgatcatgaaggtcatgaccttgcggccgcgcagctccgggcgggtcagcgcataggaggcgcagactgtcaggaacatgccgatggcggtaaacaccaccgtgaccagaaccgtgacccaaagggactgcataatggtcggatcgtgaaagaccttgttgtaagcctcgaggtttacgccgacatcgctcttgggcagcagcaggaccttattggccacaacataggcattgtcggaaagggacttcgccagaatgtggatgaagggcaggatgcaggtcagcgaagcggccccaacgaccacaaaacagagaatgtcgatcagcaggtcgatgacgcgggccttggtccaaggctttttgcgcttttcaacagcagatgctgcggtagcagtcatgtttatatacccccttacagcagaccgtcctcgccaagcttcttggcgatcttatcggacgcgaccacgagaatgacaccgatcacggactggaacaggcccagtgcggtggactcactgaatttgttgccctggaaccatttgaataccagcaccgggatggtggtggtatattcggttgccttggcgttggacagggccacgatacgctcgaagctgccgcccatcagcttgcccagctgcatgatcagcatgactacgatggtcgaacggatgcagggcagtgtgacatgcaggcattgctgccagcggttggcaccatcgaccttggcagcctcatacagctcggagttgacattggtgatggcggccagatagatgatcgtgccccagcccatcgtctgccagataccgatgagaatatagctgaacagccaccaggcgtcctcctgcaggaaggggatcgggcttttaccggcattggcgatcagcgtgttgataacgccggagttcgtggcgaacatcgcgtaggccgtggcaccaatgacgacccaggacaggaagtgcggcagatacagcagcgtctgggtaacgcgcttgaaccacttgacgcggatctcgttgagcagcagcgccagaatgatcggcatcgggaagctgaacagaagatccagcacattcagcagcagcgtgttggcaacagccttaccgaaatcgcggtgcttaaagaccttttcaaaaaccttcagcccgacaaatttactgcctgcatagcccttgccgatcttgtagtccagaaaagcgaccgacaggcccgtgtaagcaaagtacttgaacacgatgatgaatgccatgggcagcagcatcagtgcgtacagctgccagtcacgcttgaggtagtacaaaaatcctttcttcttgacggatattgcatccggcgagagcattttgcttttgctctgtcccatagaaaaactcgctcctcccgaatcagttgatgttgtgtggtgcgcgattgtcatattcaccacaaatcggcgcctttgtttgatttcattatgcactttgtccgtgctattgtccatgcacttttgcgtgaaaactatgcaatttcgctcatcaaatttttaccaaagttttggcatatgcaacgatagtgtaaaaatcaagccctattgtgcataaattgagatgaaattgaaactattcttgtcgcacttctacaaccgaaaggcaattttgttgtgcaaactgcacagatatggtcgtttttgagtaaagcatatggcgctttactgcgcggtgtgctacaataagaaaaaacgcggtgccgcaccgtttgcagcaccaacagggagagatgcgccatgggccgccgaccggcaaccgtaatcgaataccgcagctatgagttgccgtcacatttcccgatgcgcatcatcgcaggtgaggactggcgtatctcggatgtcccctgcggggtgctgcacttccacaactgtctggagatcggcctttgcgaaagtgacggcggtaagatagattttgccggccatgttgaggattttcacgcgggggatgtcacggtcatcgccggtgatgtgccccatacgacatggtcggacgcgggcacggcaagcaagtgggcctatttgttttgcgaccccgaggaactgctgcgccccttttttgcactggataccctgccgaacgcccgcctgctggacggtctgctgcacggctggtgccgggtgctttcgccgcagcaaaaccccgcccttgcaccgctggtgcgccagatgctgcgcgaaatgacccaaaaaggactgaactaccaaatcagtgttcgcgggctgtttgtggctttcatcacagagctgatgcgtctgcctgcccacagcgacatcggcagcctgaccggcagcatggtcattgcaccggccctgcggtacatcaacagccattatatggagaactttaccataggtgatttggccgaggcctgcagcatgagccaatcacactttaggcgggtgttccacgaattgatgggcatcggcccgcttgagcatctgaaccatacccgcattaccaaggcctgcacgctgctgcggatgaccgatgaatccatcctgactgtgggtgagcaggtcggctttcgctccatgtccagctttaaccgccattttgccgaggccatgggctgttccccctccgaatggcgccgcaccgtgggtgccgggcgcagcacctccatcctgaaatacaacggctggctcaccccgccgcgcgacaggtaagggagactgtatgcgatctgccggatagcgttttgacaggctctgagagtataaaacaattaggaaaaacaaaatataacacaaaaataataaacataattcctcgtaaacagttaaattgacaagctcgcgccagtatgctatactcacatcaatcaaaggtgaaccgcatcgaaagccggacgcaagggcggctgtgggcgggcaaatctgccaatggaacaggagggtctcttatgctgcttcaaggtaaaaaggcaatcatcacaggcggtacgcgcggtatcgggttttctgttgccgaggtattcctcaaaaacggtgcatcggtagcactgttcggctcgcgtcaggaaacggttgacaaggcgcttgcacagctgaagtcggaaaatcctgcttgggaggtcatcggtatggcacccgatcttaccgattacgccgcccttgatgcggcattttccgaggtggagaatcgctttgggcgcattgacattctcgtcaacaatgcaggcatttccgcccgggagccgctgtatgagtatacgcctgaggcgttccggcggattatggatctgaatgtgacggctgtgttcaacggctgccgtgcggcggccatccgcatgaaggcgcagggcggcggctcgatcatcaacaccagctcgatggtcagtctgtacggtcagccgtccggtgtggggtatcccaccagcaagtttgctgtcaacggcatgacccgcagccttgcgcgggagcttggccgcgacaacattcgtgtcaacgcggttgcgccgggtgttacccgcactgatatggtcgcaaatctgccggaggagatcgtccgccgcgtctgtgcgccgatcccgctgggccgcatggccgagccggaggaggttgcaaatgtattccttttccttgccagcgatatggcaagctatgtgaccggggagatcctcagtgttgacggcgcagcacagacctgagccgtatctgtaccatataaagaatgaatgaaaatatcagtgccataaaatattattcttgcgtttcttacctccttgtgctatactgacacagtaaaactgaatacgacagcaggtgcctttttatgcacgatatgcgcatagaaaagggtaaaagggaagcgggtgtcaatcccgcgcgatctcgtcactgtgataagggagtctgccgccacgatgcaggtgcatcagccactgggccataagcccgggaaggcggcggcaggcgcagagctttcagccaggaaacctgcccgctgccgggtacgggggctaaacgccccaaatcacgaggaattggttgtaccgcaaggaacctgcttaaaagccgaggtctttttgtgttgccattctgcacgcaaaagacctcgttttttgttcgggcttgtttgggtgtgcgctgcttcctcggcaatggctgttttagaaaggaagcagaacccatgaaaaaacgcaactgtaagaaagccgccgccgcgctgatggcggcagccctgtccaccgcactgctggccggctgcggcagcaccgcccccgttgacagcacgcccgagagcgtggccgtaagcgaggccgcccccgcccagagcacagaggaaggggatgcagacgagatggctgcccagaattgtgccgatttgattgatgcgatctatgtgcagacccgtaccgaggacaccgatgcccagtgcgaggccgccaaggctgcgtgggacgccctgaccgacacccagaaggagatggtagagggcgagaacgccgaccccgactacttcggccgcgataccggtgatgctgcgctggacgatccccgcaacgcggatgacatcggcgagaatgagctgctggtcgtcagcttcggcacctccttcaacggcagccgtgcggcggacatcaagggcgttgaggatgccctgcaggccgcataccccgattggagcgttcgccgcgcctttaccgcgcagatcattatcaaccatgtgcaggcccgtgacggtgagaagatcgacaacatgcagcaggcgctggatcgtgccgtggccaacggcgtcaagaatctggtcgtccagccgacgcatctgatgcacggcgcggagtacgatgagatgtgcgaggcgattgatgcctacaaggataagtttgagagcgttgctatcgccgagccgctgctgggcgaggtaggcagcgatgccacggccatcaatgacgataagcaggccgttgcgaccgccatcaccgatgaggctgtaaagaccgccggatatgaggatgccgctgccgccgctgccgatgggactgcctttgtgtttatggggcatggcacctctcacacggccaaggtcagctacagccagatgcagacggcgatgcagacgctcggctatgagaatgtctttatcggcactgtggagggcgagccggaggataccgcctgcgaggctgtgatcgaggctgtgaaggcagccgggtataccaaggtcgtgctgcggccgctgatggtggttgccggtgaccacgccaacaacgacatggccggtgcggacgaggattcgtggctgagccagttcaatgccgcaggctgctttgacagcgtgaacacccagatcgccggtctgggtgagatcgatgcagttcaggctctgtatgtggcgcataccaaggctgcgatcgacacactgaacggttgattttccacctctgcccgaaggatctgccttcgggcagtttttgggtgaaagcgtgcgattgcggtttccgtatcgcaaaaaacaaagaaagtatatgaggaaagacaaatgaagaaacagctcctgatcctgacgctggcggccctgctgctggcaggctgcggcgcaacctccgcggcggaaagcgccgtccccgcacagagcgagagcgctgctgccgccgaaacgcccgatacagccgaggctaccccggcggctgccctgccggacggtgtgtataccgccgagttcaagaccgacagcagcatgttccacgcaaatgaagcctgcgaggggatgggtacgctgacggtggcggacggaaagatggttttccatgtcagcctgcagtcccagaagatcgtaaatctgtaccccggcaccgccgccgatgcccccgcgcatgaggcagactggctgcagccgactttggacaccgtgacctactctgacggaaccacggacgaggtctatggctttgacattcctgtggaggctgtggatactgacttttcgctggcaatcctcggcaccaagggcacctggtatgaccatatcgtcagtgttgcggacgctgtgcccgctgcggaggatgccgccgaggccgtattgccggaggatggcagctatacctgcgcggtcacgcttaccggcggcagcggccgcgccacggtggagagccccgcagccctgacggtggcggacggcgcgatgactgccgtcgtcgtctggagcagcccgaactatgattacatgctggtggacggggaaaagtacctgcccaccaacaccgagggcaattcgacctttgagattcctgtggcggcgctggacaccgctctggccgtcacggcagataccgttgcgatgagcaccccgcatgagatcgactacaccctgacctttgacagcgccacgctggctgccgccgaatgaggcgggcagcacttttggtgctgcccgccctgctgctggcgggctgtgctgcaaaggaggcagaacctgccgctgccgggctgacggtcacgggccgttacccgttggaatacgccgagcagtttacgatcgatgagtgcgcgggcgggtacagccttgtcaccatcggcgaggagcgctatcttgtggtaccggaggacgcgcccctgccgaccgggctggagcaggatctgacgattttgcagcagccgattgaaaacatctatctggtttcgacctccgtgatggatccaatcatcagcatcggggcgctggatagcatagcactgtccggcacacaggctgacgggtggtatctcaggcaagcgcgcgaggcgatggaaaacggagagatcgcctatgcagggcgatacagcaccccggattatgagatgatcctgaacgccgactgtggccttgccatcgaaaatacgatgatctaccatacgccggaggtcaaggagcagcttgagcggttcggcatcccggtgctggtcgaacgctccagctacgaggagaatccgctggcgcggatggaatgggtcaagctatacggtttgctgctcggcaaaaaagagcaggccgagcagcagtttgcggaggcagagcagcgcattgccccactggcagagcagccgtccaccggcaaaacggtggcgtttttctccattacatcgaaccggcttgccaccgtgcgcaagggcaacgactatgttgccagaatgatcgagatggcgggcggggactatgcgtttgctgatctgactgacaacggtaacaatctggctaccgtgaacctttcactggaaaatttttacgcaggggcgaaggatgctgatgtgctgatctacaacagcaccattgagggcgaggtcgattcgcttgcggcgctgctggaaaaatgccccctgctggcggactgcaaggctgtgcagcagggcaatgtctggtgtacggcgcagagcctttttcagcagagcatggagctgccggacctgattttggatatgaaccgggtgtttacccaagaaaatccgccggaaagcgaactgaagtttttgacgaagatagaataaacaagcaatataaaggaaggcattatgcacaccgccaaacgcctgacaatcgcatatctttccatggcgggcgcactgctggcgctgtttgcgctcaacctgttctggggcagcgtggcgctgacgccccgggccgtagctgccgcgctgctgggccgcgggcaggatgcgttggcgggcagcattgtctggcagctgcggctgccccgcgctgtgatggccgcactgctcggggcagccttgtcggctgccgggtatctgctgcagacattttttgcaaatcccatcgccgggccgttcgttatgggcatctcaagcggtgccaagctggcggttgcgctgacgatggtggtatttttgaacagaggtctgctgacaagctcactgaccctgatccttgctgcctttgccggggcgcttgcggcgatggcgtttgtgctggcggtagcccgccgcgtacagcgcatgagcatccttgtcatctgcggtgtcatgatcgggtacatctgctcggctgtgaccgatattgtggtggcctttgcgcaggattccaacatcgtcaacctgcataactggtcaatgggcagcttttccggtgtgacatggggcaatgtggaggcagtggccgccattgtactgccctgtctggcggccgcgtttctgctctccaagccgatggccgcctaccagatgggcgaggcctacgcccgcagtgtgggtgtgccggtccgggcattctcggcagcgctggtgctgctgtccagtctgctggcggcctgcgttacggcgtttgcggggccgatttcctttgtggggattgcggtgccgcatttggttcggcaggcgctgggcagcgcgaggccgctgtatgtgctgccgggctgtgcgctcggcggagccaccttctgtttgctgtgcgatctgatcgcccgcagcctgtttgcaccgaccgagctgtccatcagctcggtcacagcggtgttcggcgcgccgatcgtcatctggctgctcgtccgccgccacagcagggagggggctgtatgagttattgtgagacacacgcgcttgcggtcggctacagcgcaccgctgctgcgggatattgctctgcaggcagagcgcggcagcatccttgcgcttatcgggccgaacggcgcgggaaagtcgaccctgctgaagacactctcggcgcagctgaagccgcagggtggtgcggtgcttctggatgggcaggatctgagcgcctatacgccgggcgcgcgcgcccgcaagctggcactgatgctgccccacacggcccgcaccgagctgaccacctgctttgaggtcgctgccgccgggcgctacccctacacagggcggctgggcgtgctgtctgctgcggaccgggagcaggtatggcaggcgctgcgccttgtgcaggcggatatgctggccgaccgggatttttcccgcatcagtgatgggcagcgtcagcgtgtgctgcttgcccgggcggtctgccagcagccggaaattttgctgctggacgagccgacctcctttctggatgtcaagggcaaggcagagctgctgacgatcctgcggacgctggcgcgggaaaggcaggttgccgtgatcgtgacgctgcatgagcttgcgcttgcgcgcaagctggcggatgcggtggtctgtgtatccccgaaaggcgtttcccaagtgctttcgcctgaggctgcctttgccgaggataacatccgcaccctgtttgatctgacagcggagcaatatgcggccctgtacggaaaagacgatgccaagccgaaatttgagcactacatccgcagcgggcaaaagctgctgcggtgcggctataccaccggcacctgtgcggcgctgggtgcggcaggggcggcaaggctgctgctgaccggccgcgcgcccgagacagtcgggctgcgcacacccaaaggccttgttgtggaggtcgtcccgcagcgctgccgcttgacggcgcagggtgctgaatgcgccatcgtcaaggacggcggcgatgacatagatgccacgaccgggctgccggtggtggcagaggtctcgctgctgctcgatgcccccggcaccgttacgatcgacggcgggcacggcgtgggccgcgtgacaaagccggggctggaccagccggtgggtgcggcggccatcaaccatgtgccgcgccgtatgatcaccgaggcgctgacaaaagaggcggaggcggccgggtataccggcggctttgcggtcgtcatctgcattgacggcggcgaagaagccgcgcggcgcactttcaacccccacatcggggtcgagggcgggctgtcggtgctgggcaccagcggcatagtggagccgatgagccagcaggctatccttgacacgctgcagctggagattcatcaggccgcgctgcggagccgccgcctgattttggcacccggcaactacgggctggactatcttgcccaaaatatgccggagctggcggacattcctattgtaaaaatctccaattttgtcggtgacgcgctggatatggcggcggctgagcattttgaggaggtgcttatggtcgggcatgtaggaaagctggtcaagctggcgggcggtataatgaatacccactcccgccaggcggactgccggaccgagctgttctgcacccatgcggcactttgcggtgcgccgcagccggtctgccgggtgctgatggatgccgctacgacagatgcctgccttgtcattctggacgaggccggtctgcgcgccgccgttttggaaagtctgctcgaggctgtgcagctgcatctggaccgccgcgcggcgggggcctttgcggtgggggcggtactgttctccaaccagagcggcccgctcggccagacaaaaaatgccgatgcactgctgaaaaagtggaaaggaaattgagatggtacattttgtgggggccgggccgggggcaccggatcttattacacagcgcggtgcggcgctgctgcaggcggcggactgcatcatctatgcaggcagtcttgtaaacccggcgctgctggggctggcaagggcggactgcgccatctacaacagcgcggaaatgacgctggagcaggttgcagctgtgatgaaggagaacgaggcggcgcacaaggatactgttcgcctccacacaggggacccctgcctgtacggcgcgatacgcgagcagatggatctgctggatgcgtggcgcatcgcctacgatgatacgcccggcgtgtctagcttttgcggtgcggcggcggcgctgaacgctgagtacacgctgcccggcgtcagccagaccgtcatcatcacacggatggagggccgcacccctgtgcccgagggagagcgcctgactgcgctggcggcgcacggtgccacaatggtgatctttctctccatcgggctgattaacaaggtacaggccgcgctgctgcagggtgcctacacggctgtgaccccggcagcggtcgtgtataaggctacctggccggaggaaaagattctgcgctgtaccgttggtacactggccgcgcagacgcaggcggcaggcattaccaagacggcgctcatcgtggtgggggatttcctcgctgcgcggtatgaccgcagctgcctgtacgacccggcgtttacgaccgagtaccgcagggggacacagccatgagctgcgcctatcttgcctttacggagcgcgggctggcactggcgcagcagctggcggcggcgtgccccggcccggtggcgcgatgcggtgcaggcggcccgggactggacgaatggacggcagcgcagtttgcggcatcagatgcgctggtttatatcggtgcagtagggatcgcagtgcgggctatcgcgccgtactgccgcagcaaggctacagatcccgccgtggtggtgctggatgagtgcgggcggttcgccgtttcgctgctgtccgggcatctgggcggtgccaatgcactggcgcggcggctggcggcggtgtgcggtgcggtgccggtcatcacgaccgccaccgacctgcacggcctttttgcggtggacgagtgggccaagcggcaaagctgcgttgtggccgaaccggagcgcatcaagcgggtcagcggcgcattgctggcgggaaagtgcgtgcattttaccacggattggcccatacagggcacgccgcccgccggcgtgctgcctgcagctgacggcagcgctgatcttgcattgacgctgaccccggccgggcaggcgctgcacattgtgccgcgcattgcggtgctgggcattggctgcaggcgcggcacggcagccgagcatctgcaagctgcctttgcagccttctgccgtgagagcggtctggccccgcagggggtggctgcggctgcaagcatcgacctgaagcgggacgagccgggccttgcggcattttgccgggatcacggctggaacatggatttttataccgctgcgcggctgcgcgcagtgcccggcagctttacgggctccggctttgtcacaagtgtgaccggggttgacaatgtatgtgaacgggcggcggtgctggcctcggggggaaaactgcttctgccgaaatgggcgcgggacggtgtgacctttgccgccgcgctgcggccctttgccccggattggagatggagagatgatgaaccgtaatgtggtgtatgtggtggggcttggccccggggacagccaattcctgacagcgcaggcggcggccgcgctggatgcggcggatgtcctgtgcggatatacggtctatgttgagctgatccgtgcgcgctaccccggcaaggaaatctgcaccacgggcatgacgaaggaaatcgaccgctgccgctgggcgctgcaaacggcgcagagcggcaaggcggtggcactggtctgctccggcgatgccggggtctacggtatggccagcccgctgctggagctggcgcccgcctacccgggggttgaagtagagatcatacccggcctgaccgccgcactgagcggggccgcagtgctgggcgcaccgctggcgcatgatttttgcgttgtatcgctgtctgaccggctgacgccgtggcctgtcattgaaaagcggctcgcctgcgcggcggcgggggatttctgccttgccctctacaatccatcctccaagggccgcgcagactatctggccaaggcggtgcggattttgcttgcaggcggtaaagcacctgatacggtctgcggtacggtgcgcaatataggccgcacaggccagactgcccggctgctgacgcttgcggaactggagaaaacagaggtggatatgttcacgactgtttttgtcggtaacgccgccacgaaggcacagaacggaaaaatggtcacaccgagggggtatcacggcgtatgagagcggtcgttttcagcggaactaccgagggacgggcattttcccgcgcgttggcggcgctgggggcagcggtcacggtctgcgtggctactgagcttggagccgaggagcagggctgcgccgaggggatcacggtccgcaccggtcggctggacgccgaagaaatggctgcgctgctgcgcaatgcgaacctttgtgttgatgcgacccacccctatgcgaccgaggcaacgcgcaatatccgtgcggcggccggggcggccggggtggaataccaccgcttgctgcgccctgccagcacactgccggccggcagtgccgtgtttgccgcagccgccgatgccgcagcgtatctgcagggcaagcccggcgctattttgctggccacgggtgctaaggagctgcccgcctttgcagtgctggagccggagcggctgtacccccgggtgctgccgaccgtggcaggcatcacggcctgcgaggcagcgggcatcccgcaccgcaacatagttgcgatgcaggggccctttaccgaggagttgaatatagcactgctgcgtcagttccggattgctttccttgtcaccaaggacggcggcgcagcgggcggctttgccgagaaggcccgggctgccgagcaatgcggcgtgcagctgatcgtgctgcgccgccccatggagcagggcgagtgcgccgaagaaattttacagcgatgcagggagctattatgaagatcacactcattggcatgggcagcggcacccccgccagcctgacggcggcagggcgggacgcgcttttgggcgcggagctgatccttggtgcgcgccgtcttttggagcagctcccggcagaatgtacgcctgaccgtgctgccctgtacaaggcgcaggagatctgcgcccgtctgcagtgcgctgatattgccgctgcagcggttgttttcagcggggataccgggttttactcaggggcatcggcgctctgccgcgcccttgacgcggcagggctgccctatacagtggagccgggcatatccagcgtacagcttttggcggcagcgctgcaccgcccctggcaggactggcagttggttagcgctcatggctgcagctgtgatcctgcggcggtctgccgcaacggaaagcctgtctttttcctgactggcggcagcgagaccccggctaccctctgccgcgcgctggccgatgccgggtgggggcatgtgaaagccaccgttggtgagaaccttggcagcaccgctgaacgccttgtgacagataccgtggaaacgctcgcaagtcttgattttgcaccgctgagcgtgcttttggtcgaaccctgcccgccgctgcctgcccgggtgccgggctggccggacgaagctttcctgcgcggcaaaacgccgatgaccaagcaggaggtgcgcgcggctgtgctggcaaagctggcggtgcgccccggcgataccctgtgggatgtcggtgcgggaaccggcagcgtcagcgtcgagatggcgctggcggccacggccggccgggtctgtgcagtggaatgtgacccggaggcctgtgcgctgatccaacaaaaccgcgcaaaatttgcggtatccaatctgtatctgacggagggccgcgcccccgccgcactggcggggctgcccgcacccgatgccgttttcatcggcggcagcaggggcagcatgcggcagatcgtggatgcggtgctggcagcaaaccccgcagcacgcctttgcatcagcgccattgcgctggagaccctgcaggaggctattgcggcgctgacggcccatggattgactgcgcaggtcacgcagatttccgtcagccgcagcaaacaggcaggggcactccacctgctgatggcgaataaccctgtatttttgatcgtgagggagtaagtatgctgcagctcgttctgaccgcgccgcgctcgggcggcggcaagaccacagcagcctgtgcgctgttggcggcgctggcagcccggggccggcgcccctgtgccttcaaggcagggccggactacattgacccgatgttccaccgcgccgtgctgggggtcaaaagccataatcttgacctctatttttcggcgccggacaccgtgcgccgactatatgcgcagggggcggcagactgcgacgcagccgtctgcgagggggcaatgggctactatgacgggctgggcggcgtgacggatacagccagcgcatggcagctggcggacacgctcgatctgcccgcactgttggtcgtgcgcccgaagggcgccagcctgacgctggcggccgagctgcgcgggctgctggcgttccgcacgccgcaccatatcgcgggcattttgctcaacgattgcagcgaatctttgttcaagctgctggccccaatgctggaaaaggagaccgatctgccagtggtggggtatctgccccacctgccggagactgccattgagagccgccatctcgggctgaaaaccgcagcagagattgctgatctgcagcaaaagatcgaggttctggcggatgcggcccagcggtgcatcgactggaacagactatatacgctgtttgaccgcccggcaccgcccgccccgccccgcatcactgtgccgccggcggtgcgcattgccgttgcacaggatgaggctttttgctttacctacgcagaaacgctggaggcactgcgggaaagcggcgcggagctttgctttttcagcccgctgcgggatgccgccctgccggagcagatcggcgcgctgtatctgcccgggggctatccggagctgtatgccgcgcagctggcggcgaatacccccatgcgcggcgccgtgcaaaaggcggttgcgggcgggctgcccaccgtggcggagtgcggcggctttctctatctgggcaggtcgcttgagggcgcggacggaatcacctatccgatggtgggcgtgctgccggggcagggcttccgggtcggtcggcttgtgcggttcggctatgcaaaactgaccgcgcgcgccgacagtatgctgtttgccgcaggggagagcctgccggtgcatgagttccaccactgggacaccacggccaacggcggggcctttgcagccgccaaggcagatgggcggcagtgggcctgcggctttgccaatgagcatctctatgcgggttttccgcatctgtacttggccggtacgccgctgccgaagcgctttgcggatgcggccagtcgctatataaaggaaagaacatgaccgaaaatgaacttatgaccctattgcgcaccgtaaccccgccggatgaggcagcccgcgctgccgcccatgcacattgggcggcactggcgaaacctctgggcggactgggcgcactggaaacgatggtggaggacgcggcggccctgaccggaaatgccgccccggcctttgcgcagcgtgctgtgctggtgctttgcgcggataacggtgttgtcgcgcagggggtcagccagacagatgccgccgtgacccgcgcggtgctcgaaaatcttgttgcccgacgcaccagtgtctgccgcatggcagcagcggcccggtgtgccgtgatgccggtcgatatgggaattgcgggtgcgcccgtggtgggtgccgccgattatcgcattgcccccggcacccgcgattttaccgcaggaccggccatgacccgggcgcaggccgtacaggctattgcggccggccttgcactggtgcgggcgcaaaagcgcgccggtgtgcagctgcttgccaccggtgagatgggcatcggaaacacaacgacctcctccgctgtggcgtctgtgttgctcggccgcccggtggctgagatgaccgggcgcggcgcgggactttccgatgccgggctgcgccgcaaaatagaggtgatcgagcgcggaattgcggtcaaccgtcccgatgctgccgacccgctgggggtgctggcggcgctgggcgggtttgacattgccgggctgtgcggtgtgtttttaggcggcgcacttgagcagatccccatcgtgatggacggctttatcagcagcgtggccgcgctctgcgctgtccgcctctgcccgggggcggataaggctgtgtttgccagccatgtctcggcagagccagccgcccggcttgtgctggaggcactgcacaaaaagccgcttatcacagcagatctgcatctgggggagggaaccggggccgtggcgagcctgccgctgtgggatatggcgcttgcggtctatcatggctgctattcctttgcggagggcggcatcgcgccgtacacaccgcaatgctgacgctggtcatcggcggtgcggccagcggaaaaagcgcgtttgcggagtcactctgtatgcaaagcccgctgccgcgcacctaccttgctacgatgcaggtatgggacgccgagtgcgcggcacgggtcgcgcggcaccgcgccatgcgccaacaaaagcagtttgccacggtggagtgcccgcgcgggcttgaagccattgctttaccgcagcgcggcaccgtgctgctggaggatctcggcaatctggcagccaacgagctgtacgatccggccggggcgggcgaggccgctgccgatgccgtgctgcggggaatcgaggcgctgcgggcgcagtgtgaggagctgatccttgtgacgaatgaggtgttcagcggcggcacagcgtatgcaggcgataccgagcggtatctgcgtgcgctggccaagatcaacaatgccgccgcccagcgcgcagacacggtcgtgcgggtcgtgtgcggcattcctgtctactataaaggaacgaagcgatgatagtatttcagaccgttgcggtggcgcttgccatgttctcggcactgccggtgccacagtttgactggaacgaaaaaaatatgcggtatgcgctctgcgcatttccgctggtgggggtaatctgcggggcgctgtggtgtctgtgcggggtgctgccgctgcccgatgcggcccagactgccggattctgtctgattccggtctgggtcaccgggggcatccatctggacggctatgctgacacctgtgatgcactggcaagctacggtgataccgcgaaaaagcttgccatattaaaggatccacactgcggagcctttgccgtcatacggctgtgcagttattttgctgcatacctgatgctgtgcgcctgtgtgcagtttacaccgcgcacgggtgcgctctggacactggcactgatgggggagcggatgctgtccgggttggcggtggcagcattcccgctggccaaaaatacagggctggcccacacctttgcaacggcggcggaccgccgaacggtctgccgtgttttggcggcaggctgtctgctgtgggcggtggggattctggtcttgggcggttgggcgcttttgctggcggcagggctggtatttgcccggtatcaccgggtcgctgtcaggcagtttggcggtacgaccggtgatctggccgggtggttcctgcaaaaatgtgagctttggatgctggcggcgctggctgccagtcaatggctgggggtgctgtaaatgctttttatcacggggccgctttatagcggcaagcgcacatttgctgcgcagtttggcgggcggcagatctatgaggtgcaggaccgcgccgcagaaatggccgggctgcaggcgctggccgatgagctggccgcctatgatgtggtcacagctaccgaggtgggcggcggtatcgtgcccatcgaccctgccgaacgcgcccgccgcgaggctgcgggccgtctggcctgcctgcttgcggcccgggcagactgcgttgtgcagatgttctgcgggttgcccacgattttgaaaggagaactgccgaaatgctgatctatcttttgcggcacggtctgacggaatataatgcccagaagcgctatcaggggcagcgggatattcctctgtcggaggaggggtgcagagagctgcgccgtgcggacattgatccgaaggttgtctatatttctacgctgcagcgtacagcgcagaccgcgcgggtcctgttccccaacgcgaagcttatcccggtcgatgggctgaaggagatgtgtttcggcagctttgaggggcgcagctatgtcgagatggagcatgaccccgactatctggcgtgggtcgcctccaactgtgagcgccgctgcccggacggcgagcggaaggaccagttctgtgagcgcatctgcacgacctttgcagcccttgtggatcaggctttggcagagggggagcagatgctggtcattctggcgcacggcggcacacagatggcggcgctggatcgctatgctgtgccgcaccgggattactacgagtggtgcgcgcccaatgcgggcggctttgtgctggacgcccgggactggaaatcgcagcatatcctgcatcttgtaaagacagtgcagtacacgaaggggtctacatgctgaccggcgttgcggtggcgggcggctttgtgctggatgctttgtttggggacccggcatggctgccccacccggtcgtatggatggggcggtgcatctcagcgctggaaaaatgcctgcggaccgtcttacccaaaacgccccggggggaactgctcggcggagggatcgtggcagctgtgctgccgctggggacgctggccgtgacgggaacagtctgtgcgctggccgcacggctgcacccgctggcggggctgactgttcagatgttctggtgcgcgcaggcacttgcggcacgggggcttgtgcaggaaagccggaatgtttataaagagctggcaaaaggtgacctgcccgccgcccgccgggccgtggcgcggattgttggccgcgataccgagaacctgacggcagagggcgtgacgaaggccgccgtggagaccgtggccgagaatgcgagcgacggcgttattgcaccgctgttttacatgcttatcggcggtgcgccgttggcgctgacctacaaggccatcaacacgatggacagcatgctcggctataaaaataaaaaatacctgtattttggacgctgtgcagctaaattggacgatgccgccaactggatgcccagccgtctggctgcgcttttgtgggtggcagcggcagcgctgactggcggcagtgcaaaaggggcgtggcgtatctggcggcgcgaccgtcacaaccacgccagccccaacagcgcccagaccgagagcgcctgcgcgggggcattgggcgttgaactggcaggcccggcgtactacttcggcgcctattacgataagccgaccataggcgatgcgctgcggcctatcgaggcggaggatattctgcgggctgaccggatgatgtacaccgagagtgtgctggcacttgtaatcgggctggccgtccgatttgctttgctgatgtgaggagagtttgtatgaagttggtccatggcggtgactgggcgggctaccgggcagaatttggccgggatgcgctggatttctcggcgaatgtcagcccgctggggctgccgcatggggtggctgcggctatctcggcagcgttgccgacagcggaccgctacccggaccccctctgccgggagctgcgtgccgctctggctgctgctgagggtgtgccgatagagcatatcctttgcggcagcggggctgcagatctgatcttccgtctggtgctggctgtaaagccgcgccgtgcgctgctgcctgcccccacctttgccgagtatgctgccgcactggatacggtcggctgcacggtcgagcggttcctgctggacgaggcaaacgattttgtattgacagaggactttgtgcaggctgtgaccgagggtacgaacatggtgtttctctgccagcctaacaatcccaccgggcaggtgacgccgccggcactggtggaaagactcatcagccgctgtgccgactgcggtgcggtgctggtcgtggatgaatgctttctcgactttctgccggacagggatgcactgacggcagaacaatttttgaacgatgcaccgaagcttgtgatcttgaaggctttcacaaagctctacgctatggcgggggtgcggctgggctatgcgctgtgcagtgatacggcactgcttgccggtatgcaggcggcgggacagccgtgggcggtctccagtctggcgcaggcggccgggctggcagtgctgcaggagagcgcctacgctgaggaggtgcgcacgctcatcgaggccgagcggcctcggttggctgacgcgctgcgggcattgggactgtatgttatcgaggggcgggcgaactatctgctgttccgtgccccggcagactttggcgaaaagctgcggcagcacggcgcggtggtgcgcagctgcggcaactacccgggtctggatgacggctggtatcgaacagcagtgcgcacaaaggaagaaaacaccaagctgcttgccatcatgaaggaggtgcttgcatgagccgggcaaaatgtatcatggtgcagggaacaatgagcggtgcaggcaaaagcctgctctgtacggcgctctgccggattctggcgcaggatggttataaaacagcgccgttcaaaagccagaatatggcgctgaacagctttgtgacccgagatggtctcgagatgggccgtgcgcaggtcgtgcaggcgcaggcagcgggcattgaacccgatgtgcggatgaacccgattctgctcaagcccagcagcgatgtcggcagtcaggttattgtcaacggtgaggtgcgcgggaatatgcctgcggcggaatacttccgccataagcgcgcgctgatccccgatatactgcgtgcctacaacagccttgccgaggaatatgacattcttgtcatcgagggcgccggcagcccggctgaaatcaatctgaaggcggatgacattgtcaatatgggcttggcagagctggtcgatgcgccggtgcttctggcgggggacattgaccgcggcggggtgtttgcccagctgtacggtacggttgcgctgcttgaggaacgggagcaaagccgcatcaaagggcttatcatcaataaattccgtggtgatgttgaaatcctgcgccccggccttgccatgctggaggataaaaccgggctgccggtgctgggcgttgtgccgtatctggatgcggacatcgaggacgaggactccctctccgaacggctttgccgcaaaaagaccgtaaagccgctggatgtggcaatcgtgcggctgccgcatatctccaattttaccgattttatcccgctggagcagcacccgctgctgggtgtgcgctatctgcacaccgtgcgtgagctgggcacacccgatctggtgctgctgcccggcaccaaaaatacggtggaggatctgctctggctgcgccagtccggcttggaggcagccctgcagaagctggcggccggcggtacgcccgtgctgggggtctgtggtgggtatcagatgctgggccgcacactgtctgatcccgagggctgcgagggcggggtgccccgcactttgcgcggtctgggactgctgccgacagagacggtatttaccgccgaaaagcgccgcgcgcaggtgacggcccgcgctgccgcaccctttgcgggggctgcgctgaccgggtatgagatccacaccgggcgcaccgctgtgaacggcgcgtccttctgcaccatgacggacggcacaccagagggctgcgtgaaaggcaatgtgtttggaacctatctccacggcttgtttgactcgggtgagctgaccgagcagctggcggcctatctctgccgccgccggggcattgcgacggagcaggctgcgccgctgccgatggaagcctaccgtgagcagcagcttgacaggctcgcggacggtgtgcgccgtgcgctggatatggatgcggtatatgccgcaatgggactgaaaaatccgaaaggagcaagcctatgacgccgcagcatcatctgcccgccgatattgagcggacgagcatggccattattaccgaagaactgcaggcgcgggacgcggacatcccgccggagaacgctgccgttgtcaagcgggtcatccataccacggcagatttcgactatgcggagaatctgcagttcacgccgggggccgctgcagccggtgtggcggcaatgcatgccggtgcaacgatcattaccgacacaaatatggcgctggcgggcattaccaagccgggtcttgccaggctgggcggccgggccctctgctttatggcagatcctgccgtggccgaggcagccagaacggccggaaccacccgggcggtggctgccatgcattatgctgcgcagcagtatcccggtgcggtgctggcggtcggaaacgcccccacggcgctgcttgccatcgcagaggagatcgaggcgggtctgcgcccggcgcttgtcatcggcgtgccggtcggctttgtgaatgtggtagaaagcaaggagcggctgcttgctgtctgcgagcagtacgccgtgccagccatcgttgcgatgggacgcaagggcggcagcaccgtagcagctgccatctgcaatgcgctgctctattccgctgccgagatgctggaccccaccgcccgcggctgggaatagtacgatatacaaagaaaactgccgggagccatatggctcccggcagaaaattttattcagctgtccatatcctcaaaggcctcaaggcccttcttcgcttcggccttggtgtcaccgtggcgcacaaagcacatcgtcacaaagctcagcgccacaaaggctgcggcgtaggggaagagtacgcggtagtcgatggcgcgcatcaggctgcctgcgacaatgggggtcacgacctgtgcggccatcgagaaggtgtaataatacccggtaaatttgccgatgtcactgccgcggcacatctccacgaccatcggcagagagttgacattgatggctgcccaggcaaggccgaccaacgcaaacaccacatacatgatgggctggatggaggaatagacagtcgtcagcagatagccgagcataaagcaggtggccagcagcacaatgccgcactggatcgtgcgcttgcggccgatcttggcggccagcgcaccgatgggaatataggagacgatggcacctgccgtggcaaccagcaggcaggtggacgcgccgcccagaccctcgcccatgacagcctcgacatatttggtgaaccaggtcgtaacgccgttatagccgataaaccacagcgaaatcgagatcagcaggaaagtcaggctgcgcttgaccggcgcgggcagcacctcatggccctgcccgtcatcggcagcaagattccattcggggtgggcagcttccagcttttggttttctgcctcgagcttaggctccttgatggtcaggtagagaatcaaaacagccgtgaccatgataagcgaaacgatgaggaagagcgggcggtagctgacatgcgccagcccgtgggttttggaggcggggtacatcaccgccgcaagccccagatacaggataccgcccacggcgcccatcagattgatgatggcattggcgcggctgcgcagcggcttgggggtgacatcgggcatcagcgccacagcgggggaacgataggtgcccatcgccaccagcagcaggcccagcaccacgataaagatcaccagtgtggccgggctggggttggcggcatagcggtcgtccaacaggggaatcaggttcatcagcacggctgcagcggccgtaccgcccacgatgaacggcatacggtgcccgattttggtgtgggtcttgtcggacagggcaccaaagaacggcagcaggaacaacgccagtacattgtccgccgccatgatggcaccggcgaaggtctcgttcagtttaaaggtgtcggtcaggatcagggtcataacgctgtcgtacatctgccagaaggtacagatcgacaaaaacgcaaggcccaccaaaatggtgcggcggttgttcagcttcacggcaattctccttacttgcggggggatgaatccgccccatactgtcaccattgtaacaccatttgcatgtattgtctataattttataaactatacagaagaatttgctcaaaaatgccgaaaactgaacatttggcgtccaccgtgcgcgggcacagtgttactctctgctgccgagccgatatttgaaatcctcatacccgaaggccgcgatgctgcgcacagagccgtctgcacaacggcagaggatggccggcagcggcataccgttgaaggtattgtttttgcaggtcgtgtagatggccatatcgccaaacaccagcaaatcacccgcgcggggggcggtatcaaagctgtaatcgccgatgacatccccggccagacaggtcggtccggcaaggcgtaccgtgcagggcttttcgccgggttcctctgcgcccagcagcggcgggcggtagggcatctcaatgacatcgggcatatggcaggcggcgctggcatccagaatggctacggtggtatcgccgttttttacaacatccagcacgcgggtcagcaggtaaccggcattcagcgcacaggcctcacccggctcgagatagaccgtcacgccccacgcattctgtgcgcgggcgatgcagtgctccagcgtggcaatgtcgtagccggggcgggtgatgtgatgtccgccgccaaagttgagccactgcatattgggcagcagatcgccgaacttttctgtcacggcgtccagcgtcacggccagcgcatcggcgtcctgctcgcagagagtgtggaagtgcagtccgtccaaaagctgcggcaggctggggtactgcgacgcggcggcatcccatgctgcgcgggtcgtaccaaggcggctgccgggcgcgcaggggtcatagatcgcatggccgtcctgcgtggagcattcagggttgatgcgcagccctacgcttttgcccgccgccttgacctttgcaccgaattttgccagctgcgcaggggagttaaagacgatatggtcggcatagcgcagcagctcgtccatctcgtccgcgcggtaggcggcgcagaatacatggacttctttgccgggcatctcctcggcacccagccgtgcctcaaacaggccgctggcctcggtgccagccaagtgcggcaccagcaggggatacaggtcatagttgctgaacgccttttgcgccagcagcaccctgcagccggtgcgctgtgccagcccgcccagaatctccgcgttgcgggtcagggcggcctcgtccagcaggtagcagggggttggcagggcggcaaattccggcggcaccgtgccgccgatggccgcaaacggcggccgtgcatcgtgcagtgccatcagtccaccagaaccgggttgtggttctcgctgcggggcaggccgtacttgtccagtgcgtcgaggaacggatcggggttgaactcctcgaccgtgtagacgccgggcttgacccactcgccggtcagcatcatcagggcgccgcacattgcaggcacaccggtcgtgtagctgatggcctggctgccgacctcgcggtagcactcctgatggtcgcagatattatagatgtagtaggtcttgtccttgccgtcctttttgccggtgaagatgcagccaatgttcgtcttgcccttcgtgcgggggccgaggctggcgggatcgggcagcagagccttcaggaactggatggggacgatctcctgaccgttgtagttgatgggtgtggtggagagcatgcccacatcctcaaggcagcgcatgtggtcaaggtagctctggccgaaggtcatgaagaaacggatgcgcttgacgccgggcaggttcttgccgagggactcgatctcctcatggtgcagcaggtacatatccttctggccaacctgatcaaagttgtactcgcgcttgatgctcatggccgggatctcgacccacttgccgttctccatgtagctgccgggggcagagacctcgcgcaggttgatctcggggttgaagttggtggcaaaggcgtagccgtggtcaccgccattgcagtccagaatgtcgatcgtgtcgatggaatcgaactcatgcttggcagcgtaggcgcagtaggcctgagtcacgcccgggtcaaagccgcagcccagcagggcggtcaggccggcgtcctcaaactttttcttgtaggcccactgccagctgtagtcaaagtaggcggagaaaccggcctccttgcagcgcttctcgtagatggcgcgccattccggatcatcagtgttttccggctcatagttggcggtgtccatgtagttgacgccgcaggcaaggcaggcgtccatgatggtcagatcctgatagggcagggcaatgttcatgacaaggtcaggcttgtaggcgttgatgaggtcgcagagctgctgcacatcatcggcatcgacctgcgcggtggtgattttggtctgggtgtgcggggcaagcttagcggcgagggcatcgcacttggacttggtgcggctggcgatgcacagctcggtgaaaacatcgctgacctggcagcacttggagatggcgacagatgcaacgccgccgcagccgataacaagaactttgctcatgatgggactcctttgcattttttattgtatgatgtgtatgggtattttgtaggggcgaacattgttcgcccgtgcctgtttgaggcagcggcaactttcgcggtcggatatggaatccgcccctacatcctctcccccgataaggttgagaatgtagggaggggtcttgacccctccgcggggcgtcgaggacgccgccccctacagggatggctgcttacttttccagtgccagcagcagctcccgcagtaccttgcaggccgtggcggtcgaaacgccgctctggtcaagcatgggggccagctcgttgacatccgcgccgatgatgtttgcttttgtcacggtgcggattgcctgtaaaagctgcagaaagctcacgccgcccgcctcgggtgtgccggtgccggggaacgccgaggggtcaaggcagtcgaggtcaatggtcaggtagaccggcacgcgcgtctggcacagccaggcggtcagctcggccagaccggtgaaatcgaaccggtgcatatcggtgtggcgggctgcaaactgaaattcctcccgctcgccgctgcggatgcagaactggtggatgcgcccgtcaccgaccagatcatggcagcggcgcagcacacaggcgtggctcagctgtgcgccgaggtaatcatcccgcaggtctgcgtgggcgtcaaagtggacgatgtgcagatcgggatatttgcgcacggctgcgcgcacggcacccagggtcacaagatgctcaccgccgagcagcagcggcagcttgccgtcccgcaggatctccgccgcgcgggattcaatgtccacaagggcgctctcgcttgagccgaagcacagctccagatcgccgctgtcaaacacattgccgtccgtcaggtccttgtcctgataggggctgtaggtctccagaccgtagctttcgtgccgcatggcggcggggccgaaccgcgcgccggggcggtagctggtggtggaatcaaacggtgcgccgtacaaaacaatgcttgccgtgcggtagctgctgtcgcagccgatgaaattttcaacattgcgatgcagcatcagtgttcctccacttcgcgcagcatttcctccagaaacgccggcaggtaaaatgcaccgacatgcagccgggtcgtgtaatagcgggtgcgcatgttcagtgcattccacgcatcggcgtccatatcgttgatgggatgatattttttgctggcaaagccgaacagccagtagcccgccgcaaaggtggggatgtgtgcctgatacaccttgctgatcgggaaggtgcttgcgatgcgcttgtggctgcgctgcatggcggtcgcgtcatcagcatagaaggggctgccctgctggttgaccatgatgccgtctgcgcgcagcgcgttgaaacagttgccgtaaaactcgcgggtgaacaacccctccgacgggccgaacgggtcggaggaatccacgatgatcagatcgtactcgtcctcacaccggcggatgaatttgagcgcattctcgtagtagatatgcacgcggcggtcatccatacggcaggcgttgccgggcaggtaggcgcggcaggcctcgatgacctgcgggtccatctcaaccagatcgatgcgctcgacccggtcatagcgggtcagctcgcgcacaacaccgccgtcacccgcgccgatgacgagaatgtccttggcatttctgtgtacggccatcggcacatgggtgatcatctcgtcatagatgaactcatcgcgctcggtcagcatgacattgccgtccagcgtcagcacgcggccgaactccggcgtctcaaaaatgtcgatgcgctggtagtcgctctgcttggagtagagctggcggttgacccggatgctatgcttgacatccggggtgtgaaattccgaaaaccacatttccatactgcaaacctccctgtcaagccagcacattcaggcgcaggatgtccgggtcctcggggccggtcatgctgcagcccttggccttggcatactcgatataatccagaatctgcgcggtgatgcgttcgcccggggcaaggatcgggatgcccgggggatagcacatgacgaactcgctgcagaccatgccctctgtctcgcgcaggggcaggctctttttgggggcgtagaacgcctcctgcgggctggcggcaacctcggggtcgatgtattcctgactcaagaggcccgcgccatcggtgtgatagcggcgcttgatttcagccagtgcgctgacaagacgctcgacctcctgcgggcggtcgccgatggagaggtaggccagaatgttgccgatgtcgccgaactcgatctggatgtcgtattcatcgcgcagaatgtcgtacacctcaatgcccgcaaggccgatatccagcgtgtgaacgctcaattttgtcgtatcaaagtcaaaaacggagtttccgttgcaaagctccttgccgaaggcgtagtacccgcccacggcgttgatctcctcgcgcgcgtactcggccatgtcggccacctgatggaacacctgtcggccccgcagtgccagattgcggcgggaaatgtcaaggctcgacatcagaagatagctgccggaggtcgtctgggtcaggttgatgatctgccgcacatagcctgcatggacattgggaccggtcagcagtaggctggactgggtcaggctgccgccgctcttgtgcatagagacggaggccatatcagcgcccgccgccatggcggagacaggcagtccgccgccgaagtagaagtgggtgccgtgcgcttcatcggcaaggcagagcataccggcgtcatgcgccatccgcacaatggcgcgcagatcgctgcagatgccgtagtaagtggggttgttgaccagcaccgccacggcattgggatgctcggcaatcgctttcgcaacctgctcacgcttcatgccaaggctgatgcccagccgggtatcgacctcggggttgacatagaccggcacggcaccgcacagtaccagcgcgttcagcacgctgcggtggacattgcggggcagaatgatctcatcgccgcgcttgcaggcggtcagcaccatgctctgcacagagctggtcgtaccgccaaccatcaaaaaggcattcgccgcaccgaaggcctcggcggccagctcctcggcctcccggatgaccgataccgggtggcagaggttatccagcggcttcatgctgttgacatccaccccaacacactgctcacccagaaaggcggtcagctcggggttaccgcggccgcgcttgtgtccgggcacatcaaaggggacaacgcgcatttttcggaacgtttccagtgcctcgtggatcggcgcacggcgctgatccagacgggaacgcttcggatctccgttcatttttccctccgtccgcggttcctttgcaaacaaaaaagcgcaagccatgcacagatgtacaggcttgcgcttaaattcagcattttttgcacaggcagaaatacccccggtcttgcaccgagagagcatttttaccgtatgattcaaaaaggctgagcgtgtcagagtctatatagcaattacacttttactactcttattgaccgtttcacaagtctgcacgatacccgtgcaatttcatggttgtaaaggaaccaacttataaaatttgagcttctaactcaatcaataaggcaacctgcgttgccgatcggcagtggacccggctgtccgtatggccatggggcaaaacgaaacttttgcaatcgctcgccccgcccctgttgggcggtccgtaggtaaattgctttgaaaaactcttacaaactcgattcgtctttcaaaatcgaaagaagtatagcacagatatggtgcattgtcaagagaatgcgagatattttttcacgcttttcacaaagctttgtaaaaagcgtgtgtatccatcagtggcagctgtggtttccgcagccatggctgccgcaggtgtggccgccctcgccgtgcgcttcatcgtggtgggtgcagcgcacatcggggtcatagcccagcttgcccgccagcagggccagcacggcggcatcggcatcgccgctgacaccgccgtaaagacggatgccggcctgcgtcagggcagcctgtgcgccgccgccgatgccgccacagatcagtgtatcaacgccgttttgtttcaaaaatccggccagcgcaccgtggccgctgccgttggtatcgaccacagctgtgttgaggatcataccgccggaaacctcgtacagcttgaactgtgcgctgtggccaaagtgctggaagatctgtccgttgtcgtaagtgactgcgattttcatggggggatactcctttgttacgatgtgggtcggaatagacataactttgccaaatgcgaagggcgggggttacaggtatcggactgtctctgtcagcggtttgcgggcgctgtggttcggcagcggcgtgacgccctcagcggcaaagccaagatcaaggatcatgaggatctcctcgttttcaggcagtccaagtgcctgtgccagcttgtcggggtcaaaaaagttcagccagcagctgtccacaccggcgttggcggcggccagcatcaggtgcgttgctacaatggacgcatcctccacgccggagtcccgcttgccgccgggatatgtaaaaacattgctgcggtcaaaggctaccacaaggcaggtcggtgcgccgtaacggcaaggcgttgcagcgtcgatcttagccagcccctgtgcagactggatgacatagatgcgctgctcctgcaggtttttggcggtcggcgcgacccggccggccgcgaggatcgcgtccagttgtgcgggcgcaagctgacgcgcgctaaaatttttgcaggaatagcggctttcaatgacctgtgtaaactccatcagaatagccctccttgtatggcggcggtaaagagccgtctttatagtttgattctaccaccgaaccgcgcggctgtcaattttagggcaataccgcataattctaagtgccaatacggcgctttgctttgcattccggcgggattgctggtataataaatatatcccatcaggccgcctgtgcggctaaagaaaggtctccgctatggaaacatcccctcagggcacggccctgtttcatctgcccggtctgtttgaattttatgacctgtatgcggcgtttttaccgctttaccgtgcgcatcgggagtatttttacgactggtgcgccatcggctcgatctacggcgcaccgtctgactgcttatgggcgggcggccgggtagagtacagtgaccgcaccccgcgcgaggtgctggcgctgacgcatgaatatggcatctcggcgcggctgacactcagcaattcgttgctgcgcccggagcatctcacagacccggactgtaatacgctctgccgactgtttcaggaacaaagtgacctgcaaaatggtgctatcgttcatgctgagttgctgacgaagtacctgaaaaagaactatccatcgctgtatcttgtgtcctcgaccacaaaagtgctgacagatttcaacgatctgcggcgggagctggcgcggccggagtttcgttatgttgtgccggatttccggctgaaccgggcatttgacaagcttgcagcgctgcctcagtcccagaaggacaaggtggagtttctctgcaatgaatgctgctggttcggatgcgcggaacgcagggcctgctatgaggccgtcagccgcaaaaatctgggtctgcccggcccggagcatcactgcagcgcccccggcgcagagggcgggtatcgcttctcgcgggcgatggcaaaccccggctttatcggcattgaggatattcggaaaacctacctgccgatgggcttcacccaattcaagatcgaggggcgcggccttggcagtgcgctgatccttgaatttttgctccactacctgaccagaccggaatatcagctggctgtccgtgaggagttgtatctggacaatatgctggaccttttctgaccggctttgtgctgaggtgaggaaagctgtttgcatttttctccgatttgcgttataatgacaaaaaacaacaaaaagcaggagaccgccatgaacaaactactactcatcagcgctatgcaatatgactttcacacgcttttaaaggtggcggacatctgcggctttaccggggaaatcggctttcatgatgccgaggacggctatctgctcaccttccccgacaatgatggccacgccgaccgccgcattgcggagtatcgcagccgccttcgtgaccttgagcataacatctggaaccgctgaaagcgtaccctgccatttttatctctgccaagtacgccctgctcttggcagattttttgtgccgtatgttaccccagcgccacatccagcaccatcattacactgaagccaacggcaaagaatactgtgccaaggttagagtgccgcccctgtgacatttcggggatcagctcctccaccacgacatagagcatcgcaccggccgcaaagctcaagagataaggcagtgccggtatcacaagctgtgcggccagaattgtcaccactgcgccgattggctcaaccacgcccgaaagcacaccgcctgcaaaggccttgcccttgctctctccttcggcacgcaggggcatcgagatgatggcgccctccgggaaattctggatggctatgccgagggacagggccagcgcgcccgcggcggtgatctgcgtgctgcctgcgagaaagccagcgtacatcacaccgactgccatgccctccgggatattgtgcagggttaccgccagcaccatcattgtagtgcggcccagtctgctttttggcccttcagcctcctcactgccgatatgcaggtggggtatcagatgatccaaggcaagcaaaaacagcacgccgaaccaaaatcccgcaaacgccgggaaaaaggcaaaacgccccaacccctccgactgttcgattgccgggatcagcagactccagaccgatgccgccaccatcacaccggcggcaaagcccgcaagcgagcgctgcaccagatcacccagtgcacgctgcatgaaaaacacacacgctgcgcccagcgatgtacctaaaaagggaatcagaattccccaaaaagcttccgtcaatgaagtcgcctccttttatagtatatagacataaacacaggtactttataccctttcctgccctccgcaggcacagtcacttcgctttacggcggtcaaacaaagccagcctgttttgcttttttgtaccgcaatgttacaaaagcctgcttgctcaagatatgctttcagctcagtatccttgtagatggtcatgccatcaatgatttttgtccattttttgtctttgtccgtgtcgccgttgacttcattgcagatgaggaaggtgccgcccggcttcaaaacccgccaaacctcccggaaacattttgcaaggtccggccagaaatagacggtttcaaacgctgtgactgcatcgaaccaatcgctggcaaaaatgatgcgctgcacgctgccctgccagatgacacagcgatccccttgaatcgcctctgcattgagacggcgggatttttcgacgctgacagcagagtaatccacgccctttacgatgccgtgcggacaccttttcagcagccgtttgatattcgctccgccgccgcagccgcagtccagcacctttgcgtccggcgcaagatgcagaaagtgaagcccccacagcgccatgggggtgtgggcaaggttcatcatggtgaccatcagcctgccgccgaagcctttggggtctctcgtattttcaaaaaatgacatcgtttatctcctttcgacttttttacattctgcgtaggtaagtggaatggaattctgcaaaacaacacttttgcaaacggtccagccgttttgctgcaaaaatgccagatacgcagcactcgtccatctgctgtgcagcggaaagcctgcaattttcaacgcaagggtctgaagctttccccaaggggaattctctgcatgggtaaaggtaggagcaatcagtgtgccatcgtttttaagcacacggcgaaactcgacgagggctttctcaggatgcggcacaatgtgcagtgcattgcagacaatgacaacatcaaaggactggtcagcataaggcagatggaacatatcctgcacggaaaaatacagcttggaggaaaaattaccccgctttgcctgcgcaatcatcgctgcggaggcgtcggtagcctcaatgtgatcggcagaacacaggagatgctttgccacctgccctgtgccggtggctacctccaaaacggttttgtgccacacagcagggcgaagcagcgcatataattgatcataggc

SEQ ID NO: 14046 - DNA, 5982 bp, Unknown
  gut microbiota DNA sequence
tctgtattgcatctacaaaaaaataccccggcacggggcttgcgggccgtgccggagcttggagggtaagcagctttaaaaaagctcgttacgattgtaattgtggatgcccgaagggatcacatcattgtaaacatcctctggcaagccgtaggggcgctcaggctccaaaaaaccgtacatccatttggccaaagtgtgcagcttcaacattgcaaccccatctcctttcctagtgtagggcagtgtgtatcgggaggctttccgcttccctctttctgtctttattatatgcgaaggggcttgcttttgcaagctgcaatttgtacaaagttacaaaagttatttgtatatattccactatttcggcaaagtgtacatattcgcgtggcaactgtgcgcactacgcggacaactcctcccatgcctcctgcatggtgtccgcagagaaaagaaactcgccgctctcggaaaagacctcaatgtggccgccgacataacgaaactgctgggtcatggtgtgtaccgcctttcttatctggtatgatctcagtataccagacagacggtacgataatttggactttaactgtcggacagggaattttgagggtgataaacggtactttctacgccccgcagcacaaagatgacccacccgcagagcaaaaaccagtaaaaggagtaccgcgggcagataagcccggcgacattcccccactcggcggtatagtcccacacctcggtgtgcagcaggctgcggcagactgcccccacagccagctccagcccgctgacgccggctgcgccgagggcggcggccccggccagcggcagcggtgcagcggccagcttttgcaaaaggcagaggcaggccccgcccgctgcgaacatcgtccagtgggtagtgccccgccaggccagctcgagcgcagcataggctccgccgcccagaaaaaacagtgaaagctgctccaacatacaaaatccccccgcacaagctgtgtgaccacagtatgtgcagggggcgctggctgtaaccgttttgtaaggatagtggtagtttttgggtaaaacgccttcccccaagggggaaggtgtctgcggccctgcccgcagacggatgaggggctgcgtttccgcggcgacccgtaaacggacggtattggcaagcctgcccctcatcagccgcctgcgggcggcagcttcccccaagggggaagccagcgatttttacttcgacagcttcttcagcagtgcgcttctggtatcccaaagcttctggctcagatccacatagtagcggtgggggttctcaaagcgcttgacctcatcccacagggtattgatctgtgccttgcagaacttgcggatgtcatcaaggctgggcgaggtgtagacgcgctggccgtgatcataaatgagggtggacaggcagcgcgccgtgcagttgacataggtgcattccttccatgtctcgatcgggtcaaacagcgtgatgccatgctgtgtttccaccgcctcatcggccatcgtgataaggtcagccatcgccttgccgtcctgatcatagatacgccagacctttttcaggcaggggatcgtcatcttctccgcagattcggacaacttcatcttgggggtgtagctgccatcgtcctctttcacggcggccagcttgtacacgccgccgaacacggggtcgctcttggcggtgatcatattctcaccgatgccgaagctgtccacgcgggcaccctgcaggatcaggtcgcggacgatgtactcatccagagagttggacgcgcagatcgtacagtcggggtagccggcctcatcaagcatcttgcgggccttcttggacaggtaggcgatgtcgccggagtcgatgcggatgcccttggggcgcttgcccatcggcttaagcacctcgtcaaagaccttgatcgcatcgggcacgccgtggcgcagcacattgtaggtgtccaccagcagcacgcaggcatcggggtacagctcagcgtattttttgaaggcatcatactcggtcgggaacatctggacccagctgtgcgccatcgtgccggaggccgggatgccgaagtcgcgggccgccatgacgcaggaggtggagccgcagccgccgatgtaggaggcgcgcgcgccgaagtaggcagcgtcatagccttgggcgcggcgtgcgccgaactccatgaccgggcggccggcagcggagcggacgatgcggctggccttggtggcaatcaggcactgatggttgaaggtgacgagcagcagcgtttccagcagctggcactcgatggcagggccctcgaccgtgacaatcggctcctgcgggaagatcggcatgccctcctcaatggcccagatgttgcagtgcagcttgaagctggccagatagtccagaaacttttcatcaaaggtcttggtggagcgcaggtaggcaatgtcctcgtcggtaaatttcagatgatccaccgcgtcaatgaactgctgcagaccggccatgacggcgtagccgccgccgtccggcacgcggcggaagaacatatcaaagacggcgatcttatcgacatagccctcgtccagatagcctgccgacatggtaagctcataaaaatcggtcatggtggtcagattgcgttttacatccaacatggtaaaaacctccattgattcggcttacatttccttgctccagatacgcaggatgcggccgacggtaaaaatcagatagacgccgatgacgagcatcgtcagcatgacgactaccttgcaatacgtgctggaaaaaaactcccgcacgcgggacagcgtatacaaaagctgattgcgcgagacatcgctgcccgcaatcaggtctgtggtaccgatgatctcgccctgaatggtcagtgtcacggtgcccacgacatcaccctgccggatgggggcgggcagctgatccggcacatggaatacctgctcggtcagggctgcgccgccctcccggggcagcagggtcatcatgttatcgaccgggtaaagcatgacggtgtcggcctgtgtggagtaggcaacccggacctcggtgatgggctgggtggggtccagcgcgggggcgatggtgtaggtcgcaaacacccagtccatcagggtgccggtctcaagcagggcggggcggccgccctcatcgctttccatcggcacattcagcacaacgctgatgtagctttcaccgtcctgactgtgccagcccgcaaagttctgccattcgcccagactgccggtcttgccgcctttggtgtaatcccggtggtagctgctgttggtgatgagcttgtcggtgttctgcaaaatataggtgccgggtgttgtgtagcggctgttggtgcccatgtcgtaggtcggggtgccggcaacagtggcaaacacatcgtaggccgtcagcgcccgcaggatcaggtaggcatcccgcgcggtggtgatattgttggggttcaggccgcaggggtccacaaaggtcgtgccggtgcagcctatggcggcggcctcgtcgttcatcatcgcaacaaagttgtcaatgctgccgccgcccatatagtcggccacgatgtaggcagcctcgttgccgctgggcagcagcatggcgtacagcagattgcgcaggctgtgcgtctcgccccggcggatgtcagcggtcgaggcgttggtgctttgctcccagatcagatcatagatataactcggcgcagtcaggctgattgagtcgagctgatcctgatagctttccagcagaagcagcgttgtcatcatcttggtcaggctcgcagccgaaagcggcacctcgctgtttttgtcatagacaacgatgttcgtgtcgaggttgaccacataggcagccggggccgtaagtgccggggctgtgtcagagagggcagcactctccccttctgcggccgccggcagggccagcaccacaataagcacgaaggaaaagagtatcgcgcagaattttttcataggcaaaggtttcctttgtaaagttacctatcagtataccaaactttgcggggaaataaaagggatatgcaggattttttggcggtgggagtggtgttttcgggtgcgctgcctgcggccccgaccgcagacggatgaggggcagcggttccattattgcccatacatgggcggccgcagtaagtctgcccctcatcagtcaccttcggtgacagcttccccctcaggggaagccaaaggcctcagttcatcgccccggctgtctcaaacagccgctccacctcatcggagagcgcacggtgcgcggggtcgatcagattcgggtccttggccagcagggccttggcctcgtcctgtgcgacccgcagggttttggtgtcctgcacaagatctgcgacccgcagcgtcggcaggccgtgctgggcggcgccgaagaaatcacccgggccgcgcgtttccagatcgtactttgctacggcaaagccgtccggggtgcggcacaaaaactgcagccgctcccgcaccggctcattcacattgtcagagatcaaaatgcagcaggagtctgccgcgccgcggcccacgcgcccgcgcagctggtgcagggccgacaggccgaaccgctcggcgttctcaatgaccatgaccgtggcgttgggcacatcaacgccgacctcgatgacggtggtcgagaccagcacatccagctcccctgccttgaatttctgcatgacctcgtccttttccttgggcttgagcttgccgtgcagcaggccgatgcggcggtggggcagcagcgcacaggcggtctgggtataataggtcgtcacggcctgcagaccgccggaggcctcgttttcctcaatggcggggcagacgatgtacacctgatgcccggcctcgatctgcttgtcgagaaagccgtacatgtcccgccgctttttgccggtgatgaaccatgtcttgaccggcttgcggccggggggcagctcgtccagcacggagatgtcgaggtcgccgtacatcaaaagccccaacgtgcgcgggatgggcgttgcgctcatgaccagcagatgcgggctttgcgccttaccggccagcaggccgcgctgccgcacgccgaagcggtgctgctcgtccacgatggcaaggccgagatttttaaattccaccgtatcggttaaaaccgcatgggtgccgacaacaagaccggcgcggccgtccgcaatggccgacagtgcgatgcgcctctccttggccttcataccgccgaccagcagtgtgacattgacgccgaacggttcaagccggtcggccagcgttgcggcatgctgccgggccaaaatctcggtcggggccagcagggcactctgccagccgttttgggcggcaaaccagatggccgcggcggcaacgagtgttttaccgctgccgacatcgccctgcaaaagccggttcatcggcacctcgccgcacaggtcgctcacgatcttctcggtcgagcggcgctgcgccccggtgggcgggtacggcagactgcgccagaacggccccagatccagcgggtgcatcggtgcgctggtccggttgcgcccgtggctgcgcaaaagaaagatgccgatctgcagcagatacagctcctcaaagatgagcctgcgtcttgcggcggcgaggtcggcggcattctgcggggcatggatggcgcgcaccgcctgcgctttggcgggcatccggtagcgggtcagcagtgcggggggcagcgggtcggtcagctcgtccgcataggcaagcgccgcgtgggcgcaggccgcatggcggctggcgggcagcccctctgtgccggggtagaccgccacgaaggggcaggccgcaacctgtgcctcggtgcggaccagcgggtgcagcagctcgcggcgggtcagcgccccgccgatgcgcccctcaaagtagtagctctcc

SEQ ID NO: 14047 - DNA, 2301 bp, Unknown
  gut microbiota DNA sequence
gcctgtcatcacgaagtcgaagatcgtcccggcagacaaagattgggagtttatcgtcaagatgaccctgatcatccgtgacattctatacggcaatccgcgtctggacgagatgggctggcatgaagaagcactcggtcgcaacgctgtggtcggcggcttccagggtcagcggcagtggacagactggctgccgaatgctgacttcaccgaagccatcatggcttccacctttgactggaacggcccgaaggccccgaccccgttcgctaccgagaatgatacctgcaacggcattgccatgatgctgggcagccttgtctccggctctgcgccgtgcttccatgacgtgcgcacctactggagtccggaagcctgcgagcgcgtgaccgggcagaagcctgacggcgttgccgccaacggctttattcacctcatcaattccggcgcaacggccctggacggttccggtgcctgcgtagatgacaagggcaatcatgtgatgaaaccgttctgggagatgaccgatgcggacatcaaggcgtgcctgaacgccaccgattggtgccgtgcggactatgagtacttccgcggcggtggatattccagccatttccgctgcaaggcagagatgcctgttacgatgctgcgcttcaacattgtggagggcattggacccgtcctgcaaattgccgagggttggacggctgatctgcccgacgagatccacaacattatcgacaaacgcaccgacccgacctggccgactacatggttctgtccgcgcctgactggacagggagcgttcaccgatgtgtacagcgttatggcaaactggggtgccaaccatggagtgaccgtttacggccatgtgggtgctgacctcattacgctggccagcatgctgcgcatccccgtcacgatgcacaatgtccctgccgagaaggtttatcgcccccacgcatgggccagcttcggcacgcaggatcagcaggctgcagattatgctgcgtgcaagcagtacggaccgctgtatcggtaagttacctgtcgtaaatattctgccggaaagattttgacatagcccttaataccagttaaggagaggtttccttggaagcctctccttgtttttttcatttggaggtatacaacaaattcaaaagataaaaagtaccttgaggcctcttttctcaaagtgcggttataagccattgcctataacttaataggcttttcctctatagggttcgtgttctccgtaacttgtcagccctgccgggaacgagcagtgtgctgttttgatagcgtagtagccgtggtcaatgccgatagtgatgctcatgggaaataccttctttcatttcaaaatctttcgggaatctataataaacggcgggggagagtatgtccccctcgccggaattttccttcggaaattgcggcggttttgtctgtcaagactggcgataggctctcaaaaccgtaccgccagtggtgaaaattcacgctgcaacaaaaaagcgcatcctgcttttcggcaggatgcgcgcaaaatcgcttgtggatattttcaggcaaatgggataaatttggtacattttgccccaaaattgcctgttttttgcaattttatatcgtagctacgacacaaaatcagtcgatgggcttcatcgtggggaacagcagaacatcgcggatcgaggcgctgtcggtcagcagcataacaagacgatccacaccgaagccgagaccgcctgtggggggcagaccatactccagcgcgttgacatagtcataatcgacctgtgcccggcactccggctcgatggccttgcgctcggcgacctgacgctcaaagcgggccttctggtcgatggggtcgttcagctcgctgaacgcattgccatactcggtgcagtcgatgaagtactcaaaccgctcggtgaaggccggatcattgggcttgcgcttggcaagcgggctgatctcaacggggtaatcatagatgaaggtaggctggatcagcttatcctcaacaaaggcgtcaaagaactctgcgaggattgcacccttggtcgggacctcgggcagctcaacatgatgctccttggcggcggcaatggcgtcctcatcggttttccagtcgttgaaatcaacgccggagtactttttgaccgcctcaaccattgtcagacgctcccagtggcccatgtcgatctgcttgccctgatacgtgatttccaagctgccgcagaccttgagggccaggcgcttgtacatttcctcaaccagatccat

SEQ ID NO: 14048 - DNA, 9652 bp, Unknown
  gut microbiota DNA sequence
agaaaaggaacaaaggccccgtgaatttacgcccccggcagcagcgttacaacatctcgcagcagcaccagcgggctttcgcccttctggacgcgcaggctgaaatagggccgcccgatggcgttgtacaaaacgcggtgggggtactgctccataaccttgtcgagctgcttcggaccgacgatgtcggagtagaggatcagctgatcgccgcgctggacgatctcggcaatgccgacccgtgccgccgtcacccgcacaagggatacatccaccaacccctgcacgctcttgggcgggctgccataccggtcaatcagctcatccagcacatcctcggcatcggcggtcgtctcaatggcggcgatccgcttgtaggcctcgatgcgtccggcggcatcggggatatattcctccggcaggaaggcgtccaccgtaatgtccacaaggcagtcactcttgtcagggggcggggcctcgccgcgtgcggcggcaatggcctgacccagcatcttgacatacaggtcgtagccgacagcctccatgtggccgtgctggctgtggcccagcaggctgcccgcaccgcgtatctgcaaatcacgcatggcgatgcggaacccggagccgaaggaggtgaactcccggatggcggaaaggcgcttggcggcgatctcggtcagcaccttgtcgcgcgtaaaggtgaaatacgcatacgccttgcgggaagaacgccccacgcggccgcgtatctggtagagctgcgacaggcccatccggtcggcattctcgatgatgagggtgttgcagttgcgcacatcaacgccggtctcgatcagcgtcgtgcagacgaggatgtcgatctcattgtcaagcagctgctgccacacagaggagatctgctcctcggtcatcttgccgtgggcgatgccgatgcgcgcgccggggacaagcctgccgacccgggcggcacattcctcaatgttatcgacccggttgtgcaggtagtagacctgcccgccgcgggccagctccttgcggatggcctcagccacgatgccctcgtcatattccagcacataggtctcgatgggctggcgctcaaacggcggctgctcgatcgtgctcatgtcccgtatgccggagagcgccatgttcagcgtgcgggggatcggcgtggccgacagggtcagcatatccacgccgatgaagttttctttcagcttctccttgtgcttgacgccgaaccgctgctcctcgtcaatgatgacaagccccagatccttgaacttcacatcgttggaaagcagccggtgggtgccaacgacaatatccaccgtgccgtccttcaggccgcgcagcgtttccttttgctccttggcggtgcggtagcgggacagcaggccgatgcggatggggaaggactccatgcgggtcagcgccgtgttgaagtgctgccacgccagaatcgtggttggggccagaatggcgcactgcttgccgcccatcacgcatttgaaggcggcgcgcagcgcaacctccgtcttgccgaagccgacatcgccgcagagcaggcggtccatcggccacggctcctccatatcgtgcttgatctcggctgcgcaggtcagctggtcgggggtttcctcgtaggcaaagcgctgctcaaaatcaccctgccatgtgtcatcgccggggaaagcatagccgtgcgcctgcttgcggcgggcatacagctcaatcagctccttggccatctgctcggtggcggccttgacctttttgcgggtcttggcccagtcggtgccgccaaggtggctcagtttgacattgtcgctgtcgcccggcgccgtatagcgggacagcagatccagctgggtgaccggcacatacagcacatcttttttgtcatactcaatgcgcaggtagtccttctgcacgccctgcacagtcatgcgctggatgcccgcataccggccgatgccgtggctctggtgtacgaccagatcgccaacggtgatctcgctcaggctgttcagggcatctttgctgcgttttttctttttctgcgcactgctgacgccgaacgcacgggccgtaaagaccgcgtatcgggcaaacggcaggctgcacccggcggaaagctgccccggcagcacctgcaccagcccggcggtgcccgcagcggcggcatcggtggtgacctgcagccccttggtgcgcaggtcggcggcaaggccggccgccgcgcggggcgtaccggccataacggtcacggctgcgccgccgctgcacagcggctgtatatcctccagcagcgcagcgacctcaccgccccaggcgggcagcgtgtgggccggtgcgttgacgatggccttcagcgatatgtcgggcatgctgcgcgcaaagttctcggcgcagagtgtgcggtgggcggcggtctgcgcccaaagccagccggcctcggtgtagagcttgtccagaccgggggcgagtgcgccgtcctccatcagggcggagaactcctccccccggcggtaggcagtggcgcgcgcagcctcccgcagggaagccgactcctccagaatcagcagcggatcgtcgaaatagtcaagcagtgtggcgggctcgggatagcgcagcgtcaggtacttatccatgtccaccggcatcgcgccgccgtccagctgggccagatccgcggcggtgcaggcctcaagcgcggtgcgccgcttgccgcgcgcctttttgatgcagctgcgtatcagggcggcagcctcggcgggctgggcaaacagcacctcacgcgcgggggagacatagattttttcgatcggctcgtcccggcgctgggtggccagatcgaagctgtgcatcgtgtcgatctcgtccccccagaactccagacgggcgggctgcttcatgtcgggcgcgtagatgtccacaatgtcgccgcggatcgaaaactggcccggtccgtccacctgatcgcgtcgggcatagcccgcgccgtacagcaaggcggtcagctcggcccggggcagcgtgtcgccggggtgcagggtgcgggtgttggcgcagaactcggcccgcggcgttgtgtactgggtcaggccctcgtccggcacgcagacggcctgcagccgcccgcccaccagatcgcccagcacagccagacggcggtactcgtactcgcggccggtgccctcgatggggcgcagcacataatcgcgcgcggggaataccgccgcagcgatgcccagcgcgttcagatcaccggcaaagcgggtggcctcggcctcgccgggggtcacaatgcagagcgggcggcccagcgcctgcgccagcgcggcgtagatcagggcgcgtcctgcgccgggaacgccaaataaggcgcaagcccccggggacccgagcgcctgcgccagtttggtgtattcttcggttttggtaaaaagtgcgttgaacatagagtacccacatgcatagcaggcacagggcaggccgccctgtgcctgacggtttgctgtatcagctcaaaaattcggccttcagccagccgtatttgccgtcatagttcacaacgacccagctgccgtcctcgttggcgcccagtgcggtcacaacggtggaggcgggaaccttggaaaccttgtcatagtcggtgccggggccggcgcgcatgttcaggttgttgtcaggtgtgacagtgtagctcggctgctcgccctcattgtagataacggcaggctggacgctcaggccgtcaaaggtgggcacgggggtcggctccggggtgggctccggctcggcgggctgctcctcggcagggggcgcggcggtgtcgccggtggactccgtggtgaagctgtcggcagtcgggtcatccacgcctgctgcagcagaggtggtatcgctcgtcgcaggggtcgcgtcaccgctgccggtctggccgtcaaggttgccggtcagcagcagcacgctgaagatgatgctggcaaccagcgcgacggcgcaaagcaccagacgggtcatggctttctttcgtaaatcactcatggtaacacatccctcagtggttgaacttgttctgggcgtactgcaggttgccgtccatcagcagcctgcaggcgtcctcaatatccgggtaacggtcggtcatcgccttgcggtcggcggggggcagcttgcccagcacccatgcggccagatcgtactgcgggttgggcttggcgccgatgccgatgcggatgcgggcaaaattctctgtgccgaggctcgcaataatgcttttcagcccattgtggccgcctgcggacccgtgcggccggatgcgcagatgccccggctcctgcgtgatgtcatcacacaggataatcacatggtctgcggggatcttataaaagttggcggcgggcgcgatgctctggccgctcaggttcatataggtcagcggcttgagcagtacgaccttgtggtcgcccacctgcgccgtgccgtacagcccctgccatttggccttggcaatgtcgcagtgccactgcgcggccagatagtccagcgcttcaaacccggcgttgtggcgggtcccgtcatatttcggttcggggttgcccagcccggcgatgagccagtctgccccggaggtcattccaaacatagatatatcctttgaaaaatcgtgaagtaccgtaggggccgggcatgcccggcccggcagcgtaagataagcggctgcttatgggaaggacgcggggcgtcgaggacgccgccccctacaacgctttacttccctttcttctccgcttccagcttctgctttttggcaatgtacttttcgagcttcttctcgccccagccgttgatctcggtctgcttggcgcgctcaatgcccagcgcaccggccggcacatcgcggccgatcgtggagcctgcggcggtgaaggcgtggtcgcccacggtcacgggggccaccagattcgtgttgcagccgatgaaggcgtaatcgccgatggtcgtgcggaacttgccctcgccgtcatagttgcaggttacggtgccgcagccgaagttgcagtacttgcccacggtggcatcgccgatataggtcaggtggctgacggtgttgccctcggcaaagtcggcgttcttcgtctcgacataggcgcccagatggcagccctcggcggttctggtgccggtgcgcagatggctgaagggaccgatcttgttgttggggccgatgtggctgtcatagcactggctggcgtttacggtggagccggcctcgacaacggtatcctccaacagggtgttggggccgatgacgcagtctgcgccgaccgaggtcttgccgcgcaggatgcagcccggcaggatcgtggcgccgggggcaatgacgacctccggctcaatatagacatcgcggctgataaagtttacgccgttgtccagatggcgctcaaaggtggcagcatagcgctgctgcgccagctcaaatttttcttttgcggtagccatagtacatcttcctttatatacagctgttccgccgggcggcacccggcggtcgtttacacttctctattgtatatcacacggcgcattttagcaagccgaaaaacgccgcagggaccgaattatgccaaaaatattgtgcgccgggcgcaccggcgcatacccgggcccgcaggggataaaagcagacagattcaaaaaagatttcaaactttcttcccattataatttacacgatttttgtgcaaattgcaataggcaaaccaaaaaagtttgtctacttttcggcgaaaacattgagcatttttttaacaatctactggaaatctgtcctttggtctgttataatggactatgcaaacatgatttatgtgatgcaaacacgtcaccaatttgggaggtaactatgagcaagaaattcttgtacctgttcaaagagggtcatgacgccttcggcggcgaccagaccaccatgaagaatactctgggtggtaagggcgccggtttggccgagatgacccacgccggcatgccggttccgcagggcttcaccatcaccactgaggcctgcacccagtactatgcagacaaccgcgagatcaacgatgagatcaaggcggacatcttcaaatacatgggcatcctcgaggagcagaccggtaagaccttcggctccatcgagaaccccctgctggtttctgtccgttctggtgcccgtcagtccatgcccggcatgatggataccatcctgaacctcggcctgaacgatcaggctgttgagggtctggccaagaagaccgacaacccccgctttgcctacgactgctaccgccgcttcatccagatgtactctgatgttgtcatggagctgggcaagagcttctttgaggagcgcatcgacgccatgaaggagcgcaagggtgttacgcaggacgtcgacctgactgctgatgatctgaaggaactggtcaaggagttcaagcagatctacctcgagaagcagggcgagcagttcccgcaggacccgaaggagcagctgatcggcgctgtcaaggccgttttccgctcttgggacaacccccgcgccaatgtgtatcgtaagatgaacgagatcccctacgagtggggcaccgctgtcaatgtgcagcagatggccttcggtaactccggcatgcgctccggcaccggtgttgctttcacccgtaaccccgccaccggcgagaagaagctgatgggcgagtacctgatcaatgctcagggcgaggatgtcgttgccggtatccgtactccttctcccatcagcaagctgcatgaggagatgcctgaggtttacgatcagttcgttgagatcgctacccgcctcgagaactactacaaggatatgcaggacatggagttcaccatcgaggatggcaagctcttcatgctgcagacccgtaacggcaagcgtaccgcgcaggctgctctgcagatcgcctgcgacctcgttgatgagggcgttatcagcgagcagaccgctgtgctgcgcgttgagcccaagcagctcgacaccctgctgcatccccagttcgatgccgctgccctgaaggctgccgaggctatcggcaagggtctggctgcttctccgggatctgcctgcggccgcgttgtcttctctgctgaggatgcagaggagaaggtcaaggacgatgcatggaagaaggtcgttctggtccgtctggaaaccagccccgaggatatcgtcggcatgcaggtttctcagggcatcctgaccgtccgcggcggtatgaccagccacgctgccgttgttgcccgtggtatgggcacctgctgcgtctccggctgcggcaacgacaacggtgttgccatcgactatgacgccaaggtcatcaccatcaacggccacaccttccacgagggtgactggatgagcatcgacggctccaccggcaacatctacgagggccagattgctaccgttgcttccaccgagaacgccaacttcaagcgtttcatgggctgggctgacgccaaccgtcagatgaaggtcatgaccaacgctgataacccgaaggacgctcagaacgctgttgacatgggtgccgagggcatcggtctgtgccgtaccgagcatatgttcttcgctgaggaccgcatcaaggctgtccgtgagatgatctgcgcccgtaccgttgaggagcgcaaggctgctctggccaaggttgagccgttccaggaggctgacttcactgccatgtaccgcatcatgggcgaccgtccgatgaccatccgttatctggacccgccgctgcatgagttcctgcccaccaaggcagaggacatcgctgctctggctgccgatatgggcatgaccactgaggagctgaacaacgttgttgtcagcctgcatgagttcaaccccatgatgggccaccgtggctgccgtctggctgtcacctatcccgagatcgccgagatgcagaccaacgctgtgatcaaggctgccatcaaggtttctgctgagaccggcaagatgatcacgcctcacatcatgattcctctggttggcgaggtcaaggagctgaagttcgtcaaggacgttgttgtcaagacggctgatgccctgatcgctgctgccggcgttgacatgaagtatgaggtcggcaccatgatcgagatcccccgtgcagccctgactgccggcgagatcgccaaggaagctgacttcttcagcttcggcaccaatgacctgacccagatgaccttcggcttcagccgtgatgacgctgccaagttcctgtctgcctactacgacaacaagatctacgagagcgatccgttccagcatctggatcagatcggcgttggcaagctggtcaagatggctgctgctgacggccgcgccaccaacccgaacctgggtctgggcatctgcggcgagcacggcggcgacccctccagcgttgagttctgccacaatgttggtctggactatgtcagctgctctcccttccgtgttcccatcgcccgcctggccgctgctcaggctgctattaaaaatcccagagcgtaagattgttgcagaatatgcacaaaacgctcacgtagatagctaaaatgaagcgcatcacccgtaaaaaggtggtgcgcttcgtgtttttaatggaatttagagatatacaagggggaaagtgtatcatttttcggggcaagctattgcgtttgtttccccccacaccccctttcagccagctgaagtgataaaagccagctgaaaaagagaatatcgtatccttagcaccttacctgtatcgggcaaggtgcttttttattacaaacttggaggtagtcctatgggtaaatactgcgtacctgatgcaccgcggtatcagccacaaggttctgcgccactgcgtgagcagcggaatcctgtaccaaaccacacgcggttcgtaccgcaactgcgtctttgtgggcaaggatgagggcggcattcctcgttcagcgtttcaacgcggctgtcagggaatattccgtggtgatatactcggcagccagaagaagtttggctttctgattcccgcagaaaaccctgattgtgaaattgtagagatgtacgtggctccgattgacgccatgtccggcgcaaccctgcgacagtacaagcacgatatgccgtggcgtagcgtccactatctggcattgggaggtctgaaccatcaaccgattgattactttttggagcaacaccccagtgttaaaaccgtagttctctgctttgaccgttatgaacccggaagaaattttgcggaagtgactgcaaaacgactcacagagcgtggctacattgtgcgggatacgccgcctgccatgtgtaaatctgaacggaacaagatttccggctgctgttgtgagtaaaaaggattttgattttatgcgctaggacggggatattggctctatggactatgatcaggcggtaaagaatggtgaaattttctttggttggtcgatgtggatggaacaagatggatatgctccgggtgaatccattgcatttgactttgagaatggaagtggaacctatacctatcagggaaagattgcaggatcctttgtaagcgcggacacttatctt

SEQ ID NO: 14049 - DNA, 1170 bp, Unknown
  gut microbiota DNA sequence
tgctgtttattttcaagcacttccttttctgacataagcgcgccggcagctgcgatatctccttgcgacaaagcattttccacctggttctgcttatctgttatctcttttttcagagcaagcagctcgtcagatgatgtcagattcttaagccttatcctggctgccgcttcatccatcaggtctatcgccttatcaggtaaaaatctgtcatttatatatcgtgcagaaaggtttactgctgctttcacaccctcatctgttatgatgacaccatgatgcttttcatagagtccctttaatcctgtgagtatctctattgtttcatccacacccggttcctcaaccatcaccggctggaaacggcgctcaagcgcagcatccttttccacgtatttgcggtactcttctatggtagtggcaccgattacctgtacctcgcctctggcaagcgcaggctttaatatgttagatgcatctaacgagccttctgctcctcctgcacctattatagtgtgaagctcatcaatgaaaagcagtacatttttggcatttgaaacctcgcttatcaccttcttgatacgctcctcaaactcaccacgatactttgatttggctacaagcccggacatatcaagggaaaccagtctctttcccaaaagaatatccggaacattgccactgactatatcctgtgcaagtccttctactatagcggtcttgcccactcccggctctccaatcagacatggattgtttttgccacggcggcaaagtatctggataacacgctccatctccttttttctgcctataacagggtcaagaagccctgcctctgccatatctgtcaaatctctggaatactgatctaatacaggagtcgcagaattgtatgatgtattgtagcttttcatcagatccctgtatgcagacggatcctcgcccatcgcaccaagaatatctataaacatcttctgactgttaacacccatggtgtttaaaagtcttgcagctgcacagtctccctgaagtactatagccatcagcaggtgttctgtacctatctcattgcactcaaatctatcggcttcctccgatgcacgctccaatactctctgtgtccttggtgaatagccatccctgtccatcacttcgatgttatccccc

SEQ ID NO: 14050 - DNA, 16491 bp, Unknown
  gut microbiota DNA sequence
atcgacccgcgggcggatgcaagcatccgcccctacaaccgtccgcgaaatgggcggctgcgtacctataaaaaaagcaggcagagtgcaaatgcaccctgcccgtttttgcgaaaattacttacgcagacccagctcagcgatcagggcacggtaacggttgatgtccttcttctgcagataggccagcagattgcggcggcggccgaccatcttgaacaggccgcggcggctgtggttgtcatgcttgttggtcttgagatgctcggtcaggtgattgatgcgagcggtcagcagagcaacctgaacctccggagaaccggtgtcaccctcatggatggctgccttagcgatgatgggctgcttgtcgatagcggatttctggctcattggtaaatacctctttctaaaaaatatattggccgtcggcgcagtaaggggtagttggaaccgttgaggcatacgccccataccgggccgcggtaacattgattagtatagcacagctctggcagaaatacaagggctgtgccgcttattttgcaattattttgccgcattttcctcggcaaagtaggtcttgctctcctcggcggcgcggtggatgagagctgccagctcctcaagggagttgaacttgcgcaccgggcagtaatacttgtgaaattccagcaccggctgccggccatagatgtcccccgcatagtccggcacgaatgtctcgcaggtcacagcggcgtccgcgctggtgtcaaccgtggggcgcttgccgatgccggttgccgcaggccgccactgcccgtccagaaagatgcgggtcagatagacgcccgcacagggctgcagcgccgcggcgggataattctggttcagcgtcggcgtacccagcaggccgccgcctatgcccttgccgtggacaacaggccagtcgatcgcatagggctcgccgagcatcgcgttggcgtccgccagacggccctcctccagcgcggcacggatgcgggtcgaggatactgtctgaccgttgtactgcgccatcggcacaatatggacgccgatacccaacggtttgcacagctcgcgcagccgctcgacattgccggccgcccgcgcgccgaaggtaaagttatcgccgcagaaaagctccctcgccgcaaagcagtcaacaagcaccctctgcacaaaatcctccggtgacaggctgcggaacgcatcaaagggtgcctcctgatattcctcaattcccagccccgcgatgcgggcatgcttttgcgccagcgagaggatgcgcccgcccttcagggtgctgctgtcgggcagttcaaaggtaaaggcggcggcagtcaggcccttttctgcggcacaggccgcagccgcgcccagcacggcacggtggccgcagtgtacgccgtcaaagtagccaagcgccacggcactgccctgcggggcgtggatgggcgtcaggctctggtaaatctgcattggctgtcagtccctttcgcaaaatagtttttcgaccttcagcacaccttcctcgaccccggccagccccagaaaagccccgctttcctcatagacgcggtagcggccatcagcggccttataatggcttgtaggacagccgttgagcaggtgtgccttcactccctcgttgacatgcagcgcgggcagcggtgcaaagacggtctcgatgggcagcacccaatcgttggccgcaagctcgccgcgctcagcggcggcaaggatctcgggcagcgtgtggcactgctccagagaaaacacacccgcctgcgtgcggcgcagtgccgacagggtcgcaggtacaccgagggcggcgccgatttcctcagccagcacacggatgtaggtgcccttggagcaggccacccggatcgtgtactcatcctgtgcggggctgccgaggtattcaatgtcatagatcgtgatggggcgcggcgtgcgctcaacggtctggcccttgcgggcagccttgtacagcggctggccgttgatcttgaccgcgctgtacatcggcggcagctgcatccggtcaccgcggaactgcggcagcacggcgcacagctcctgcgcgccgaccgtgacgggggctgtttccagcgtttcgccggtcacatccccggtgtcggtgcgcagtcccagacgcagcgttgcttcataggttttatcatggtcaagctggcggtcggcggccgcagttgccttgccgataaacaccgcgagcacaccggtggccatggggtccagtgtgcccgagtgtcccagcttgcgtgtgcccagtgcgccgcgcagcttggccagcacatcaaagctggtccagccagcgggcttatccacgggcaaaatgccgtttggcgtttgcatagcagggttccttttctgttgttagggtttaaaaggctttccccccctaggggggaagctgtcaccgaaggtgactgatgaggggcaagtctgccattgcagaccgtttacgggctgttgcgggcaggttcgcccctcatccggccttgcttcgcgcggccaccttcccccaatgggggaaggctttattgcgcttctttctccgcgtcggcgcggtccagttcctttttaacttcctcgaggatcgcgtgcttggcattgtccgggttgccgctgatctcgcagcctgctgcgcggggatgcccgccgccgcccagacggcgtgcgatgttgcaggcgttggtgttatgaccggtgcgcacgctgatcttgaagctgccgtccttctgctggcgcagagtcaggccgacctccaccctttcaatggtgcggggcaggctggtcagatcctccagctcggcgccggccacgccggccgcctgaatctgatcccatgtcaggcagatcagggcgcagcggtcatcgtagtagaactccagactttccagcgccatgcgctccgcaataacgcgggcgtgggagcggctctcgaacagtcgttcattgagcatctccacatcggcaccggcctcgatcaggttggctgccgcgcggtgggtcgccgccgttgtgttgctgaaccggaagcaccccgtatcggtcgccacgcccgtgtacaggcaggaggcgatctccggcgtgatcttggcgcccatctcggggatgagcgttgtcagcagctcggccgcagccgctgcgccatcgtccaccagtgtctcgtaggcgtagccgctgttggagccgtggtggtcgatgcacagatcgacatgctctgcatattcctgaatgttgttgcgctccccgaagagctggatgccggccacatccaccgccaccacaaaggcggggcggaagctgccgtcaaacaccgtaatgggcatgtagctgtacatggcagggatcgggtcgctgcacagcacagccgcatttttgcccagctgctgcagggcaaggcagagcgccgtgcccgagccgatggtgtcgccgtcagggtttttgtggcaaaggatcaggatgtcatctgcagcaagcagacgcgaaaccacggtcccgcgatccacattctgagtcataggttcctcttttctaaccgggtacagggtttactctgcgtcagagtcggactcgatgtccagctctcccagcagtttgttgatgtgcgcggcgtaggctgcgccctcatctttaacgaaaacaaagcgcggtgccttgcggatatgcatccggcggctcacctcggtgcggacatggccggacgccttgttcagcgccttgacgaccggctccgggccgccctcacggcccatcacgctgatgtagaccttggcctgatcgaggtcgggggtcacatccagacgggtcacggtcaaaagaccgcccgtcacgcggggatccttcatctcgccgatgatggcaatcagctcacgcttcatatcctgggccatacggccgtggtttttggttggcatttactttacctctgcaatcaatcgcggtactcttccatcttgaagcactcaaagacatcgccttccttgatgtcttggaacttggccagggtgatgccgcactcaaagcccgcggcaacctccttggcgtcatccttgaagcgcttcaggctggcgatggcatcctcgcagatgacgatgccgtcacggaccagacgcagctgggcatcgcgggtgatcttgccatcggtgacacggcagccggcaacggtgccgacactggagatcttgtagacctgacggacctgtgcctcgcccagtgcgacctcgcggaccttcggggccagcatgcccttcatagcgtcggagacatcgttgatggcatcgtagatgacgcggtacatacgcatctcaacgccggtctgctcggcctcggccttggcgacggcatcgggacggacattgaagccgatgatgatggcgttggacgcatcagccagagagacatcggacttggagatagcgccgacacctgcatggatgacgcggacgcgaacctcatcgttggagatcttctcgaggctctgcttgacagcctcggcagagccctgcacgtcagccttgacgatgatgggcagctccttcatatcgttggcggccatctggtcgaacaggttatccagcgtgaccttggtgtaggcagcaaactgcttctccttggcctcggtggtacgcttgtcggccaactcgcgggccagacgctcgtcctcgacagcctcgaacagttcgccggcctcggggacctcggtcaagccggtgatctcaacaggcgtggacgggccggcctcggtgatttcctgacccttgtcgttgcgcatggtacgcacgcggccgacagcagtgccggcgatcaggcagtcgcccttatgcagggtaccgttctggaccagcagagttgcgatggggccctggcccttgtccagacgggcctcgacgacagcgcccttgccgcggcggctcgggttggccttcagctccatgacctcggcctcgagagcgatacgctcgagcaggtcgctgatgcccatgccggtgacagcggacacagggatgcaggcgacatcgccgccccagtcctcggggacgatctcgtacttggtcagctgctccttgacgcgctcggggttggcggtgggcttatccatcttgttgatggcaacgatcagcttgacattggcagccttggcatggttgatggactcgatggtctggggcatgatgccgtcatcagcggcaacgaccagcacagcaatgtcggtcatgttcgcaccgcgggcacgcatcgaggtgaaggcctcgtggccgggggtgtcgaggaaggtaatgacgctgtcgttgctcttgacctgatacgcaccgatggcctgcgtgatgccgccggcctcacccttggtgacattggtcttgcggatagcgtccagaatggaggtcttgccgtggtcaacatggcccatgacaacgacaacggggggacgctcgaccagatcggcggcgttgtcctcctcctgcacaaacaggcgctcctcgatggagacatggacctcatgctcgaccttggcgtggaactcctcggcaatcagggcggcggtgtcgaagtcaacgacatcggagatggcgtgcatctcgcccatctgcatgaatttggccacgaccttggcagcgctctgcttcaggcgggtagccagctcaccgacggtgatctcatcggggatggagatcttgagctgggcattgcgggccttctccagctggatgcgctgcaggcgctcggcctcggtctcacggcggcggccgaactgctggccgcggcggttgttgcggttgttgaacttttccttcttgccggtgggctggttcttgcgcttgctgggcatgttgcggctgtcggccagatcgtcatagcgggcgttgaacttatcaacgttcacatcaacggtgcgcgtgtcgacggacacctgcgcgcggttgacctgcacctgctccgtcttgacgggctccttgatgccggtatcggcggccagctcctgcagggtgacgcgcttctcgctgcgcttttccgcctgcttctcgggcttgcggatttccttcttcggctcctgcttggcttcgggcttggcagctgccttgggctgctccgtctttgcggcgggcttgtcggccttcttgggctcaggcttcttctgttcgggcttcttctgctcgggcttcggggcgggcttagcctcctccttgccgctggcaaggtaggcgtccaggcttgcctcggcgttctcgcgggtcagggtctccagcaggacattcagctctttttcctcaaaagtgccgccggtcttataggcttcgccggtcacgccggtcacggtctcgatgacctttttggcgggcacgccgaactccttggcaacatcagcgatcttatatttaaagtccatatagtgtggtcctcctctatcaaaggtattttgcgcacagctgtgcaaggtgttcgtcagtcacgccgaacacggcggcgggcttgggggtaagcatggccagatctgcgctggtcaggggcatctgctcgcaggcaacaatgtcctcacaggcgtccttcatgtggctgacggtgcggtcgctggcgtccgaggtcagcagcacaagggccaccttgccgcgcagtgcattttcctgtacgcggtcatacccgtgcagcagcttgccggccttgcggcacagccccagcgcacccagcagcgggtgctgatcgttattcatcgctcgccgcctcctttgcgctttgctccgcacaggcgatctcctccgtcaggcgctcataaatgccgtccgggatggggacctcaaatgtgcgttccagccgctttgccttgcgtgctttggcaaggcatgcggccgaggggcacagatacgcaccgcgccccggtgctttgccgcgcagatcaatgctgatctcgccctccgggctgcgcaccacgcgcaccagttcacgcttggggcgctgggcattacagcccacacaacggcgcacggggatttttttctgcttttgctgctgcaactagccgacctcatttctagataatagataaaagataagaaatatggcgttccgcggcgctgcgcaccgctcaaaattttgtttttgccctgcgggcaaaacctccacactttttattatctattatcttttatctcttatctctttgtatttattcctcatcctcgccgtagtagccggactcggggcggatatcaatattgtagccggtcaggtgggcgcacagacgcacattctgacccttgttgccgatggcaaggctcagctgctggtcgggaaccgtaacacggcagctcttggtctcgccgggcagcagctcgaccttgacgaccttggccgggctcagggcggcggagatgaactcggcaatatcctcactccagcggatgacatcgatcttctcgccgttcagctcctgcacgatcttctccacgcggacgccgcgggcaccgatgcaggcgccgacgggatcgacatcggggttcttgctccagacagccagcttggtgcgggcaccggcctcgcgggcgatggccttgacctcaacggtgccgtcatagatctcggggacctccagctcaaacatacgcttgacaaggccgggatgggtgcggctgatggtgacgcgggggccgcggtccgttgccagaacatccacgacatagacctgcacggtctgaccctcggtgaaggtctcgccggggacctgctcattgcggggcagcacggcggagcctcccttgcccagatccagcacaatgttgccgcgctcggggtcgatggagacaacggtggcggcgatcagctcatgtgcgcgggactgcatctcgctgcactgcaggttgcgctcaccctcgcgcaggccctgacggatgacatgctttgccgtctgggcggcaatgcggccgaactccttggtcttgaggggggtgaccatgcgctggccgaccttgtagctcttgcggaccttctgggcatcctccaggctgacctgcgtgtgggggttctcgacctcctccacgatgtcgcgcagcaggcttgcgcggaaggcgcctacctcggggtcaatgtcaacgacaacattgtcatcctcgacctcatagtccttcttgacggcgatgacgatggctgccttgatcttgtcgatcaggtagtcctcgggcaggccgcgctccttttccagtgcggaaagagcctcaaagaattcgttgttcgcagtagccatgtttctggtttcctcccaattatatttcaagtacacacaatacagtattattcttgccttcccctgcggggctgcgcccgcaggcgcgtgtcggagcgcaaccgccgtaggcggctcttagcgcgtagactgaaggcggcgcgcagcgccggatgaggggcgatgctaccgctattacccgttcatgggtagctgcggcaagtctgcccctcatcagtccgcttcgcggacagcttcccccacgggggaagcctactcacccgaacagatcctcgtcatcgcagagcttgacatagcccgcgctcttgagcgggaaggtaaagctctcctccccgtccgtcagggtcacattgccatcggcgtccagtccctgcagcaggcccgcatagtcgcggcggccctgcgcgtccgggcggatcaggcggacggcgcacttctgccccttgagctgctcataatgctcggggcgggtcaggcggcggcccatgcccgggctgccgacctcaaggtagtagctctggtcaatggggtcggcctcgtccagcagcggatcgatggcgtgggagacctccgcgcaggtgtcggtatccatcggctcatcgcggtcgatcagcacgcgcaggaaccagtccgggccttccttctcaaagcggacatcccacaggcgcaggcccatagcctcgaccacggggcggaccagcgcctcgacgaccttgaccgcactgccctgctgcggtttaccgggttttgccataaaaatgctcctatcataaaaagaaagcggaccttgcggcccactttcagtaaaatcatcatcgaacaatatgactataccacatccgtgcgcaaaaagcaagcccccgccgggcagaattacctttcagcgggctttttcagcgcgcattttttgcgcagtttggtgcagtgcgctcgcagcaggcttttcgagcaggaaatacgccgctgtgccagtggtcagggcggcggcccagtacaacatatcggcacggtgcatccagaccttatcccccagctggttgggcggggtcacaccctgccaggcgggcagatgcaggtcatacttcaaaaataccgtcagcatctgatgccagaggtaaaagctgtaggtcaacgccgccagcccgcgcagcagccgccgtgccggggcgggcagcgtcagccccaaaccgaaaccgaccacgaccgctgcagccgcaatgaccaacggcatacggttcacaagctgaaagcgctggtagtctgctgccgcagcctgcgcgtgcatcagggcattgagccggacaagcgccgccgcgcccagtgctgtgcagcccgcgcgcagcagaaaatgctgtgcccagccgccgcgcgccagtcttgcaaagacgagcgccgccgccatgccgaccgccagcaccccgcagaacgccggaaactggttgaaaagcagcgggtacgcatacccgccgtactggggcagcgcccagagcgagtatacaagctgcacgccgcagagcgcccccagcaccggcagcggatgccgtgcgcagagcggtgcaagcagcgggaaaaccagataaaacagcgcaaacaccgtcagcgtccagctgaccgcattgagctgcgtaccaatgtagcacgccgggaaaagctgctgggtcagcgtcagatgcgtgaaaaggtcaaccgccagtgtcctgctccacccgctgcgatacactgccagcaccagactgaacagcaggctggcatagtaggccggcagcagccgcgcggcgcggcggcggtaaaactccgccgggcgggtctgcggcagcggtccgccctgcgctgccgcattggcccacggcaggaacaggcagaacgccgacagcatgacgaggaagtccaccccaacgctgcccgcccgcagccaatgctccgcagtggggcggctgtaccagctttgctgccatatgtggaacgcccccacggcccacgccgccagcacccgcagaaaatcggcagatgccgggcggtcacagtcgatcggcgccggggtgcggcttagaacgcccattcgccgttttcaaaaatcgtgatctcctcgccgctcttggtcacgccgacgacatgggtgtcgggcgcaccgaccatgacatcctcatggatggcggagctgttcagaccctttgccagcagctcgtcccggctcatggcggagccgcccttgatgttggtcgggtagccatcgccgaaggcgatatggcaggcggcgttttcatcgaacagggtgttatagaacagaacaccgctgcggttgatggggctggacgcgggcaccagtgcgatctcaccgatgcggttggcgttttcatcggtggtaagcagctcggccagcagctcggcgttcttctcagcgccatgctccacgaccttgccgttttggaaggtgacatgccagccctcgatcagctggccgttgtaagcgtagggcttggtgccgtagacgcggccgtcaacgcggtcgcggtggggtgcgcagaacacctcctcggtggggacattggcgatgaactcgatgccgccctccgtcttgctggacgcgccctcccatgtggcgtcctcggccagacccacggtcaggtcggtgccgttggcgctcgtcatgtgaatacggtcgaggttcagctcattcatccggtcgcggcgggccttggtgcgggcaacatgctccttccatgcggttacggggtcaccggtcgatacgcggcagacatcaaagatcagcgcccacagcttctcaatggcctcctcaagcggcaggtcggggaacaccttggcagcccagcccggggcgggcacggcggccacgcaccactgcacgcggtcgttcatcgtgtaggcctgccagggcttcataaaggtgcggcgggcgaggttgacgcggttcagcttgccggcatccagcccggccagcgcctcggggtcttcggcatggatggccagcgtgcagcagccgtccgggtcctcggcatagtcgaggtagctacgcagctcgtagggcttcatggcgcacaggtcgctctcagcggccatttccatctgcaggcgggtcagcttgtcgtcctcccagcggaccacaacggtcttggcaccggcctcatagcctgcgcggacacaggcgtgggcaaagtccggcatcgtgaccgggcagcggacaatgaaattctggcgcgggcgcacattgacgcccaccttgacgataaaatcagcgtagagctggagataatgttggttcattgcgagtggctccttttataatatatttggttgtattgtaccataaagtgggcggtaatggcaaggctgcgtgcctcccccccgaggggggggaggtggccgaggccccgcccgaggccggatgaggggcggccctccgggggttgcccgttcactggctgccgcagcggaccttgccctcatcagtcagcgagcggggtcgctgacagcttcccccgaggggggaagccactccaccaaaaaacaggccgcccgcccgggcagcctgtcgcaaagcttatttctctaccatcatatcggcagccttgtacagatcgccgcagctcatgcagacgacaaggtcacccttcttggcgtttttctttacccagtcggcggcaccctccagcccgctgaccacaacactgccgggcagcttggcggcaaggtcctcgctcttgacgctgccgtcatccttctcgcggccgcccataataggcagcagcacgacctgatcggcggcgcgcagcaccttggcaaattcgtccatcagcatcttggtgcggctgtaagtaaacggctgatgtaccgcaatcacgcggtcatagcccatctccttagccgtggccagcgtggcggccagctcggtgggatggtgggcgtagtcatccacaatgaccgcgccgttgcactcgcccttgatctcaaaccggcggccggtgccgtggaattcttccgctgcgcggacggcatcctcgggcttgaggcccagcggacgcacgcagcagcacatggccagcgcattataaatgttgtggtagccgggcacaccaagccggatgtgggcaaagaactcgcccagctcaagcacatcaaactcaaagaaaccaggcttgtactcgccgatattgacggcgtggaagcgggcctcctctttgatgccgaagctcagcaccggacggtcgatggagttgacgacatccatcgtgtttttatcgtccatgttaaacacaacggtgcgggacagcagcgcaaacttctggaacgcgagcttgagctgacccatcgtgccgtaatactccagatggtcattgtcgatattcaggatgacgcccaccgtgctggtcagctgcaggaaggtctcatggtactcacaggcctcaatgaccacgctctggccgctgccggccttgccgtagccgccgatgaggggcagcttgccgccgatgacggcagcggggtccttgccggccagctccagcattgtggtgatcatgccggtcgtggtcgttttgccgtgggtgccggccacaccgacgctctggctatgggtgcggctgatatagcccagcatgacgctgcgctccaccgccttgatgccgcgggcgtgggctgcctgcagctcaggattgtcattatggatggcggcgctgtagacgaccagatccggattgcccagattggctgcatcatgcccgatagcgacacggacgccgagcgcacgctccgcctcggtgtttttggtttcctcgacatcggagccggtgatagcgaagccgcggctgtgcaggatctggatcagcggataggtgccggagccgccgcagccgataaaatggatcgtgcggaccccctccagcagcttggggtcatacatactaaaagccataacagtggtcacctcaaaatttatccgctgccttagaggatacggcatacggcatttttttactaatactatgatagtattatactatttttttgcaataaaagaaacactttttttgaaatccccgcctgcgcaggtaatttttgggcaaatggtacaaatttggacttgcagtttatagcaatacatcgagggtgcagccgcagccgcacccccgatgtgtgaaaagattttttatagtacgataaatgtgcccccgtgttttcgggcaacctcccgcgttttgacataatcatcgtataaagcccagttccagaccgcgcgctgcactgtcagctccttgccgattgcattccttacccgcagccgcttcaattcgcgcaatgtagtcatatcgcaacctcttttcctcttttgctgccttcatcataacacatttctttgtcgaatccaacgattcttgtggcattttgtctgcttttttgatacaataagaaaaacgctgtggaggtgccgcccgtatgaaaaagctgatttggagcctagaccctttggccgtgtcgcggctggggcgggcggcgaaaaagccgccgttcagcaaaaaagaattagcccgcatcggcatccctgcgcgcaaaatcccccgcgtgcaggaggagcttgcccgtttgagcggtgataccgcgctgaaacgcgaggaactggggatgctggcgtgggagattgcggacttgttgctgtaaagccttccccctagggggaaggtggccgaggctccgaccgaggccggatgaggggcggcgctgtctctgccacccggtcatgggctatcgcgggaagtccgcccctcatcagtcgcctatggcgacagctcccccccctaggggaagccttttttcgcgttgtgcccttgtcccctcccccatcctatgctataataaatgcatcgtgccaaatttatccgggcgcggtgggaaaatcgctttgtgtggcagccagccatgcggaaggagtaacacaaatgaagaacagtgaaaagacccttgacatgatcgtaaacctgtgcaaaaaccgcgggtttatctacccgggcagcgagatctacggcggcctggccaacagctgggactacggtcctctgggtgttgagttcaagaacaatgtcaaaaaggcatggatgaagaaattcgtgcaggaaagcccctacaatgtcggtctggatgccgctatcctgatgaacccgcagacctgggtgactaccggccatgtgtccagcttctcggacccgctgctggactgccgcgcctgcaagagccgccaccgcgccgacaagctcatctccgagtgcgagcagggcaagggcgtggatgtcgatgccatgacctttgatgagatggacgcttttatcgccagccatgatgaagtcgtctgccccgtctgcggcaagcatgactttacccccatccgtaagttcaacctgatgttcaagaccgccatcggcgttaccgaggattcctcctccacctgctatctgcgccccgagaccgcacagggcatctttgtcaactttgcgaacatccagcgcacgacccgccgcaagctgcccttcggcgtctgccaggtcggcaaggcgttccgcaacgagatcacgccgggcaacttcaccttccgcacccgcgagtttgagcagatggagtgcgagttcttctgcaagcccgacaccgatctggagtggtttgcctactggaaggactactgcaagaactggctgctgagcctcggcattcaggaggaaaacctgcgcctgcgcgaccacgagcctgccgagctggccttctacagccgcgcgaccaccgacatcgagtacgccttcccgttcaccgactggggcgagctgtggggcattgccgaccgtaccaattacgacctgagccgccatcaggaggcatccggcaagagccttgagtactttgaccccgagacgaacgagcattacatcccctatgtcattgagccgtccttgggctgtgaccgcgtagcactggccttcctgtgcgaggcctacgatgagcagcaccttgtcgatgccaagggcaaggaggatgtgcgcaccgtgctgcacctgcacccctatctggcaccgttcaagtgcgccgtgctgcccctgtccaagaagctgggtgacaaggcgatggagatccgcaacgagctggccaaggactttatggtcgactacgacgatgccggctccatcggcaagcgttaccgccgtcaggatgagatcggcaccccgctgtgcatcacggtcgacttccagactgtcggcgacgacaaggtcgaggctgacggctgcgtgaccgtccgcgaccgcgacacgatggagcaggtccgtatgcccatcagcgagctgcgcgactatgttgcgaaaaaggttgcgttttaagtaaatatcgtataaaaaactgcctgcaaatggaatcgcatttgcaggcagttttttatacgattttttctaccgtcacactgttgacggtgacattggcatcatccagtgtgtggacggcaacgcgccagtagtgaagcatctcggtggccgtaaactcaaatgtcatctcgttcgggtcgatgccggtgaagtcgatgtcaagcttgtaggtttcttcgttgatgaggccgtaccgcgcgtagatgtagctgtggtcaaagccgctgccggtcagcgtcacacggtagtgcccggggaacagcgtccactcctcggtcatcatctcaccgttcatgcccagaacaatgccgtccgccgccagaaagagcgggtcaacatccgacttcgtcaaatccatcgtgtgggcgggcacttcgggcgcaggctcctcctcgatgccgtcgatgggctcgacgctgccgatcaggatgccatccagccggtaatagtgcaggtcgtaactgttccgcgtcagctcgtcctcgtcgatgaaggcatagagcgtgtcagcggaaaactcgttcagctcgcccggcagcgtgaccgccgcaaggttgccgtccatatgcgccatgtagaagctattggaggtccagccgtggtcggcggcaaagtcgaccagatcccagaactcgtcatgctcaaagtcaaatgtggcaaaggccagatggctgtacctgccgctggcggcgatctgctcccacacggggtcggtcagcagggtcttattctcgtagcggaagccgtagtagtggtagtccgtccagcggttgaacagctccgaccgctggccacagccctgcgcca

SEQ ID NO: 14051 - DNA, 2905 bp, Unknown
  gut microbiota DNA sequence
ccctcatcagtccgctgcgcggacagcttcagtctccgtgccaagtgccgcctacggcggttgcactccgacacgcgcctgcgggcgcagcccctcaggggaagccttttaggttacagtcgtgcaataaccgcctgcgtaaactccttcgtcccggcagtgccgccaatatcggcggtcacgaccttgccctcggcaacctgtgccaggatcgcggcgttcaggcgggcagccttttccgtctcgccaaggtcgccaagcatcatcgcaaaggccatcaggatcgcactggggttggccttgtcctgcccggcaatgtcgggtgcagagccatggacggcctcataaatgcgcgtattatcgccgatgttggcgctgggcgcaaagcccagaccgcccacaagccctgcgcagagatcgctgataatatcgccgtagaggttcggggccaccaatacatcgaactgctccggcttctgcaccagcttcatgcagagcgcatcaatgatgcagtcgtctgcggtgatttcgggatagtgggacgccacctcgcggaaggtgcgcaggaacaggccgtccgtcagcttcatgatgttggccttgtggaccgccgtgacctttttgcggccgttcttgcgggcatagtcaaaggcaaagcggcagattctttcacaggcggggcgggtgatgagcttgacgccgttggccatctcatcgttgaccatgtactcgatgcccttgtacagatcctcggtgttctcgcgcacgatgacaagatccacattgtcaaagcgggtgggtacgcccggcagcgtatgcacagggcgcaggttggcgtaggtggaaaagcgctggcgcagctgcacattgatgctgcggaaacccttgccgatgggggtagccgtggggcccttgagcgcccagccacaggccgcgatggcgtccagcgcgccgggggcgatcagttcgccgctctcggcggcatattcagcaccggcggcatattcctgccacgcaatgccggtgtccagcgcggcggagacggcgcgcacactctcggcgatttcacggccgatgccgtcgcccggaatcagaactgctttcataaaaatactttcccctttccctgtggtccgcacgggcagcgccctgttttttctgtcattgccgcacagaattgtgcggtgctgcctgcagtatatctaccatattacccggtttatgcgcagttgtcaacgcgcatttttacacattccgcatcaatctgcccacagacttaattatttaaagttccgtcttgtttaatctggcaaaattttaagtttatcttgacgaatctgcaattatactataaaatcagtttatcggtacagggtgtaaatgcggtaccgcagggaaagtcatgtataaacatgcaaagtgtatagagagaggggtatctgcgatgtattatccggacgtcccggccttggagccggatgagctgaatctgctctgcaatgaatatttagagcataatgccacgctggacccgcatctggcggaccagatgggcgtcaagcgcggtttgcgcaatctggacggcaccggcgtgctggccggcattacgaatgtatcgaatgtcatcggctacgacaagcgcccggacggcaccatcgcgcccattccgggccggctggtctaccgcggcatcgacatcgacacgctggccgccgaggccgatgcccacgaccgcttcatgtttgaggaggtcatctggctgctgctgttcggctctctgcccacgcaggagcagtatgccaagttccgcaagctgctggagcatcaccgcgagctgccgcagggctttgccgatgacatgatcttaaactcgccgtcccccaacctgatgaacaagatggcgcggagcgtgctggccatgtacagctacgatgagcacgccgaggacaacagcctgcccaacatcctgcgccagagcatcaacctgatcgccgagctgcccacgatgatggtcaacgcctaccagatcaagcgccgcgtctacgaccggtcgagcatgtacttccatctgccgaccgaggggcagagcacggccgagcatattttaagcacctaccgcgctgaccagaagttcacccatgaggaggcgcggctgctcgacctctgcctgcttgtccacgccgaccacggcggcggcaactgctcgaccttcacctgccgcgtgctgtccagctccggcacggatacttacgcggcgatttcgtccgccatcggcgcactgaaaggccctaagcacggcggcgcgaacctgaaggtcatgcaccagctggactacattctcgaaaatgtcgagaacccgacaaacgatgacgaagtccgcgagctcctgcgcaagatcctccgcagggagcgcggcgacggcagcggcttgatttacggcatgggccacgcggtttacaccttgagcgacccgcgcgcacagattttgaaaacccacgccaaaaatcttgcctataaaaagggctatgatgaggaatacgagatgctgtgcagcatcgagcggctggcccctcaggtctttgccgaggaaaagcacggccccaaaaaggtctgcgccaatgtggacctgttcagcggcctgatctaccgcatgctgggcatcagcgaggatctgtacaccccgctgttcgccattgcccgtgtgccgggctggtgcgcccaccgcatggaggaggtcgaatttgccaaccgcatcatccgccccgcctaccagtatgtcggcaaaccgcaggagtatgtggcgctggaggagagataagttttatgtcccggtgtgcagcaccgggattttttgtttacagcaacagcggcggtcagcagctttattctggaggggaaccggctg

SEQ ID NO: 14052 - DNA, 7574 bp, Unknown
  gut microbiota DNA sequence
gttgacggggtaatacggttcatcgccgggcttccactcggaggaatactcgcggctgataatggttttgggcaggtcgttgccgttctcgtccttgccgaactcgaaccatttatgctcgataatgcgggtccacggggtctcacggtcggtgtagttgacggcggcattgccctgaaagctgggcttgtcgagcagctcattctcaaaccggacggagcgatactccagcgtgccgagcttgtagtcaaagtaggcatcaatggggccggtgtagacgaccttgtcagccagtgcgtccagcgcggccttattttcgaggtaatcggtgttcagccgcatctcgatgccgtccagaaggttggcaatcatcttggtgtagccgccgatgggaatgccctgatacagagcgttgaaatagttgttgtcaaaggtcagccgcacgggcaggcgcttgatgataaaggcgggcaggtccttgcagtcgcggccccactgcttttcggtgtagcccttgatgagcttttcataaatgtcgcggcccacaagggagatggcctgctcctcaaggttctgcggctcgtgggtgatctcacggcgctgctcctcgatcttggcggctgcctgctccggcgttacaacgccccacatcttattgaaggtatacatattgaagggcagcgagtaaagctcgcccttgtagttggcaacgggagagtttgtaaagcggttgaactcggcaaattgggtgatgtagttccatacctttttgttgttggtgtggaagatatgcgcaccgtatttgtggacatggatgccctcgatgcgctcggtgtagatattgcccgcaatgttggggcgcttatccacgaccagcacggatttgccgtgggccttggcctcatgggcgaagatggcgccgtacagaccggagccgactaccagataatcatatttcatacaacaggtgttcccctttttttaagttacaagaaaagtcacaaggatactgtgcggtaatggcgtagagagccttactcaactgccaaaaagcggcagaaaggcggttcagtctctgccgaacagatcccttgtgtagaccttgtcctgcacatcgtctaggcaggcatcgtagcggtttgccagaatggcctgactctgccgcttgaatttgtcgagatcgttgaccaccgccgagccgaagaaggtcttgccgtcctccagcgtaggctcatagatgatgacctgtgcgcccttggccttgatgcgcttcatgacgccctgaatcgagctttggcggaagttgtcgctgttgctcttcatcgtcaggcggtagacgccgatggtgacgggcttttcgcgactttcgtcaaactcgttttcccgatcgtagccgtagtacccggccagcttcagtacgcggtcggcgatgaagtccttgcgggtgcggttggactccacaatggcctcgatgagattttccggcacatcggcgtagtttgccagcagctgcttggtgtccttgggcaggcagtagccgccgtagccgaagctggggttattgtaatggctgccgatgcgcgggtcaaggcatacgccgtcaatgatctgcttcgtgttcagacctttgctctctgcgtaggtatccagctcattgaagtaggcaacgcgcagcgccagataggtgttggcgaacagcttgacggcctcggcttcggtaaaccccataaaaagggtgtcgatattttccttgatggccccctcctgcagcagcgccgcaaactcgtgggcggctgcgacaaggtgcgcatcctcagggtcggtgccaacgatgatgcgggacgggtagaggttgtcatacagggccttggactcccgcagaaattccgggctgaacaggatgttcctgcttccgaacttttcccgcaccgacacagtgtagccgaccgggatcgttgatttgatgaccatgacggcgtttgggttgacctccatgacaaggcggatgaccgcctccacggcagaggtgtcaaaatgctgggtctggctgtcgtagttggtgggtgcagcgatgaccacaaagtctgcatcggcgtaggccgcctttgcgtccagcgtggcggtcagatccagttccttctcagccagatacttttcaatgtaatcatcctgaatcggcgatttgcgcgcgttgatcaatgcgaccttttccggcaggatatccaccgccgtcacatgatggtgctgggaaagcagtgtggcaatcgaaagccccacatagccggtcccggccaccgcgatcttatattttttcatagcagttatactccgcagttgcgaattttccgtaaggcagcggtcaaaattgcgctctgctggcttacagcatgtgagtttattatagcatgtcatcagccacaattcaaggcagcacctgaatatgtggtactatgtgcaaaacctgtcagcgtaggcagaccaggaatactgcaggcagtaggctgtgtagctgccgtcgggcagctggattcggcaggcggcgggggcatcggccagaaggtcctgccccacctgcagccgggctgggtcgggctgggtcagaatgatggtatgcagtgccgggcagtcggcaaaaaggctgtccggcagggcggtaacggcggactgtatcgtgacctcctccagcgcagtgcagccgcggaaggtgccggtgcagagccttgtgactgccctgccgtttatctcagcggggacggtcaggctgcggcgggcgcggcctgccgcgtttacggtaacagaaccgtcctcatccattgtgaagtatgcggcatccgtgctgctgccgctgcctgcggcggtgtttgcggccggctccggcatggcgggcagggctatttctgttgcggtggtgtcccccagcattgccttgatgtcccggataagctgttttgtgaaaaccgtgcgccccgcagtgttgagatgaaaattcgtatcatagaaccagccggactccatcacgcaggcgcgggggtccccggccagcggtgcggcaataacctgctgaagatgcgcggcataggcattgagctgatctttattttccacggcaagcgcattcatgggcggaaaatggtaatagaccgcagccccggcatcagccgcccgggcggtgtaggcattgagtgcggcgcagaacgcggcctcgggcagcgcggtgtcaaactgtattggcatcgtggggtcatagccctcgggcatgatgttggccttgcagagcgggctggccagatcaccggcggcgttgaagctgtcgcgccggtagatgccgtccgtctccgctgcgccggtcaaaaaatagcggaacttggcagcggcaaaccgtggaaacgacccgagcatcggcccaaagtcgcgggcatgcaggcagcccagcgccgaaaagtccccgtcaacagcctgccagagagcggcaacccccaccgtgtccgacagagcctgttgctgctgctccggcatgacgatgacgatatcccctgcccgcaattcatttatggacaaatcgagcatcactcgggtgccgagcgcagcatacaggccaaaatttacagggtggtagtccggaagctctttggcaagcagggtgctgtctatcccaaaggctgcagcgctgccgcccacaaggatcagacggggcttattgctttcggctgccagcagggcacgcttggcgggcagctcccccaaaaaggtgctgctgtactgtgcaggcagggcaaagccccacaccgccagaagcagcggtacggcgataaaaacacccagcataaatgcgatgattttcttcataagcgttacggaataccgttcagaattggaaatagataaaggcattggctgtccccgcatgcagcgctgcaaaccatgcggccgcgactgccagcgtgagcaggcaaaacgccagaacaccgcgcggtgtggggacatcgagtggcttttcaggcagaaggcgcagacagagcgcccccagcaccagctgggcggctggctgcagaccgagggtgagcaccgccgtgcgcacagaggctggctcccacccgcagggcagacgagagaacagggtcagcgcatcggacaccgaggcagcccggaagaatacccatgcgaagcagaccgctgcaagggtcagcaggcggcgggcaggagcaaggcacccctgactgtcagcgagaaaaatccgcttctcggcgagcagcagcagaccgtggacaccgccccagaccacaaaatgaagcgaggcaccgtgccacagaccgctcaaaagaaagaccgtcagcgtgttcagcgcgcggcgcaccgcgccgcagcgtgagccgcccagcggaatgtagacataatcggtaaaccagcgggtcaggctgatatgccaccggtgccagaaatcgcgcagcgatacggcctgatagggatggtcaaaattgcggctcagccgcacacccagcagggcggctgcccccaccgcaatatccgaatagccggaaaaatcccagtagatctgcccggcaaacaatacggtggccagtatggcagcagggccggacgctgcgccgggggctgcgtagacggtgtctataaagaccgctgccgtgtcggccagcagcagctttttgcaaaagccgcgcaggatatacagccatcccccgctgtccgtccggcgggcagggtcgcggagctgcggcaaaagatcggtgctgcgctcaatgggcccggccacaagctgagggaaaaagctgacaaacagcgcgtagtaaccaagatgccgctccggtgccagccggccgcggtatacatctatgacatagccgagcgtctgaaaagtgtagaaggagatgcccgcaggcagcaaaagcgaggcccccgtgccgaaaagaccggcgtatttgaaaacaccgaggcagcccagacagagtattgccgcacagcagagccaaagccttttgccgacccggcttttacagcggccgatggccagcgctgcggcgtaggtgcccagcgtaatgcacgccagcagcggcagggccttcggactgccaagcgcataaaacccgaggctggctgcaagcagcagtacccagcgtgcgcggggcggcaaaaggcggtgcagcagtaccaccagtggcagacccagcacaaaggagggtgcagtaaaattcatcggcttccccctttcggccaaagcgccgccgtgcagggaatgagcaggcagagcagcagcgtttgggtcggaatactgcataccagcgcggccagcaccagcaccccaccggcggccatccctgctgtgcaggcccaggcaaagcggcgggcctgcaaagccaacgctgtacacagcaccgttataagcagcaaagccgtcatggcgtcagtccctccttctgcagtgcgtactttagggcggtgatgacctgcgccgtgcgcagcgcaacaccgttggtggaaagatggttgtcagtcccatagaaataccgccccggcagcagggagtcctgcagcggtgtcaggatcgctgcgctgaggttctctctgaaataggcgtccagcgcggcgatggcctccggtgtggaggcttcggagactgccctgctgttgcggggactgtaggtcaggtatacccgcacaccgtctgccttaaaacgcgcgatttcagcgttggcggggtcgatataatacgcctgcggaaaggcatccaccgtgtaatcgaccggcagaccatagatcggcgtatcctcattggcatccgggcggtagagaatatagtcgccgtaggcattgtagctgggggtgtccacaggattgccgtcctcgtccagttcggcgggcgatacggcgtaggagcgcgccgccataccggtgcgggtctgcagataagacccgagcgccgaaaaaacgccgctgtactggcgtaaatcgagctgggcgagcagatcgtagtttccctcgaccatgcagaaaaagttatcatcgaatgcgttcgttgtgcagaattggcgcttggcagcgtcaaactcgggcgagagcagcaaaagatccccctcctgcagctgcccgcgtatcaattccagctggggcagggcgttggtataggcaaaaacccccatgttgaccaccgcatagctgggcagggcttcatccagtgccgcgctgtcgtagccgaaccgcgccgaggagccggagaacagcacgagcttgcgatttttggcgagagacagcagccggtcatacttgtcggcaaaggtagcatagtagctgccgctgtagacgggggcggtcgcggcgttgatgtgcagggtgcgcagcgccgtgcagccttcaaaggcatagtcgctgacggtctgcagattgtcaaagagggtcagcgtttccacagcgcagccggtaaaggcccccggctcgatgcggcgcagcgtgtcaggcaggatgacctccctgcaggcggcgtttgtaaaagccccggcggcgatctcaaccaccggcacgccgccaagcgtatcgggaaggacaaggcgctccccgctcccctgccagcctgtgacggtggcggtgccgttgtttacggtaaaggtgaattcggtggcatcgttctgggcagcccactgggcatagagccgtctgccgggctcggtccggctgcccagcccaacggcctgcccactgccgtccggggcggtgttccagccggtcagggtgtggccggggttggtgaacagctcgccatggatcgcggtattcacacgcagatggcttgcggtgacaggaacctcgagccagtcaccgcccagattgtccctgtagtagagtacggtatcgcttttttctgccgtgacggcaacagcggtcgagtagcggacctccggcaggctgagggtatagccggtgccggtgcgcgtcaggcgggcaccgggatagtctgcgcccgtcagcgtatagccgtcggccggggtcagggtgaaggtcaccgtctgccccggggtaacggctgcggtctgggtctgcgctgtaaacgcgggcgaggattccaaaacgatgcggcactgcaccgcagaggctgccggggcggcggcacagcctgccagctgcaccagcatggcaagggcgagcatcagtcggcgcaagtggaacacatcctttcagaaaaatctgtttttttatatcataatacaaaataccccggagagaaagccccccggggtgtggttgaggaaaaagctgtcacgatgaatagtgacgcgggaatggcgcaaaattactgcttgttcacgttggtgaacgcggcaatgatgttcagcaccacggcaatcagcagcgcggccgtgccgtagatggcgctggacaggtcagccatcgtctgggcgttgttcgtgaaggacataatagaggcaatggtgttgacgcgggggctgatgaactgtgcagcggcaaccaccagcgtgacaccggcgacaacgctcatcacgtcagcggcaacagcctgcttgccgtccagcagaatgcgcagaaccagtgcgacaatggcaatc

SEQ ID NO: 14053 - DNA, 16388 bp, Unknown
  gut microbiota DNA sequence
ggtgacccggacctcccgcacatagggaaagtccttcttgaaccgccgcgcgatcagcaggttggccatgacattgaagaagatcgtcacgctgaaatacagcacatagttcgggaaccagagcgagacggcaatcttggcaaggcttgtcagcacattgcagcagaagtcgatctgggtgcagcggtagccctgctgggtgcaggtgtacatcaggcggcgggtgattaaaaaatagctgcacagcgttgaaactacattcagtgcatagactgtgtaggctgtggcgggcggcacatcgggcatgatccagcgcagcgttaccgcgccgaggagcgccagccccgcaatgacaagcccgacgacccggtaggcccacttgtacatcgacatatacttgctgatcttttcctcgttctttgcggcgatctgctcatacaggcggtagctgatgacgctgccgacaccgaactcggcgatcgagaaaaagttgaaaagctggctgacgacctgagacgcggtggtgatctgcgggccgaagttatcgaccagcagacgccgcgtgataagccccagcagcagcaaaagcaggctggagccgagggcgtaggccatgttcagtaaggtacgtttggtacgcaaggcagttcctttcacaaaagccttcccccgagggggaaggtggcccggagggccggatgaggggagagtatgagttgtaagccgttaatgggcggtgatggcgaggttagccctcatcagtcgcctacggcgacagcttcagtctccgcgtcaagagccgcctacggcggttacgcttcgacacgcgcctgcgggcgcagccccttgggggaagcctttagcggcggctcgccgcccacagggtaaatttcgggccgaaggtctgcatcagcttttggaagagccgccagtcccggcgggtcttgacctcggtgccgcaggcgtagagcgggcgcagttgtgcaagatagggcagacacgctttgcggatggcggcatccttcaccgccgccgtgcgggcctgcggccagaacacatcggcggccgcatcctccatgacggcataggtcgcggcatccaccgcgccgctggctgaaagctttgccagccgccgctgggccgccgccatgccgcggaaccgcttgggcaggttcttcgcgtcagtcagcaggctgccctgccgccccacgcggtagtgggtgaacaccacatccaaaaagtacagccgctcgcagtggagcagcagctccagatcgaagggccagtcctcggcccagcagcagtcgggcaggaaccgtacgcccgtcttttgcaaaaaggaccggcggatgcagtatttccagaccgaccagtgcccggcgttgtacagggccttgaggcgggccgcatagtcggtgctgtcaaaggggccgggcaccagatgcaggccgtcatgcgcggtcaggctgccgtccggctgccattccagatgacggccgatgaaccagtcatacccggggtgggcgggcagtgcggcgcgcagtgcctccagcaggccgggggccatggcgtcatcgctgtccaaaaacagtacccactcgccctgcgcggcctgcaggccggtgttgcgcgcggcggccagaccgccgttctcccggtggatgacccgcaggccggggatctcagcggcaagggcatcgcaaagctggcccgacagatcggtcgagccatcatcgacaaggatgcactcccagtcccgcgggccgtcctgctccgccacgcttttgacgcacgccgcaaggtaattctgcacattatacaccggtacaataatagaaaatcgcggcataacgttctccttctctatgccttccccaagggggaagcctttataagtttccacccatccagatacagcgcactatccttggtgtgcgcataccagcggtcgggcgcccagatctgcttgtcgggggcgggggccagatactgtgcccaccagctgtaggtggagttgctcaccacaaagccgcggcagagctgcataagcgcaaggtcggcagcggcctcgccccggggcagaaagacggcgggcagaccggaggtggtcaggtttgcctgcgcccattcaatgtcgtccgaaaagacgaagagcgtggcatcggggtgcgctgccttgacggcggcgatggcgcgggcatagtacgccggggtgcagacctgcaggatggcgttctcaggcttttggtagtcgccgcgccgcaggtgtacgcagaccggccagacggcggcgcgcagcttgtccgcatatgcccccgccgggggcgttttgcagcgcagctcggcttttataacatcggcaaaatcggcaaaatagcgctcgctctggaaatatccccatgccagaaaatcccgggcgtgtccccgccgtaccggcgtgtagccgtcggtggcaaagtgcaggcccagcgtgttgagcagcggtgcggcggcggcttcaaagccgtgccagtcccgcgccagcaggccgcggcgctgctcgtatttgatcatcagcgccttggcggcgttctgccggggcagatgcgacttggcaaagcccgaatcggccagaatttccacctcggggctgatgttcagcgcccccagcgcacagaccgtgtgggcgggcgcaccgtcccgccagtcctgccggtccagcagggtcacgccctcgccgcagcgcaggcccagcgcccgggcaaaggcgtagatgaacatctggttgccgagtcccccggccagctctgcgtagatcatggctgccctcccagcttatcatagagctgctccatgcggcgggcagcggtctttagctcatacccggcggcggcaagggtaggccagtggtcggcatggtcaccgcccacagcaatttcatcagccttggccgcccacttggtcaggggggcggccagcggcagaaagtgtaccagctcggtcaccgagccgtcatccggcacattggtggaggccagacacggcacgccgcagccctgcgcctccacaagggtgacggggctgccctcaaaattgctgggcagcaaaaacaggtcgaaggcgttcataaaggcgggcacatcgctctgcacgcccgcaaagatgacccggtcggtcaggctgtggcgggcggcggctgcgcgcaggtccggctccatctcgccggtgccgaccagcagcagccgccagcgggggtcctgcgcggccatggcggcaaagacctccatcaggaacagggggttcttctggtggttgagccgcccgacaaagccggccagccggtcggtatcggcgatgccgtatgcgcgccgggtggcggcgcgggcggcggcatcggggtggaaccgctgttgatctaccgcgttgcaggcaacggaaaagttcggcttttcgtcaatatggctgccaaagacaaaccggccggcggccacgccgcagccgaggaagtaatcggcaaacagctggtagaccagatgtgccgcccgccatgtcagcgtaagcggcgggtagacgatgtggctgtgtacgatgatccgcgcacgggggcagagcaggcgcatcatgccgcagaccggcgcgccgattttgctggccgtgtggtagtggatgatgtcgtaatcgtggtgggtgcgcaggtgggcggccagcgcccggatgcggtcctttttatggtcgggcacggcaatgatgtgtacgccgtgcgcctccagtgccggggcggtactggtctggtcgggcgggcaggcaccgacaaacaggtcgatctgataacggtctgtgtcaaggttgagcaggagattctgcacataccgctggacgccgctctgcacgccgaggtggttgctgatcattaagatacgcataaagttctccgattaccagtagcttccgccttccactttttccttgtttgtgatgccctcgctctcatcggggcggacccaagcgggattgtagagcttggaaatgacagggtggtcatcccaccgccggcccttgatgccgaaaagtagttgtgtcgcgccgctcatctggatggcggcatggccggtgtcccgcgcgtgggcggccagcggcaggccgtaggcacccgcgccgatgatcgcaacatcgtagtcggcggcgtccatccgggcctgcatggcgtccagcgcatcgaaccagctgtcgtagccggtgtcctgcccggcaagaccctgcacggcctgaatgaccgtcagcgaggcaaactccggcaggatgtccctgccggggaaaagctgcgcgcgcttttcatactgggagaggatcgtcttgcggaagggatgcacgaccagcacccgcttgcccgcgagcgcggcgctccacgggcgggcgtggtagtagggctccagcgcgcgcagctcggtaaagcgggtggcatcgcagccgcgtatgacctcccgctcggcccctacattccagagcgcgagcagctcggcgctctgggcggtgcggatatagagcctgcagaaccgctccagtgcggcgtcatccgtcgggaaaacgcccgaaaggttgcggatgtcggcgcgggtgcggtcggcaaacgggcggccgccgttgtgcaggtagtcggcggcggtgcgcatctcggtcgcgccgcagcggccaaacaggaagggctggccgctttccagcagatcgcgcgcaaggtcattgccggccccggcagacaggataggcacgccgcggtatttcattttaaagcgcaggccgcggtaaaggtcggcggccttttgcaccagcaggttatcgttatccatgggcggctccctttttgggcagcagggtcagcgccagctcggcgctgttctgccacagaaaatgctcgttcacacgggtctgggcggcatggcccatggcggcatcggccttgttcagtgcggcggccatctcggccactgtgctgcagagcagaccgctgacgccgttctcgatgataaggtcggggccgggggcgtggcgggccaccggcgggcagcccgcgtacattgcctcaagcaggctcatgccgaagatctccttctcgttgaggttcacaaaggcatcgcaggcgtggtagtagatgtgtacctgctcgttgggcagctgggcgatcaggcggcagcgggaggcgaggccggcctcctccagctgtctggtcagctcgccgctcagcgcgccctgaccgatgatgacggcgtaccagtccggcgcggcctgcagcagcggcacaaggtcgagcggctgcttgtaggcatcaagccgccccacaaaggcaagcacccgggcctgctcgtcgatcttgagggcgcggcggatctccgccttgctgccggggaccgccgggatgatggcggtgtccagccccacgggcatcagcccggcgcagggcacgccgaggctttccagctcggccgctacggcgggggtcttggcgtaggtcggcgttttgcggtataccgcaaggttgcggccgagcagcaggtccatgacgcggcgcacaacggcattgtcggaggtgcttttcagtgcgccgagctggctgtaaaacaggatgccgtgcttttggcagaaccggtacagccccggcacgccgagggagttgtcccccatgacatgcacggcgtccgcctgctcatcaagcaggatctgccagcttttatagaacgcctgcacgccgaaggcggcggcgggcatgtagcagatcttgacattcggctccggcgtttcgatgcggggggccttggcgcccggctccgggtagaggacaacggcgcggcagcccagcgcggcaaaggcgcgggcgaggccgacctcctgccggttgtacagcccgcgctggccggacgggccgcggtaaaattgcgggatgacgatggttttcatgaggataggtgtacctctttagggaaaaaagcagacagcgccccgcagcgggggcgttacggggcggtatccccgggggccgcctcgtccgccggggcgggcttggcggccttctcgattttgggcaggcgggtcagataccgcgcgtcaaggatctccagccggtcatcgcggcagtaggtgtgtacgccgatgaggtccgccggagcaatgccggtgatggtgacattctggggcgtggcggcgcacagcgggatctcggagctgccgcgccgggccagaaactgcagatagaggccgtagtccacggtcgagctgacctgcgtggggtggataatctgctcccccagcacaaagagcgggcctgcgttgcggctgagcagatcaaagtcgcggtgctgcaggttgtaggcctcatcgggtacaagctcaaacgggccctgcggcggcagggcggccgactcctgcacggcatggcgcagggtatagcggcggtagcggacatagagttggttgtcgggctttgtctcgctgcacaggatggtcagcgcctcggcgcggcggtccagcagaatggcatcgcaaagctcctcatcggtcgcaaagcgctgcacaagctcccacccggtgggaaacgcccggcagcggtagagccgcaggctgtggtcgctgccggtctcaggcagcatccagatctcaccgttccagtcaaagacagtcgggaacgagaggtggaagtcctcctccagcgcgggctgccagccgtcgatcgtgccgtcctcatgcagctcgcagacctcgatgcggcccttgccggtagaaaggtccatcgcctcggcaaaaagccagcgccggccgccgcggcggtagagcagcgggtcggcaaaccaccagccctcgcgcccgggcaggggggtgtaggccccgccgtccagcgcgggcagcggctcggtcccctcggctgtggggcgggggcgcacggcgatggtgtagacttccttttcgcccaaaagcttgcgcagcagccgtctgggcggcatctgcagggcgcggtaaaactggttcatagcgattcctcggcggcgcggcggccgtataatttcatcagagttctgtagttttcttcctcgctgaagcggcggcgggtggcggcggcaatggccgcgcagtcaaactgcatggcccgcagggcgcgcacggcccccgccagcgcggcggcatcgcccggcgcaaagcaaagcccgtcaaacccggggcgcaccgaggcccccacattgccgatccggctggccagcaccggcgtgccgagggcgtgggtctcggccgggacaagggcaaagctctcatagcagaggcttgcggcaatgacggcatagcttgcaccgatcagacggtgcagctccgcacgctcaagctggccgagaaaccggacccggggcagcgcctgtgcgcgcgcccagtcggccagcgggccatccccggcgatgagcagctcgggcgcggtgtcgcccagcagacgccacgcctcgatgacggtgcgcagccccttgagctcctccagccggccggcaaagacgaagcggcggtcgcgctcctcccacgggatgaccggcccggcgggcacgctgacggggttcggcttgacaacaagacgattttcgtcaaaggtagggcgcagcctgttgaaggccagcagcttttcgcggtcaaactcggtcggggtcgtgacccagacaccgcgccagctgcccagcgcccggtgcagccggtaggacgcggcgaccacaagggtctgcgccagactgccgcggtagcagcggtgctgcagtgcgcagtgcaggccgcggcgggggcaatcctcgcagacggcgccgtcccgcagcaggatgccgttggggcagaacagccggaaattgtgcagcgtctgcacgaccggcacgccgcagcgcttggcggcgcggaccacggcggggctgagcagcaggagcgtgttgtggatatgcacggcctcgaccccctcccgccggatgaggtcgcggacctcgcgggcagcgcggcggttccagactgcgtgcagcggcagcagcgctttggcaaggccgtgggcagcctcctcattgctgcgctcatacaccagcacggtgtggccgcggcgctcaagcagggcgcgctccgccgcaaagacggcgtcctcgccgccgggcagccggtaatgacagtgtatcagcagaattttcaagccgcggcctccttgggtgtaaaattaacctattttattattatacctttttttgcagtagggtgcaagatggcaaaagccgcgcccaaaataaggcggcaataaaaaaagaggaacgcagcttgcgttcctcaaggggtcagtcctcatcgtggctgtcgagctgggcatcacgcatcgccttgatcttcgcctcaaggtcgaagctcttgttcagggcggggtagatggccagcaggctcagcgagcaaggcagccagaggcttgtcaggatcagcacagcaccggacagcggccagaacagcgcgatggcggcccagtaaagaccctgccacaggatgcccagcgcgctgcggggcagataccccaaaaagagcatcagagagttcttgagcagggcggaaaacggcagatcgaccagcgcgacctgcgcgtagaggtactgcgcgatgcccgccagcaggatcagtgcgacaaagatcgccaccgtgacggcaacgctgccggtctcggtatggaatgcggtgaagatctccattgccagcagcaggccgcagatggcgccgggcagcagcgcggccttggcgttgcgcttccatgcgcggcggtaggtcacccaccagtagcccggctcatcgcgcagggcgcgcaggacagtgtcgttgaggcccacgatctgcggggcggccagcatgccgcccagaatgccggccagcagcatcgggatcagcgagtgggtcgtgacggcaaaccacagccccagcgcaaagggcaggctgctgatcatggcgagcagacccgccatccagaaggtggaaaaatcgcgggccagcacctcaaaatagcgggcggcaccctttttgcggggggcgttgggcgaaatacccgggcccggtttgtcaaaattctgatgaaaaagtcccatgacggtgttctcctgattctataaattttgtatgtattttgccttgccacatatgtaggggcggggctttgctccgcccgccaactttgcccatacagcatctttccgggaaagctgctcacccggaaagatgccccgggcggagcagagccccgcccctactgcatttttcagatgccacgcctaacccttcggcccatacatcgccgcaccactcgttatcagcacatccggctccacgcgcaggccggtgcggcggcccttttgcgcctcgacaaggaagagccacggtgcgccgtttggccggtttttgacaaaggccagccgcttcggctcaaggcgggcggcgcgcagggcggctaagatctcggccagctgctcggggcgctggcacagcacaaagcggccgccgtcccgcagggcgcggcgggcgcagtccacggcatcggcggtggtgcagctgtcggtatggcgggcctcggcccggcgcgggtcggggctgcggggccccgctgcaaaatacggcgggttgcaggcggcaaaatcatactgcccctgctccggcccggcggtgcagaactgccgcaggtcggcgcagagcggcgtgatatggtcggcctcgttgtcggcggcggcctgcgcgcagagggcggaggccgccgcgtccagctcaagcgccgtgcaggggccgcggtggccggcatcgtgccacagcagcgagatgatgccgcagccgctgcacatatcgagcgcgcgctccccgcggcggggcagggcaaagcggcccagcagcagcgcatcggtgccgaaggtcgcgcccggcgcggtcagcacgcgggtgccgtggtccagtatctcaacgcccattcaggctttgccgcgcagctgcgcatatttcagcagggccacctgggtcttgctgtccttgatggtgccgtccatcacaaggccgagcgccttgtcaaacggcattttgacgacatcgaggaactccccggcatcaagatgctggcggacctcatgcaggccggtggcggcccacaggtagatcttctcgctgtcatagccgacggttgcgtagacgatgcccagatcgacaaagcggtcggcggtcaggccgcactcctcgctcagctcgcgcttggcggcctcaaacgggtcctcgccggcctccagcttgccggcgggcagctcccagatctcctccccaaaggcatagcggaactggcgtaccagcgtaatattgccgtctgcatcaacgggcaggatgcaggccccgccgtggtgatggacgatctcacgggtggaggtggagccgtcctccagctgcaccttgtcaacggtgacgcggatgacgcggccgttgaagatctccttgctttccagcatggtctcggtatgtgccatggcgttttctccttttacaaacgggtgatacacaagaccattttacagcagccgcagacaataatcaataaagtcgagggtatattttttgctgcgcacccgctccccggcgcggcacaggtccagatagccgagcatcgcatcggtcaggacggggtcgtccagcagatattcgcggcagaacggctcatcgggggcggctgaggcctggcagaaaacgatgccgccgccctgaaagacattcacgctcatggcgggggagaggggcagctgggtggtatctacgatgcgcagcgtctgccggtcggctgcaacggcctgccgcagccgctgcagcagcctgcggcgcaccccgggcgcaggcgggtcgtagagtgccgggggcaggtcgaacagcaggccattgcgcacgaactgcaggatgccctcctcacagaaaaagatgtccggtgtctgctggttccagcttgccagatagtcgagcatcgagggcagcggctcccgtaggtcatcgtcaaggcgcaggacctgcagtgccatctccttgtcggcaaacagggtaaagggcggctggtagcgaatcatgctgcaccgcttgcggcgtgcaaacaggccgctgtacagcgccatagactcgagaaaatcatgcttatcgctggtcagccgcagcgtggaggaggtgtcaaaatactggcggctgaacgaaaggcgcaggctttcgaccgccttgcggtcggtgatgagcagcgccttttgcccaaggcggtccatcaggagtgcgctctccggcaggagcaggtagaccggcatcagggtgccggggatcggctcaccggtgatgcagggggctatgtgggcgtcataccgcatcttgggcagaaaaagtagcggcagcgtatgggtaagtgtggcaatgtcggaggcaaggtgacgcggtatctcacggtcctgcgcaaaaagcagaagctgcgcaacggtggcgggttctccgtccgccaccgagaagcgctcgatcagggcgttgtccagcacgggattggtgaagggggagagcagcagcggccgggcatcgcccgctgcaaggtggcgggcgatcagggccccggccagtgcgcccacggcgcgcggcccctcgacatagcggtcggtgcaggaaatctccgaaaaggcggtgttgggggctacgccctcatggcggatagactcctgcacggtgcaggccgtggtcagcagcttgtgcagctcggtgcggatgcgtgggtcggtggagcggccgcgctgcttgtactgcagcagcagggtgtccttttgctcgtcattcagcgcaagggcctcggccaggcgctcaagctgctcctgccggggtgtgcgctggccgttgatgatcttgtacagggtggaacggtcgatggcggtgcggcgcgccagctcggccatcgtgccgggatagcgggtaacagcgatctggaggctttgcgtcagttcactcatgagaaaccctcttgaattgtagcaggtgcggtaaagccgatgaaaagaccggcgtgtactttgaccccctgcggagtgggtcataaataagtatactataccgcgaaaacggcgcggtggcaagtgtgaacttttttgtcaaagcgttgcggtgcaggcgggaatttgctataatcggaacaaatacagcaatggaaactgaggtgatccccccatgaaaaagcatcccctgctcaaggcggccgcagcagccggtgcagcggtgctgggcgctgcctacggtgtctaccgcgtgggcttttacaataagcccaccacgcaggtaccctccccggcggacatgcccacccgtgagtgctaccgcaaggcgatggggcctgatgccgatgcgctggcgcgcgaccggtttgagccggtgcatatcacggcgcaggacggcaccccgctggcggcgcggtactaccaccatgccgacggtgcgccgctggccatcatcttccacggataccgcggctatgccacgcgggacgggctgggcggctacacgctctgcacggcgctgggctacaatgtgctgctgcccgaccagcgcgcccacggctacagcggtgggcacaccattacgatgggcgtcaaagagcgctacgatgcccgggactgggccgtctgggcgcgcagtcatttcgggccggaggtgccgattttcctgatgggtgtctcgatgggggcggccactgtggtgctggcggccgggctgagcctgccggacaatgtgtgcggcgttgtagcggactgcggctataccagcccgcgggagatcacccgcaaatgtctgccggaatacctgcccggtatgccggtcgggctgacctacgccatcgggcggctgggggcgatcctgttcggccgctttgaccccgaggacgccgactgcaccgccgctgccgcgcagagcaaggtgccgatcttttttgtccacggcgatgcggacggctttgtgccctatgagatggggcggcgcaactatgcggcctgccgtgcaaggggcagccgcttcctgactgtacacggtgccgagcatgcggtgagctactaccacgacaacgccgcctacacggcgcaggtcaccgactttttacaggattgcctgacccggcgcggctttgtctggccgcccgaggctgacaaggataaacaagcacaaggataaacaagcataagaggagtgtataaggttatgaaacgaattgcaacaaagaacgccccggccgccctcggcccgtatgctcaggcggtggataccggcacaacggtctactgcagcggtcagctcggccttgaccccgcgaccggcgcactggcggagggtgtgcaggcccagacccatcaggccctgaagaacctgcaggccgtgctgggcgaggcaggtctgacgctggacagcgttgtcaagacaacggtgttcgtgcaggatctgggggatttcggcgcggtcaacgaggtctacggcagctatttccacggcggcttccccgcgcgcagctgcgtgcagatcgccgccctgccgaaaaacgcccttgtggagatcgagtgcatcgcggtgcggtaaaaacgcattgtaggggcggattccatatccgcccgggaacatttccgccgccgcgaacggcgcgggcgcatatagaatgcgcccctacggcgtgacccatgttgtgagcgccggccgcaaagcgcagcggaggggtcaagacccctccctacagaaacagataaccggcaggccgttggatcgaacggtctgccggtttcgtttatttcccgtagcttgccaaaaattggcgggtgcgttcctctttggggtggtcgatgagatcctttgcgctgccctgctctaccacaacgccgccgtccataaaaaggatgcggtccgccacatcgcgggcaaacttcatctcatgggtgacgatgatcatggtggtgcggtgcgcggcaagctcccgcaggacgcgcagcacctcaccggtcagctcggggtcaagggccgaggtcggctcatcaaagcagaggatgtcggggtgcagcgccaaggcgcgggcgatggccacgcgctgctgctgcccgcccgaaagctggtgcgggtagtggttctcccggtcggagaggcccatctgcgccagcagcacacgcgcctgctcctcgatctcggccaaaatctgccgcttgttctgcttgtaatccgggcgttccttcgccaaaagctgccccgccagcatcacattttgcagcgcggtgtactgggggaacaggttgaagttctggaacaccagaccgaaatgcagccgctttttgcggatggcctcctcgctctgggtgcgggtgtcggcggcgctccacagcgtttcgcccgcgacggtgatcgagccggtgtcggccgtctcgagaaagttcaggcagcgcagcagcgtggtcttgcctgagccggaggagccgatgatcgccagcgcctccccctcggccagatcaaaggagatgccgcgcagcacgcttgtggcaccaaagcttttgccgatgccgtttacttccaacaatgccatgactgcacccccttatcggaaatagtccagccgcttttccagccagccgaacagcagcgtcagcgcacccacaaacacaaggaagaacaccgctgtggagaacagcggccagatcaggcccttggcgctgtattccttcgccatcatgatgatgtctttgttggcaatgacattcgcaagtgaggtgtccttgacgagggtgatgatctcgttgcccatcggcggcagaatccgcttgatgacctgcagcagcgtgacgcggaaaaagatctgggtccgggtcatgcccagcacctgcccggcctcggtctggcccttgggcacagcctcgatgccgccgcggtagatctcggaaaaatagcaggcgtagttgatggcaaaggccaccacagccgccaccagacggccgctgccgcccgatggccacgggctggcaaagcccatcaggccggggccaagataaatgacaaggatctgcagcatcagcggcgtgccgcgtatgatccagacaaaggttttgactgcgccgcgcagcggggcaagcctgctcatggagccgaacgacaccaccagccccagtggcagtgcgaacagtaaggtaaggccgaacagctggcagttgagccagaaggcttcggtcaggcggccccagatgacaactgcctcgcccatcagtcggccagcgtcaggctgtatttgtcggccagggcctgcatcgtgccgtctgccttcagctcgtcaaaggcggcgttcacggcctcggcggcatcgctgcccttgcggaaggcaacgccgtattcctcggcgttcagctcgtccttgatggcaaggttcgcgtagtcggtgccctcgccaatcatggcagtggccagcgtcaggtccagcacagcggcatcggcggtgccggcggcaacctccatcaggcagtcggtctgcacgctcttgctgatgtactctgcctgcgacaggcctgcgtcctcgctgatggcggtctcaccggcggagccggcctcggccacaacggtcttgcccgccagatcggcggtggaggcgtaggcggcatcggccttcatcacaacgacctgcgcgttcttggcgtagggcttggtgcaggcggcgttggccatgatgtcatcggtcagggtcatgccgttccagatgcagtcgatgctcttggcgtccagctcaacgaccttggtgtcccagttgatctcgacaaaatcaggctcaacgccgagcttggcgcagacggcggtggcaagctcggtgtcaaagccggtaaagttaccgtcggcatcggtgtagttcatcggctcatagacggtgtagccgatggtcattttgcccttgccctgaatgtaggcaaggtcggtgtcggcagctgcggcgctttcggtcgaaacggcgtccgccgtgctggcgggggtcgcggcggcgctgctgccgcagccggccagaccggccgccatgccaagtgccagaacggtgctgataagctttttcatgataactcctcctatactttgcacaaatccctcacactgctgatttaaagcggcggtgttctttaatagtaatgcaaaaccgcaggttatgcaagaggtttgggcaatttttgcagaaaaaagaatatttatgcaggggtgggggcgagaggctgcggcttgacaaagagactgcacagcgttataataaacatagaaaaaggcactgcgacaagcggttggtctctttccaatgaaagttcttatttatcacctaagaaccgtcacttggcagagtggcggttcttttttgtaactgc

SEQ ID NO: 14054 - DNA, 4127 bp, Unknown
  gut microbiota DNA sequence
caagagggctgaccacacaaattttgcggtctttggggcaaataagcctaaagccttccccttcgggggaaggtggccccgcagggccggatgaggggcaagtctgcgcaagcgctcataagcgggtgtcataagcaagtaccgccctcatcagtcagcgggcggggccgctgacagcttccccctcgggggaagcctctctgccccagaaccgttccaactccgctgccagcgcctgcgccgagtccacggttttcagatgctcccagtgcggcggcatcagccggcgggtatcgggcgcggcaaagcggtcgtcaatgagcaggacaacaccccggtcctgcggtgtgcggatgacccgcccggcagcctgcaggaccttgttcatgccgggatagcggtaggcgtagtcaaagccggtgccgcgggtcttttcaaaatagtcccgcagctgctcctgccgtgggccgatctgcggcaggccggggctgacgatagccgcgccgatcaggctctcccctgtcaggtccacaccctcaccgaatacgccgcccagcacggcaaagcccagcagcgcatcctcgccctgctctctaaagcgttccagaaacgctgcacgctgtgcttcgtccatggcgctctcctgactgagggtcggcatatcgggatagcgggctgtgaaatcctcccgcacctgctgcagatagctgtagctggggaaaaacgccagataatgcccgcgccgcgcccccgccatgaccgccagcagatcggacactccggcaatgctgtcctcccggtccttgtagcgggtgctgacatgacgcgcacaccacagccccagattgccggggtcaaacgggctgcgcagtgccacagcccgggcgtccggcaggccgcagagatctttatagtagccagccggggccagcgtggcactgaacagcaccgcggcgcgccccttggcaaaatctgccgccaaaaaatcgcttgggtccagacagagcatggcggcgcggacctcactgccgtgtgcggacacctgcagcacaaagtggtcgtcaaaggtgtctgccacacgcagccatgcccggatgtcaaagtagagctgcagcagcgcctcatgcgtttcatccgggtcacgatgctcatcgagccagatttccagcggctcacagagcttcgtgagggcgcggtccagtgcttctgcccggttttcttcaaaaaaggttctgccaaagcggctgtcgccgggcgtttcctcacagcggtgccgccactcgataaagagattgttgaccttcgtcagggcgtttttcaggctgcttttccccttgccgagcctctttttggcatcgtagaaggcgctttttgtcagcgccgcgctgtgcatatcgcgggcgcggccgggcaggttgtgcgcctcatccagcaggaagatataatcgcccgccgtatcaaaaaagcggacgagatgcacgaccgggtcaaacaggtagttgtaatcgcccacgaccacatcacaccagaggctcaggtccagccccagctcaaacgggcataccttgtggcggcgggccagcgcctgcagagcctcggcagtcagggcgtgggtgtccagaccatcccacagtgcctgttttactcggtcatagtagccgttggcataggggcacgcctccggcgtacactcacgatgctcctgcaggcagatcttatccttggcggtcagggtgacgctgcgcagcttgagtgccgggtcggctgtgcgcagcagcgcgagggcgttttctgccgctgcccgggtcgtgccgcgcgcagtcaggtagaacaccggcccgccctgtcccaccgccttcagcgccgggaaaagcacactcatcgtcttgccgatgccggtgggggcctgacagagcaggtgcccgccctcggtacaggtcttgtacaccgcgccgatcatagcccgctgcccgggccggtagctgtcaaaaggaaagcggagcgcagccagcgaggcccggctcagctgctgccattcggcggcgcgcttggcccagggggcataccgggtcagcaggtcggtgacaatggcgtccaaggcgtccgctgtatagtcgtggctaaagcgaaattccagctcctcatccacctgatagtaggtcagccgcacccgcatggcggaaagcccctgctgcgcggcatagagggccgcataggtttgtgcctgtgcccaatgctccgggctttgctcgccggtgataagctccggcggcagcgttgtggtcttgatctcgtcaatcgttgtcatgccgtccgtgtcggtaaagatgccgtcggcacgcccctcaagcgtgtagcaaacaccggcacagctgcgctgctgcctgagggcgacctccgcctgatagtcagggaattccttgacagcggcccgctgcagcttgcggtgcaggcgcgcgccctcaagggcacggtcaaagccggtaaagcggctgtcgatgctgccggtgcgcaataaaaattccaccagacgccgtatgggcagcgtcagtgccagtgtctcaggctccatgctgctttcctccttgcatcgggtggtatactggttttaataggtgtgctcacagacctgcgtgatcttttcccgcaggctgacaaaatcgccgaacactgcaggcttgttgaccggatagcgcagcagcgccgcagggtggtaggttgccataaatagggtgccctgcttttcgtaaaatctgccgtgatcgcgggagattgaaaaggccgggtccatcatctgctgtgcagccacgcgacccagacacacaacgatcttggggcgtatcagctggaactgctggcgcagccacggcatacaggcggcagattcctccggcagcgggtcacggttctgcggcgggcggcattttataatgttggcgatatagacatttttctcccggctcaggtcaactgcctccagataatggtcgagcagctggccgctgcgccctacaaagggctgaccctgctcgtcctcactggcgccggggccttcccccacaaacataacctctgcggtgggaacgccctgcccgaacacgacatgagtgcgggtgtcgcacaatgcgcagcggcggcagttcagacattcattctgcaatgcttgcaaatccatctataacacctcacggttaaacggcgcagtgtgcgcctatactgtataaaaacgaagaggggggcttggcagtgagctggggatatggggtatttttgcggttgctctgccttgcggcggggtatctgttcggctgttttctcacggccgaggtggtggcacgctgcacagccggggaaagcgcacgccagattggcagcggaaatccgggtatggccaacatcatgacccatttgggtaagcgcgccggtctgctggtgctggccggcgatgtgctgaaaaccgccgctgcctgctggttctgctggcagcttgcaccggagctgcacctcacggccctgctgtacggcgggttcggtgcggtgctggggcacaactggcccttctggaaccacgggcacggcggcaagggcgtggccgttacctgtgcatggctgatgctgtatctgcccgtcaccggggtgctgtgctgccttgcgggcggcattgcggtgctgctgaccggttacctgccgctgggtgccgtattgattgcggcgctggccgtgccggtaggctggctgcagtacggcggcgaggccggcgcgatcctgctgctcagcgctgctatcatgctagcccggcattggtcgggccttgtgcgggtgtaccgaggcgaggagccgcagtttttccgcccaaagcactgatactatcataccaccccctgtgccgaattgcaacgccggagaaaaaacagcgaagaaaagcatcttttgcaaatgccgcgaagaaagcggaaacaaatgcaaaaactttcaaaaaaagtgttgacatttgttacgcaagccgctataatagacagcgttgcagctgccacggcagcgcacaaagctgggtatggcccggtagttcagttggttagaacgctagcctgtcacgctagaggtcgtcagttcgagcctgattcggg

SEQ ID NO: 14055 - DNA, 14478 bp, Unknown
  gut microbiota DNA sequence
cgcgccggagggtacgcctatcttggccgcccacagcggtacggtaatcatttccggctggaacaatagctatggcaaccaggttctgttggataacggcgcgggcctgtctacgcggtatgcccacatgactgccgctgctgtttcagcgggtgaaaccgtcacggcggggcaagtaattggctatgttggcaacaccggcgacagcaccggtttccacctgcattttgaggtaatgcaaaacggcgtgcgcgtgaacccactggatgcagttactccgcaatgatggcgaacactttttcacaaaatgtcaaaaatatggttgcagtccagattataggatgcgcaagcgtgtataatagagacagcgcccccagcataaagataaaaattgcctgaaaggaacttctctatgtcattcaaaatgaaacgaaccatcgaaatgcgacgtgtagaaagtgcgtttgctgactacttggaaaacgagggcagtgttgacctcctctggtctgataaggttggctatgtatttcttaccatcaatgagaaaacccacgaatctgaaagctgcgatgatttacataccgcaacacagctttgccaccgactgctggatgatatggccatcaccgtgctgatgcagacaaagcgcaaccacaacttttctactatggatgaggacgaagctgcacgagtgcgggccgcttggaagcctgtaatcgaaaaactgccggactatgcttatctctgcgatgaaattctccgcgaagcacaagaaaatgaggaggaaaacgacattgatttacagtgaagccgaaaggaaagaaatcgagcgcgtgtacggcgttttcaaggattatattcacgcaagcaaattcttggattttgtctggtctgaaaagctggggtatctgctgctgcatatcgacccaacaaaaaacaccatcgaggaggaccaaatcattgcttctgcggatgaattgtgtgccgaactattcaacgaagttgcaatggatgtttttcaagaagctaagagagaacacttttatcctgatgcagatgatgacgagattgcggagattcgcagacgttggcagccgtatctcgacttgcttcctgagtataggagttcatgcagagcatttcacacagcagaataagcgaaaagcagcctttagcatgatatgcccccctatatagttttcagtgctttatttcactgttcgctatatagggggcatatcattgcgcgggcttctatttgttttggaaatttggaattgtactttcttgccgaacagcagcagaaatatttgctgctgacacagccaatacatacgaagtgtagcaggctcttgttgagaacgatcttgaatcacgctatccatgacggaatcatttgacaaaaatcgccaaagtgtgctattatatgccgacttttagtttgcgagatcgtttcgcttataggaagtggacatcaaaatttcacttggtttgctttacgatattctgtcggggatgttccctctatgttgctaaatgtcttgcaaaagtagctggacgaagaaaagccgagaatgctggcaatctgagatggtgcaaggtcggtttcggccaataaccgctttccctcccggatgcggcagtcaatgatatagttgataggagagacaccatattcgcgcttaaaagcgtgtgccatgtgatatttgctgatactaaccttttcggcaagctcatccagcgtaagattttctttataatggtggtcgatatagcgctttacagttgcacactggcggttagcaggcagccgggaatgaattggaacagcggatacactggcatttcgcataagctgtaccacgataatatccatataagcctgacaaagtatctgaaaattggattcccgattctgcatttccgtaagaatctttctcatgcaggacagtacatcgttgtttccgtcaaacgtataaacgcaaaagctgccctcggcggcatcggaaatcgtaaattctaacccctcaatacccagcacaatgtattccagcgggtgggattccaagctgacctctgtatggataacattggggtttacaacaacaagctggtgtgcctgaacagggaataatttatcgttgatttgaaattgtcccgcaccatctacaatataaaataattcagcataactatgagaatgtggaatggagggccaatccccgctatactttgtggaagcaatattgcgtaatttcatcttatcgcggggcagggaatcatcagtctgattaaaggagtagttaatatggctcattggggtcacacttcctattttgtagtatattgtcattatattgcacgaggctgaaaagcgcaagacggtattcggcgtttttgtcaacaactaacatttgatgaaaaaagcaaatagtaaaaatgcacaacgattgcctacgaaaacccagcaatatgccgaaaagcggagaaatagcaagattgtaaaataggtgggcaagataataattgctaaaaagctggaaaagcactacacttaagtcaccgcgaaagggatgaaatcccgacatagaaattacacttaggaggaaaacacaaatgaagaagatcgttgcacttttgatggcttctgctatggcagcttcgctggctgcttgtggcggcaacgcccagagttcggaagctgcttctactgctcccgcagagtctacggctgccgagtctacgtccaccaacggtaaaaagtacgagggcgttgagttgactatgtggtctatgtggtctgccggtgaggttcaggcaaatgcaattcaggccgccgctgacgctttcgaggctgaaactggcgcacacgtcaacatcgagtggaaaggccgcgatgtcaacaccctgatttctgccgcgctggaatctggcgaaaaactggacatcttcgaggatgattacaaccgtatcggccacgcttacgctccctacacctacgacctgaccgagatggcagacgctgtcggttatgatgacttcagctacgcttgctttaacgatcagtccaaagaatgggctggctacctgaactccatcgtagagcagccccagattggcggtatcttctacaacaaggacgctttcgatgcctgtggcattaccgacacccccaagacttgggatgagttcctgactgtctgccagaccctgaaagacaacggctatgagccgctggcgctggacggtgcttacgcaaacttcaacttctacaaccatctggttcgtcatctgggtgaggacgccattgctgaactgggcaagaacggcggctgggctgataatgaagctgctgtggcggctgcgcaggaaatcattgatttcgtgaacgctggttatctggccgaaggcgcacctgatgcctaccccgccagccagaccaaggttggccttggcacggctgctatggttgtttgcgcaaactatgtcacttctgaggttgacgctgcggttggtgagcctgtaaactggggcttcttcaactatcccgaagtcgagggcaatgttgatgcttctgcttacgccggtgcaaactctctggccatctcctctaactgcgagaacccgcaggctgcatttgacttcattatgaccatcgttaccggcacttgcggtcaggaactggttgacaacggcggccagattcccgctgacacccgcctgaaggagtctgttctggctggctctgttgagaccctgaagaacaccaccactccgatgagctggtgcggtgcgttgaacacgctggacggctggtcctccatcaagagttccatgattgagctgttcgaaggcaagtacgcaaccggcgctgactactgcgcttacttggataccctgtgcggctaatcctataataaatcacggtacgccgtcaagcggtgcggctgtaatggatttattcaggattccctcaatctgaacagaggcggcacctgaatgggggccgcctttgcttatgacatttcatttttgaggtattaccagtatgaaaaagaacaagacaatgattttcctattcattctgcccaccgttctttgcctgttgttcatgtatgtctatccggtcgttcggacagttatcatgagtttctttaaggtagagagccttacggcatctacaagcacatggagcttctatgggctgcaaaactatttcaaaatcctgcgcaatgccggttttatcagttccataaaaaacatggtgatgatttggctggtaggcggcatcattaccatgtgcctgtccatgttgatggccgtgattttgaccagtggcatccgcggcgcaaaattcttcaaggccgccatttatatgcccaatatcatcagcgccgtggcactggccaccatgtggattcagtatgtgttcaactatgattatggtctgctgaaccagatcgtcaaagcattcggcggcgagaatgtccgctggctgggtacggacctgattttctgggctatgatgattgctttcatttttggcagtgttggttactatatgctgattttcatcagcggcatcgaaggtatcccgcaggatttgtacgaagctgccactatcgacggcgcgaatatctttgaccgcttcttccagattacgctgcccctgctgaaaggcgtcatccgtacctgcgttactttctggagcatcaatgctaccacattcttcctgtggacgaagatgttctcccccattaacacggaaacggccaccattgtgcccgttgtgtacctgtacgatacggtgtttggcggcaagggcgttgtcgagcgcgatgctggtgcaggcgcagcgattggcgttgtgctgactttgattatcattgttgtgtacgttatcaccaacctgatcttgaaagactcggatctggagtattaaggtaggagagcagttatgggaaaatatcacgatagaatcaactggaagaaagagcttcagcttctgcccggttatatcattgtttgcgcgtgggtcgcgcttacggctgccatcctgttctggattgtctgcgccagcctttcctcaacaaaggaaattctgacgggccgtgttatggacttttccaatggcctgaagtgggataactacgtcacagcttggaacacccaaaatgtatcgctgtatttcttcaacagcttggtttatgctattgtttcctgtgtgggcgtattgcttatttccgcgcccggtgcttatgtgctttctcgctggaagtttgtcggcggtaaggccatccgtatcggcttggtcattgccatgagtgttcccaccattatgatcatcatgcctctctactctttggctgtgcagtggggcatcaaggggcgcgtgctgttggttgtgctgtacattatgctgcgcgtaccgtataccacgatttacctactggatttcttctcctcactgtcccggtcttatgaggaggcggcctacattgacggatgcagccattctcggacgttctggcagattatgctgccgctggttcagcccgccattattacggttacgattttcaacttcatgtctgtgtggaacgagttcttcatggcgttgattttcactaccagtgattctatgacccctgttggtgtcggtttgttgcagattgtcaacgcaatgaaatattccggccagtacggtgctatgtttgccgcagttatcattgtgttcatgcctactttcctgctgtatcttttcctgtctgaaaagattattgtcggtgctaccagtggcggcgttaagggctgatttgactttcctccattcaaaatattacgtttcaaggagaatccttatatgaatgatgtaagaaaaatgggccgcgtgacgattcccactgatacggacgcagtgtctgaaaccctcgacctgttgaagcgctggggcgcggatgccatccgcgactgcgatggcactgagttcccgcaggagctaaaggacaccggcgcaaagatttacgccacctattacactacccgtaaggacaacgcatgggcaaaggccaaccccgacgaaacccagcagtgctacattatgacgccgttctacaccgctgaaggcggtgcgctgaccatccccctgatgacgggcatcagccgtgaactgatgaaagtcaacgaccatgacgatattgcccgctggtgggaggtcatggaccgcacgacgggcgagcctgtccccaccgccgactggcactatgatgccgcccgcgaaagcgttgtcatcgacccccccgccgcctaccacgagtacacggtcagctttttggcgtacctgatctgggaccccgtccacatgtacaactcggtcatcaatgactggaaggatgtcgaacaccagatcccgttcgatgtgcgccagcccaagacccacgcctacaccctgcgccgtctgcgcgagtatctggaaagccacccctatgtcaacgttgtgcgctttacgaccttcttccacctgtttacgctggtctttgacgagctgcgccgcgagaagtacgtggactggtacggctattcggcttctgtctgcccctatattttggaacagtttgagaaggaagtcggctacaagttccgcccggagttcatcatcgaccagggctactacaacaaccagtaccgtgtgccgagcaaggaatataaggatttccaggcattccagcgccgcgaggtcgccgggctgatgaaggaaatgaccgacatcgtccacgcctacggcaaggaagccatgatgttcctgggtgaccactggatcggctgtgagccgtttatgccggaatttcagcagtccggcgtggatgccattgtcggcagtgtcggcaacggcagcaccctgcgcctgatttccgacattcccggcgtcaagtacaccgagggtcgcttcctgccctacttcttccccgataccttccacgagggcggcgaccctgtgcgcgaagccaaggaaaactgggtcaccgcacgccgcgccatcctgcgcaagcccattgaccgcatcggctacggcggctatctgaaactggcctgcgagttcccggagttcctcgactatgtcgagagcgtctgcaacgagttccgcgaactgtacgagaacatcaagggcaccacgccctactgcgtcaagactgtggctgtgctgaacagctgggggcagcaacgcgcgtggggctgccacatggtccaccatgcgctgtaccagaagcagaattacagctatgcgggcgtgatcgaagcgttgtccggcgcaccgtttgatgtgaggtttatcagctttgacgatatcaaagccgacccgaaggtgctggacggcatcgacgtcctcatcaacgtcggcgacggcgacaccgcccacaccggcggcaaggtctgggaggacccggatgtttcctccgccgtcaagggctttgtccatcgcggcggcggtctgatcggtgtcggcgaacccggcggtcaccagtatcaggggcgctatttgcagctgtccgcaccgctcggcgtggagaaagaaaccggcttcacgcttaactacgacaagtacaactgggacgagcaccgtgaccactttattctgaccgactgccccgaccatgacgtggacttcggcgaggggaagaagagcatctttgcgctggaaggcaccgagattctgattcagcgcgacaaggaagtgcagatggccgcgcacgagtatggcaagggccgtggtgtttatatcagtggtctcccgtacagctttgtgaacaaccgcgtgctgtaccgagccatcctgtgggccgcccacgacgaggccgacctgcataaatggttcagcacgaactacaatgtcgaggttcatgcctacgtcaagaatggcaagtattgtgtggtaaataatacctatgagccgcaggacaccaccgtttataccggcgacggaagcagctttaccctgcacatggacgcaaacgagatcaaatggtataatctgtaaagcaggaaaaaggcgtgccgtactgtgcggcacgcctttggctgcaaaacattgatatgaggtttgttatggataaacgtcctaatattatcctgcttatggcagaccagatgcgcggcgattgccttggtattgccggacacccggatgtaaaaacaccgtttctcgatgcactggccgcagagggagtgcgctatgaaaacgcctattctgcctgtccaacctgtgttcccgcacgtgcctctctttacacaggtatgtcacaggaacacacgggccgcatcgggtatgaggatttagtgccgtggaactatacccacacgctggctggggaactgagcaaggcgggctattatacgcagtgcgtcggtaaaatgcacgtccacccgctgcgcaataatttgggattcaacgatatacggctgcatgatggctatctccatgcctaccgccgccccactacgcccagttatgaagaccagcgtgtggccgatgactattattggtggctcaagcagcagcttggtgtggatgcagaccccgtagatactggcttggactgcaacagttgggtggttcgtccgtggatttacgaagaaaagtaccatcccaccaactgggtcgccagcgagtgcagggattttctgcgccgccgtgaccgttctaaaccgttcttcttgatggccagcttcgtgcggccgcatccgccgctggacgccccggaatattatttgaatttgtacaaagataagtcgttggccgaaccttggcgcggcgactggaacgactgcgtccgctgggagcgcgacggtcacagttaccatgcccagactgcaccctcggatgaaagctatattcagcagctgcgggcgggctattatgctgccatcacccatattgaccatcaaatcggacgcttgatttccgcgctggtggaagaacagattatggataacactgtgattttgtttgtctctgaccacggtgaaatgctgggcgaccatttgatgttccagaaagcaaagccgttccaaggcagtatccatgtaccactgtttatctccgggccggagcgttacatcggaaagcgcggcacggttcgcacggacttggctgaactgcgggatgttatgcccacgctgctggaactggcaggagcaccgattcccgaaacggtggacggcatcagcctgttgcacccggtagaccgcgaatacctgcatggggaacacacgctgggtgaagattccatgcactttatcctgacaaaagaggataaatatatctggtactcgcagaccgggcgggaactgtacttcaacctgcgcgacgacccgcacgaaacaaaaaatgtactggacgaaaacccggagcgtgtggccgaactacgtgccctgctgattgactccctaaagaaccgtgaagaacaatacacagatggtcataccttgtttgtgggcaaaacgcccctgaccgtattgcagcacactgaggtgttatgaagcagcttcaatttctgataaaacccgcagccggattttgcaatatgcgctgccactattgcttctaccgggacgagcagcaaaaccgcagcacttccgaagattgcatgatgaccttgcagacagccgaaacattgatacggcgctgctttgcggaacttgagccgggcggctttgtttcgtttgcctttcagggcggagaaccaaccttagcagggctggatttctttcggttctttacgcagacagtgcgaaagtacaaccaaaagcgtgtgacggtgcagtacgccatccagacaaacggccttgccgttgccgaagaatgggcgagatttttccgcgaagaaaacttccttgttggtatcagcttagacggtacgccagatgtacatgatgctttgcgcccggatgcttctggcgacggaacatggacgagggtcatgcagacaatcaaactgctggagcagtatcatatcgagtgcaaccttttatgtgttgtcaccaagcgcctggctaaaaaggcggaacgtgtgtataagtctatgaaagcaacgggtgtgcgctatctccaattcatcccttgcttagaccccttgggcgagcagcggggaatcgaaaattactctctttcgccggaattgtatgcgcaatttttgtgcgccctgtttgacgcatggtatcgtgactggaaagctggtgtctatgtcagtgttcgcctgtttgaagattatatacaactgctcatgggcgcaccaacgggaacttgctccactaccggcgcgtgcggttcttacacggttgtggagggcagtggcgctgtttacccgtgcgatttttactgtttggacgagtacaaactcggaacgattcaaaatgactctttacaatcgttgcttttgggggagaaaatgcgcacctttataaaggatggctggaatgcccccgcagaatgtcagcaatgcagatgggtaaacctatgtcacggcggttgcaagcgtgaccgcaatacagcagacgaagcccaacgcagttattattgcaaggcgctacaaaagttttttgcctacgctgaaccccgaatgcgtgaaatggcccgtgcggtgcagatgtaccgctgaaaaggagacagattctattggacaagaaaaataaatattggcagttgttcctttctacctttaagctcagcgcgtgtacattcggaggcgggtttgtcattatacctctcatgcgggagcgctttgtgaaagagctgcagtggattgaggaggaagaaatgctggatctgacggccatagcccagtccagccccggctctatcgccatcaatgcctctattctggtgggttacaatgtggcaggaatccccggtgcattgattaccgtagttggtgcagcactgccgccgctggttatcatttccatcatttctgctttctaccaagcatttcgctccaacaagtatgtgagcatggctatgaccggtatgctggctggtgtggcggcggtcatctttgatgtggtcatcaatatggcatggcccattctgaaaaagaagcgcctgctgcccatcgctgtgatgctggcggctttcgtggcgactcgctttttctccgtgaacatcatcctgattattctggtctgcggtgtgattggtgcgttggatacgctgtatctgcaaaagaaggaggccgaggaatgatctatctggaactgttctggagtttctttcaagtcggcctgttcagcatcggcggcgggtatgcagccatgcctttaattcaagaccaagtcgtggatattcacccttggttgacaatgacggggtttgccgacattatggccattgctgaaatgactcccggccctatcgctcttaacgcggcaacctttgtgggaattcaggtggcagggctgccgggagcgctgattgccactatcggctgtatcttcccatcctgtgtcattgtgatgactttggcttatgtgtactaccgcttccgtggcttgagcattgtgcagggggttttggcagggctgcgccccgctgtgatcgctatgattgcctctgccggtatctcgttgatgattctggcactatacggccaacgtactcttccagcagatttgagcagctttgacttgatggcgctggtaattttccttgcaggctttttcgtcctgcgcaagtggaagcccagcccaatcaaggttatggcgggtgccgccgtggcaggtgttgtgctgtacagtatcacaacctgatacaaaaccgaaaggatgtatatgaaatgaacaagattttagccgcgtggcattgggatggcccagtgtcagaaccggttccttacggagagggtcatattaaccagacgtatgccattacggtaacgtcagagcagggggcaaaacgctatatcctgcaaaaaatcaataccaatacattcaaagacccagacggtttgatggaaaacatttgcggcgtaacggattttctgcgcgaaaaggccaaacagcgtggggctgacccagaacgtgccacgctccatgttgcgctgaccaaagctggaaagccctattataaggccgccgacggcggttgttggcgtgtctatgacttcgtggagaacaccgtctgcttgcagcaggtgcagtccgccgaagatttttatcaaagcgcggttgcttttggtaatttccaacaccagcttgccgactacccggcaaataccctgcatgagacaatcccgcacttccacgacacgcctaagcgcttcactgacttccagcgcgccgtggctgaggaccgcatgggtcgtgccgcacaggtgcagcgcgaaattgagtttgtccgcgcccgtgaagcggagtatcacgttatggtggatctgctgacagcggggaaactgccgttgcgcgtcacccacaacgacaccaagctgaacaatatcctgttcgacaaaacgaccggggaggggctatgtgttatcgacctcgacactgtcatgccggggctggccgcgaacgattttggcgattccatccgttttggcgctaaccactgcgccgaggatgagcctgacctctcaaaagtgaatttcagcatggaactgtttgaaatttataccaagggcttcttgcaggcagcaggtgaagcgttcaccccgctggaaaagcagaccctgccgtggggggctaaactgatgacgatggaatgtggtatgcgcttcctcaccgattatctggagggcgaccactacttccacatcaactacgagactcaaaacctcaaccgcgcccgaacccagttcaaactgaccgccgacatggaaaaaagctgggatgctatgcagaaaatcattgagaaatattgctgatagatatttgatgctcttttttctgcgttttgtgtaatgcaaaatcgcgttttctcctttttataacgcccgcgcctgacaagcgcgggcgttttttactctacgtcgaggttaataagttgaacaccgggattcttgatgccttggtgaaaaagtacagcgcaagctgtactttttacaacaatagtgtagaaaacatagccccttgcactgggccacacctacgcaccgaaatacgatgtaagtatagttacattacgtttcaggcccgacagccaaattggttgtcgggcctttttcgcgcttgtctttttgaatatgcacgttgaaacgacgtatttattgtgctcgcgcacctcctttttgagcttctattcaatgaaactcaaaattttggaggtaaatatgtccagaaaaaaggatgccaataaatattggatttacggtgaggatgcagcactggcggcacgttttaccaagtatttgacgaaagtgttgtatgcacggcgtgcttcatacattcgcactaaaatgactgaagctgcacatgaagtctcgattgaagaatgtagcggtgaagtagaggagacctatagacggcttaacgcacctatcgaggaacgtgttgaagccagactgatgtgggagggcattcgcaactatctgcctaagttgacaccaaaagagtgcgaagttatgattgccctgtatattgatagactgtcggtatctgaagtggctgccaagctgggcgttgagaccaatacgataagcactcatcggcataatgcttgcgagaagattcgtaaagaaatggaaggtaagcaatatgattgcatttaaggaattactgttgcgggcaaaacgtggcgaggaaaaggcatttgaggaattgtttgcaatctttgaaccacttgtgcggaaatgtagtattgtgaacggccatgtggatgaggacttgcggcaaattttgctgatggagtttgtacaggctgttcgcaagtttagaatctaaataaaggaagggagatgccaatgcatctcccttcctttatttactaatactcaacttaaaataaaccgttttctttttgaaagcaccaaattcgatccttgagatcggctaaaacatctttcgtaagacgaaaatcaacttgcttgtaatcattgtctttgattccaatcgttgtggtatagcaaaaaacacagctcccgtgtagcctacaaaaatatttttgaaaaatgcaattttttctcgaacttttccattctcaaagcgatattcatatatagaggggccaaaaacaccctctctcccccttgagaaccttgaaagcagaatatccgaatcaccgactacataaaactgaccctgccgcaacccaaggagcgcttcggcaggtgcgtcccggctctgacgcgaggataccgccgtaacggcggtggagcgcccccagaggcgggagaggtggcgtggaacacatacctcaagcgaagggtcagcaatcatgatacacaccgtggcgatgctctcaaggcgtcggcggtactgccaacaatg

SEQ ID NO: 14056 - DNA, 3295 bp, Unknown
  gut microbiota DNA sequence
cccccaccccgccgaaaaacctgccgacatatgacggttcccttttgccgccccacctccctcttgccttattttcctgtttgttcgccttaactttcttctttacattccctgggaaatacgctacaatataagcaccaactttatagaataacaaggagaaggagagatcgctttgtttactatcatcaaacggcgggagctcaaccccaccgtgaccgagctctggatccatgcgccgctcatcgccaaaaaggcgaaggccggccagttcatcattgtccgtgcgaaggaggattccgagcgcatccccctgaccatcgccgggtttgaccgcgaggcgggcactgtctccatcatttttcaggtcgtgggcgcaggtaccatgcagctcaactccctcaaagagggcgaggccgtgcatgacttcgttggccctctgggcaaggccaccgagatcgagggcctgaaaaatgtctgcgtggtcggcggcggcgtgggctgcgccattgcgctgcccgtggcacaggcactgcacgagcagggcaccaaggtcaccggcattgtcggcttccgcaacaaggatcttgtcattctcgaggacgagttccgcgcctgctgcgatgagtttatcattatgaccgacgacggctcctacggcgagaagggcgttgtcaccgccccgctggaaaagaagatcgtcgagggcgccaactttgacgaggtcatcacgatcggaccgctgatcatgatgaaattcgtcgtcaagacgaccaagccccacaacgtcaagaccgttgtgtcgatgaaccccatcatggtcgatggcaccggcatgtgcggcggctgccgcctgaccgtgggcggccagacgaagttcgcctgcgtggacggccccgactttgacggctttgaggtcgattttgacgaggccatgcaccgcggcacgatgtacaagccctttgaggcacacgcccgcgaggccgagtgcaacttgctgaagcaggaggtgcagtgatcatgccgaatatggacccgaaaaagtgccccatgcccagtcaggagccgaatgtccgcaacaaaaacttcaaggaggtcgccctcggctacaccgaggagatggccgtgaacgaggccaagcgctgcctgcagtgcaagaaccacccctgccgcagcggctgccccgttgaaattgatattcccggcttcatcaagcatgtggccgagggtgattttgaggctgcttaccatgtgatcgcgcagtccagcgcgctgcccgccgtctgcggccgtgtctgcccgcaggagcatcagtgcgagggcaagtgcgtccgcggcatcaagggcgaggctgtcggcatcggccgtctcgagcgctttgttgccgactggtaccgcaacaatgtccacaccaagcccgctgcccccgcgcccaacggccataaggtggctgttatcggcgcaggcccgtccggcctgaccgtggccggtgatctggccaagctgggctacaaggtcaccgtctacgaggccctgcatgttgcgggcggcgttctgatgtacggcatccccgagttccgtctgcccaaggacatcgtccagcacgaggtcgagggcctgaaggagctgggcgttgacattgaaaccaacatggtcatcggcaaggtgctgaccattgacgagctgatgaacgactacggctttgaggctgtctatgtagcgtccggtgccggtctgccccgctttatgggtatccccggcgagagcctgaacggcgtttactccgccaacgagtacctgacccgcgtgaacctgatgaaggcttataaagaggattcccgcacgcccatcatgaagagtaagtccgtggccgttgtcggcggcggcaacgtggccatggacgccgcccgctgcgccaagcgtctgggtgccgagaatgtctacatcgtctaccgccgcggcatggccgagctgcctgcccgtaaggaggaggtcgagcacgccgaggaggagggcatcgtctttaagacgctgacgaaccccaccgaggtgctgggcgacgagaacggctgggtcaagggtatgacctgcgtcgagatggaactgggtgagccggacgcctccggccgccgccgccccatcgtcaaggagggcagcgagtttttcctcgatgtcgatacgatgatcatggcgctgggcaccagcccgaacccgctgattcgctcgaccacgccgggtctggacgccgacaagcacggctgcctgatcaccaacggccctgacggcctgaccacccgcccgatggtctacgccggcggtgacgccgtgaccggcgccgctaccgtcattctggcgatgggcgccggcaaagaggccgcccgcgcgattgacgccgcgattaaggcaaaggaacagtaaaaattaaatttcagcccccgtaccgcgaggtgcgggggaatttttgttagataatagataaaagataatagataataaaaaaggagtgccgcccacggcggcacatgaaaacctgttttcgaccgcagagagaaaactccaccatattttttatcttttatctcttatctattatcttaaaaaggctgacaccatgtatcatccattcttccaatttgttcttccccgtctggggcaggcggcgctggatattttgctgtatctcaactttttacagctgccgccgctgcagcttgcggcacagtggccggttttgtactacggcctgccgctggtgctgatggcgctgctggcctatatcagccgggacccgctgggccttggcatcgtctttgtcgggcatctggtgaccttttactgcatcggcaccggcatcgggctggtgctgcggcgtgtcggcggcacaccgctggcagtttggcgtattttttggctgggcggcataacaccgtggctgctgacggcgctgattatgtggtggggcaggcgcaaggcgctgcacctctgtacgacccgctaccgccttacgacccgcaaagggctgccgggcggccagctgcgcatcgtgcagatcagcgatattcacccccgaagctgcgccgcgatggatcacacccgcatccctgagctgcgcgagaagatcgaggcctgccgccccgacctgctggtgctgaccggcgatatttttgacgaatttaccgagccggaggagctgaaagccttctgcgccctgttcggtgcgctgcgcgcgccccttggcaaatactatgtgctgggcaaccacgatctgtttcaccactggcgggagccaagcttt

SEQ ID NO: 14057 - DNA, 18579 bp, Unknown
  gut microbiota DNA sequence
gccataataaggcaggggaagccgctgaccttgtcgcagctctcacccgctgcaccgcagacatggcggcccgccgtgccgatcatcgaagcaaacccctttgcgttcggatcaaaatcgccaatcagaagcaaggcggcgtcctccttggtcagggcgtccacctcaggcagaacttcctcggtgcggtcgtaggctaccgtttcacaggcaatcgcggccgggtcgatttcgatgaccggcacacctgccgggcgctccatcgtggcggcaggggcagtaaggtcggtgaaatccgtgctgccaagcacattatttgcctgcagggtcgtgaccgtcttgtccagatgcaggacggcggcaggggcggtttcaacgctgctgacaccgacacggacaaggtaattgcctgcctccagaatataggaggcagtctcggtatcataagctgccatctccggcagggtaaaggagcaggtgaccgattccgtttcaccgggggcaagctcgcgcgttttggcaaaggcgcaaagctcctgccaaggtgcatcgagcttaccggcaggcttgctcagatacacctgcacgacctgccgacctgccaaagcgccgatgttttccacggaggtacgcacagtgatctgtgcgccgtttgcctccaccgcgacagctccaaggcggaactctgtgtaggaaagcccgtatccaaaggggaacaaagcctgtttgcggaaggtatcaaaatagcggtagcctacatagatgccctcgcggtagcgggtttcgttcatgtcctcaaagtcgggcatttcagggtattcctcaaaggcggcccaagtggtcgtcagcttaccggagggattggccttgcccagcagaatatccgccagcgcaccgccggtctcgacaccgagctgagagagcagcagaatgttgcgcacgcccataacgggggtgagatccaccacgccgccgacattcagcaccagcataaagcgggtgaactttttgtccagcgccagaatatcccgcacctcggaatccgtcaggcggatgtcgcccttgagcggcgtgcggtcgttgccctcaccggaaatgcgggagacaacataaatcgctgcatcgccctcagcgttgagcggcaggttatattcgggctcaggcatggccttgcccatgccgtagaggataaagttctgattgacggctttggcgtcctttttcagctgcttcaaaaaggccttgtgggccttttcccgcgcctgctcgtagccggtgtgccactccatcccggtcagggtaaagcctgcctgctgcagcccttcctcaatggttacgctatagcgggaatttacctcgccggagccggtgccgccgcgaatcgtgcggcgcacgccgctgccataagcagcaagggcgcagggcttttccagtgggaaattgccgtcctttttcagcagcacggtgcagcctgctaaatttttacgcagcgcttcgatgtggcgcagctcataatcggccattgcagtggtatttttcatgagaaacatcctcctttttcattagtatacaagaaatatccgcaggcagtgaagtgaacatttcgtgttttgagataataattaggaaagcttacgcatttgtcagtaccctgactccgccttccacaaaagtcgcaatcgtgtccagctgtgcttctgccagctctggtgcggaggcctgcagccccgcaatgccgttgaagatgaaaaccagtacagcaccgatgttttcgtactgtgtactgtcaataccctcctgctttaccttttcaagaatggcattgcgaagatgggcagtgaactgtgccatggccggtgcagggaaaagctcggtgcagagctggtttttgttcagcagggcgtacatttccttgacgaaggcgcgtggggcgctcaacaggccctgtacggtgttgagttggctgatgacttcggcaacggcctcctgctccagctggtcaacaagatcatgaatcgtctcataatgtgcgtaaaaggtcgccttgttgatctctgcgcgcgcggcgatttctgttacggtgattttttctaagggcttttctttgataagctcataaaaagcagtgcgaatagcacgcttcgttttcttgatacgcaaatccataacgatcctccatcaataatccggaatactgacgcttaaacaacgctttggcctaaatgggttgggtaagcgtcaaacctgcccaaaattgctgattgtaaagcggcatcaacaatggtagtataacaccaacgaacagaataagcaacagttagttgattatccgatacgcaaacatatatttttaggaggaaagcaacatggatttcagcagcgttcagggaaaagtcgtcatcgtcaccggcgcgagccgcggtattggccgtgcgattgccgagtgctacggcgcccaaggcatgaaggtcgtctgcgccgcccgcagtgcggagcagggcgaagccgttgcaaacggcatccgcgaaaagggtggggatgccatctttatccagaccgattgcagcaaggcagccgccattcaggagctggtggacaagacggttgcccactatggcaggctggacggtgttgtcagcaatgcgggcatcggtatgggcggtacgccgctgcatgagtatgaggtggccgactatgagaaaatttttgctttgaacagcgagggcgtttttgccggcatgaagtatggcgcagaggctatcctgaaaagccgcagcaagggtggctttctcatcaatgtggcttctgtcgcagggcttgtaccgcagcgcggacaggccttgtacagcgccaccaagttcggtgtggtaggcatgacacgcgcagcagcgctggattacgctgcctacggtatcacggtgaacgccatctgccccggctataccatgacaagcatcttcggggacgcacccgcctcggcgatggatttcttcgcctcggactgccccgcaaagcgtatgggcgacccgcaggagtgcgcggcgctggctttgttcctggccagtgatttggcgcggtacatcaccggtgcggcgattccggtggacggtgcgctttccgcagggcatcagagcatcagcagctggaagcatcctgaaattctgaccgatggcaggctcaacagcaagagcacgattgctgccttgatggaaaatgacgaagcaaaggccgtcgttgagaaattcctgcccggttttgccgccaatgagcaggcaaaagcagcctatggtatgaccttcgggcagatcggttcgatgcttggtttgcctgatgccgcattgcaaggtctgctttcggcactggatacgctgtaagaggaggattttcttgaaaaacgaagcaatgttccgcaccggctctgtctggcgcgctatcttcacgatggctgtaccgtcggtcgttatcatctttgtgatgttcctgtacaatatcgccgacatgttttttattggctgcttgggcgatacggcacaggtggcggcagtttcggtggttggcccggtgttttcaattctggcggctgctgcaacgatgctgggcgccggcggctgcaccatcatcgcccggtgctttggggctggggaagtcgaaaaggggcgtgtttattcctcgctgtgctgttgggcaggaacactgctgggcgtgttggtctgtgcaatactgcttctatgcggaacgccgctattgcgaatgctcggctccacaccggaaaccaccgcgtatgccctgcaatatctgcgggttttagccgtcggctccccgttcttgattttggccaacactgcggcgatgctgctgcgtgccgaaggtgcagtcaaagacggattgatcggtaatctgctgggcacggttacaaatctgctgctcgatccgctgttcattctggcttttcgatggggcgtcaccggtgcggctgccgccagcgtgctgggtaatgtcgtggcaacagggttttatatgcgctacatcatccgcaaaggtaccgtgctgacggttgacccgcgcttcgcattgcaaaagcctgctgcgctgggcgaaattctggtcatcggtctgcccaacggcatcggcagcctgctttccggttttgcctctacctttagcaatcggctgctgtccgcctacggtacgggcgcgattgccgcaatggccgcagcgggcaagacaacgatgctgatcggcatgatcacgatggcaatctgtatgggctgccagccgttactggcgtacagctacggggcaggggataagcgccgcctgcgggagctgctcaaaaacatcgggctgctcacaatggggattggcttggccgccggtgtggcgtgcctgctggggcgaaaggcgctgatcggtatgtttatcaaggaagctgcagtcactgcgcttggtgaaaagcttgttgtctggctcgtgctgggcagcccggtcattggtctgacctatctggctaccaatcttttgcaatcggtcaacaaggcaatgtcggctgttgttctttcgctgctgcggcagggtttgcttttgctgccgctgctctatggcctgaacttcttctttggtgtggccggcatcgctgccgcccactttgcggcggacacgggcgcggcactgatcgccgccgtgatgctggcgcgcatctggaagaaggagcttgcctgaaggccgcccatgcaaggattgcttctgctgattcaaatcgaaacggctgaaataagccgaacagcagcttgaaatcctgagtagagtgacatacaaaaaaacaccgcatacttccatctgccaatacaacggcgttcggccgtcaggcgggaactatgcggtgcttttgttgccttgaaggtgagtgttaagcccaattcatccgcccgtagcgggtggtcatctggcaaatttccttttggagctttttggtaagctggctctttttcagccgccagcgccagtttttccctacggtggagggcttgttgatgcgggcggaattatccagccccagccagtcctgcatcggaacgatgcaggttgccgctgcgctgcgcagaaccagcgcaatcatgcttttgtagagctgatcctccggcgtggtgtagtcgtacagatagtcccgcaccatggcgcgctcggcaccggtgatggtctggtaccatgaaaccaaggtctcgttgtcatgggtgccggtgtaggcgacactgttcaccgggtagttgtggggcagatagtcgctggcgctgccggtatcgcgggaatcaaaggcaaactccagcaccttcatgccgggaaagccgctgtcccgtaccagctgccgcacggtatcgctcatgtagccaagatcttccgcaatgatattccgtttgcccagtgcctgctccacggcgcggaaaagctcaatgccggggcctttctcccagtgaccgtctgcagcggtctcgctgccgtagggaatggagaaatactcgtcaaaaccgcggaagtggtcgatgcgcactacatcgtacagctcaaagcagtaccaaaggcgggtgatccaccactgatagcctgtgctgcggtgcgtttcccagcggtagagcggattgccccagagctgacccgtgggcgaaaagccgtccgggggaacaccggctacagcggtggggatattctccttgtccagctggaacagaccggggttggcccatgcgtccgcagaatccagcgctacatagatgggaatatcgccgatgatccggatgcctttgctgttggcatagtccttcaatttgcgccactgctcatcgaacttgaactgcagatacttgttgtattctacttcaaagtagagctcgcggcggtagtaatccatggcgggctgccagcgcagacgaatatccgccgcccactcgatccacggcttgctctcaaagcggccctttaccgccatgaagagcgcataatcgtccagccaccacttgtttttttcacagaacgccgtaaatgcttcgttgtggccgatgtcgctgcgggaataggcaagccgcagcagacggccgcgctcggtatacaggcggctgtaatcaatgtcgtccgctttgcgcccgaaatttgcctttttgcactcggcagcagtcagaacgccgtcctccaccagcgcatcaaggctgatgaaatatgggttgcccgcaaaggcggaaaagctctgatacgggctgtcgccatagctggttacccccagcggcaggatctgccagtaggtctgcccggcttctttcagccagtctacaaagtcgtatgcctcctgcgaaaagcagccgatgccgtaaggggacggcagactgctgatgggcagcaaaatgcctgcgcttctctgcatttcctacaccttcctttataactcgatcaaaataccggcatggtcggatacctgcggctcccgcaggccattgaagacgacccggctgctttttacagccaccggctcagaacaccaaatctggtcgatgcgctttttggccgctgcattcggggcatcccgccagccatcaatggcctgcacaacggtgcagccctcgtccttctgctgcgccagacgataggtatcgtgccaaccgctgcggaggatgagatcgtagccctcgccgcgcacatcggcttcgctgttaaaatccccgagcagaaatgcgggctgctttgcaccggccgtctgggagagcttctcccactggaaggggaaaggctcctccttgtcgttccaccagcccatgtgcactgcataataccagacatcatctgcacatacgcccagtgcgcggcgggttttccaagagcggtagttgtcggccttgctcagcagcgtgttttcggcggcggtgatgggggcacggctgaacaccgccataccctcatcgtatttgtcatagccgatctttacagcaaaccagcaccaatggtaatgcacgcctcgatcttccagcatccgggccacagctgcagcgtgattgtccgccttcaaagccacggtgttgccggggcaggggagataccccgccggaatatccttcagcacaggcgcacaggcagtctggttcacctcctgtaaggcgaacacctccggctgctcctttgcgatgaagtttacaaaaatctcccgctttgcctcatagttcggctcgatgaggctgtgggtattcaatgtcagcagtttcatagtattttacaaaatatcattgatgtcagatttcaacacatcggccttggggccatacaccgcctgaatgccgtcgcccttgaccatcaggctcagcgcaccctcggccttccaggctgcaaggtctgcaaccttggcagggtccttcacggtaacacgcaggcgggtcatgcaggcatcgaccagcacgatgttctcacggccgcccagcagggcaatgatgcgctcggcctggctgtcgtttttcttgtccgtgctcttttccgctttggtggcagcggcagaatcatccgcgttgtcatcggtatagttgccaagacggcccggcgttgccagcttcagcttgccgatcatgaagtaggcaacgaaataaccgatgataaagaaggcaatcacacagaccacaaagttgatgatgtcgccgcccaaaccgacctgcaaggacatggggatgcgggtgataaattccagattgccgaaggagtgcaggcgcaggtggataacgcccgccatggcgaaggcgcagccctgcagcagggcgtatacgatgtacagcggcatggcgcagaacatgaacataaattccagcggctcggtaacgccggtaagaaaaacagccagcgcggtggagatgaacatggacttgtatttggcgcgcttgtcagcatcaacacggcggtacattgccagcgcgatgcccagcagcagaccggttgcgccgatcatctggcccaccttgaagcgggcaggggtaacggtggtcagcagctcgttgtaggcggccatgtcaccggcctttttgaagttgataaggtcattggcccatgccagccacagcgggtcctgaccaaagacctgactgcccgcgttgacaccggtggcaatcgtgtaggtgccgccgaaggaggtgtagttcatggggatagtcagcatatggtgcagaccaaacggcagcagcaggcgttccagcgtaccatagacgaacggagccagaacaggagaagtttcagaggagtttgcgatccagatgccgaagttgttgatgccggtctggaccacaggccagaacagcgccagcaccagagaaatgaccaccgagtaggcgatgaccaccatagggacaaaacgcttgccgttgaaaaacgccagcgcgtcaggcagcttgcggaagttatagtatttattgtaagcaacaccgcccacaaagccggcgatgatgcctacgaacacgcccatgttcagcgccggagcacccagcaccgaggtgaagtagccgttgacggcaatctcctgcccaaacagggtgtgggtcacggcgttggaatcctccagcatggcactggttacgccgaagatgttgccggtgatgacattgatcagtgcgaaggccagcacggccgcaaaggcaccgccggcgcgctccttggcccaactgccgccgatggcaacggcgaacagaatgtgcagattattgatgactgcccagccgatgttttccatggtggtgccgatggtcatgactgccgcaatatcgccgccgcccatctgcaccagcttgcccagactgatcatcagaccggccgcgggcatgactgcgatgacggtcatcagcaccttgcccagcttttgcaggaaatcgaaattgatgaacccctttttctcaggagccgcttgtgtggttgccatgttgttcctcccaattcctatttgcattgatgtacgcaagcgttgcattgtgtttgcgtaaccttacgcaactagaatagcgcaaccacacgctttttacaagaggaatttgagaagaaaacagactttctacgatttacacaaccggacaaacaataatttgtggaaattggcaagagataggccaagatgcgttgcataaattacgcaatcgcgtgcgcaaatgttgactttgcgtgcaaacagctatacaataaaggtactacatcagggaggaacagatcatggcagttacaatcaaggatgtcgctgcagcagccggtgtttcgccgtcaaccgtgtcgcgcacctgtaaggacagcccttccatcagccgggacaccaaagagcgggtgcgccgcattatggcacagctgggctatgagccgaactttgaggcagagcctgtggaggctttttccaagaccatcggcattattttgccatcctctcagcgggatgtctacgagaacgccttccatcttgaaatcattcgcggcatcgggcagttctgcaaccagcggcggtatgtgaatacagtcatcaccgggcaggacgatgcggaagtgttggacgccatccagagtatggtcgccaacgcacaggcggacggctttatcctgctttattccaaaaaggactgccctgtggcggcgtatctgcgcagcgaagggctgctccatgtcattgtaggcaaggcggcgcagtcggcgaaccagaccatctacattgataatgacaacgcccttgcaggggaagaagccaccgaccatctctatgagttggggcatcgccgcattgcgtattttggtgtcaacaatgccatgctgttctctgcagagcgcaagcgcggataccagatgtccctgctcaagcacggcattaccccgcaggagggggactgtgtggagatcaacaccttaaacgatgcttatgaggagaagctgaaggcccttctcacggcgccggaccatcccactgccatgctggtcagcgatgatattctggcggtcgtgctggagcagttctgcggcaagctggggctgcatattccgaaggatctttccattgtgtccttcaacaactccctgttctcccgcattaccagcccgcagctgaccaccgtggatgtaaacccctaccagctcggcatggaagccgccaaccagaccatcaaccacattgaaaacccgaatcttctggcaacaaagatcattgtgccgcaccggctgatcccgcgtgaaagctgctgcccgcctgccgagggcagatagctgctggcggtgatgcgtacatcagtgaaacgctgcatccggcacaaaatatctccgcaggggaaagcggtcgtaaacgccccacgccaccaaaacaatgcccagaacataggcaaactcggtgctgaattttttcttcataagaacctcccaaacaaaaaatgagccttttccgtttgataaagaaacggaaaaagctcttttttaagtataccatgtctgtcaagccgcagtaataaacggcccgcgatgcctcaggtcttgagctcgggcagcgggatctccggcatcagctcatcggaaacgatgcgcaacatatcctccagccgggcaagatcctcgggggcaaagcgcttgttggcgcgctccatgacaaggtgcagataggaatagctgatgttgtagtaatccagatatttctgggtcggccgcaggtgatattcccgcttgtcggcggtggaacggatacgctccacatagccctttttgacaagggaattgatcttataggcggcgttgggggtggacagattcatcatgtggctgaactgggcgattgtcggctcccccaaagctatgatgacctccatacagaaggattccacggtcgtaagggtggcttcgcggtcctcaaaccgactgaaaatctgcttataaaaatgcagcttgaatttagtgtatacctgaccgaaagcctgatccagcatggcgcgtatcctcctgttggttagtggctttattataccacaaaacgccgcgcaaaaccagtcctcaggcatctgcaatcacaaaagtcagctctgcatttgcggcacgctcattgcccacccatgcggtggccttgcctatgccgatcggcccatgctgctccaccagctcacattccagcgtcagtacatcgccgggcacgacctgacggcggaaccgggcgctttttacaccgccgaacaaagcaagcttaccctgattctcgggcaggctcagcgctgctacggcgccggtttgggctaaagcctccagaatcagcacgccgggcatgatcggccggccggggaaatgcccctgaaagaacggctcggtgcgcgtcacgcatttgatgccgcgcgcccactgaccgggggtgtaatcggtgatcttatccaccagcgcaaaaggggagcgatgaggcagaatcgcttcgatttccgctgccgtcagcgcgcgcggcgggtcattgggggtgatcttcatggttgccctcccagcgttttaagacgatgcaggcgttatgcccgccaaagccaaggctgtcgctgatggcgtagtccacctgcacatttcggcccgtgttggggatgtagtcaagatccagcgcagggtcaggcgtctgcaggtttacagtggcaggcaaaaagccatcgtacagggccagcgcggtgaaaacaccctccacaccgccggcaccgcccagcagatgcccggtcatggatttggtggaggatacggccagccggtaggcatggtcaccgaaaacagctttgatggcagcggtctcgcagctgtcattcaggtgggtggaggtgccgtgggcgttgatatacccgatctgctcgggggccacaccgccgtccgccaatgccagccgcatgcaggcggcaccgccgacaccgtccggtgcgggcgcagtgaagtggtaggcatcgcagttggtgccgtagccgacgacctcggcgtagattttggcaccgcgcgcccgggcagcgtccagttcctcaagcagcagcacgccgctgccctcgcccatcacaaagccgctgcgctctgcgtcaaacgggatcgaggcgcgggccggatcttctgctgtgctgagggctttcatgctggcaaagccgccgacacccagcgggctgatgcagctttccgtgccgccgcagagcatacgatcctcatagccgtcccggatacggtgaaaggcatcgccgatggcgttggtgccgccggcacaggcggtcgtggggcagctgcagatgccctgcaaaccgaacaggatggctgtctgcccggcggccatattgccgatggacatcggcacaaaataggggctgacacgctcaaagcccttttgcaggccgcgggtatgctcggcctcgatggtgggcaagccgccgatgccgctggagaggatcacgccgaaccgtgtgcggtcgatgttttccaagacaagaccgctgtcctgcatagcctcgatggcagcggctacggcaaactgggtgaagcgggccatcttgcgggcttcgcggcggtccagacgggtgttcggatcaaaatccttgacctcggcagccagcttgaccttgaaatccgccgtgtcaaaggcggtgatcggccccacggcgcagcggccagccttgacggcggcccagctttccttcacagtgctgccggtcggattgactgtgccaagaccggttatgacgactctgcgtttgttattgctgttcattgataacctcacattcccatgccgccgtctatgcagagcagctgcccggtgatgtacccggcgcgttctcctgccagaaaggctatggcggcagcaacatcctcagggcggccgggcttgcccatcgggatggcggcgcttgcggcggcgcgggcagcctccggcatggccgcagtcatatcggtcgtgataaagcccggcgcaacggtgttggccgtcacgccgcgggaggcgtattccttcgcaacgctcttcatcaggccgatcagccctgccttgctggcggcatagtttgcctgacctgcgttgccgtgcaggcccactacgctgctgacgctgataatgcggccgtaccgctggcgcatcatcaggcgggcggcggcctttgtgcagaagaaagcgccctttaaattggtctcgatgacggcatcaaaatcggcttctgtcatctgcagcagcagtttgtcggcggtgacgcctgcattgttgaccagtacatccagccgcccgaaggcggcggctgcatcctctacgagctgcttgcaggcctcggggcggcgtacatccgcctgcagggccactgcctgtacgccgagtgcgcggcagtcggcggcggtctgctcggctgctgcggcgctaccggcgtagctgacggcaatattcatgtcctcggcagccagtgccagacaggcggcgcggccaatgccgcgcgccccgccggtcaccagggcggcacggcgcggtgtttcgctttgtaccatgggctcacgctccttgtaatgtgcggataagctgctgcagctgggcagcggtctccacgggatagcaggcaatcgcgctgccgactgtctttttcacaaagccggtcagtgctttgccgggtccgatctcaatggccgtatctacgcccaactcagccagacggcggacggtatcctcccagcggacggcggaatgtacctgcttttccagcagggaagggatcgtatcagcagcatccttttcgcggcccagacagttgaaaagcaccggacattgcatcggtgcaaaggacacggccttgaatttctcctgcagggcatccccggccggctgcatcagtgcagtgtggaagggcccgctcaccttcagcggcaggcagcgctttgcaccggcctgcgcagccagtgcggtggccttgtcaacagcggcctggtcgccgccaatgaccagctggccggggcagttgtagttgcagatctgtacaacgcccgcatcggcagaggcatcgcagcagcgctgcagggtgtcgcagtccaggcccagcacagcggtcatgccgcagctgcgcccggcagcggctgcagccatggcttttccgcgaaaggccgtcagtgcaacggcggtacgggcatcaaatacacccgcgcaggccagcgctgagtattcaccgagcgaaagaccggcagcgtagtcggatgtgatgccggctgcgcgcagtacagcggtaacaccgcctgcaaaggcggtcatgcagggctgggtgtactgggtttcgttcagcacacccgctgcatcggtaaagcagacctcttgtaagtcaaaatcaacagcggcagccgcctcatcgaaggctgcgcgaaattcgggacaggcatcgtagagatccgcacccatgccggggtgctggctgccctgacctgcgtataaaaaagcaagcttcatgcaaaaacctccttagagcgtcagggttgcaaggcactgacgcgcaccggatatcatctcgtccagaatttgtgcaacggggcggacctcatgcaaaagccccgccgcctgcccggccatcaggcttccgttgaccgtatcgccgtcaaaaactgccttgcgcaggctgccgagcgtaaactgctccagcgcagccttatcagcaccggccttttcctgccggacatattcgcggctcatgcggtttttcagcacacggaccggcgtgccgccaaggcggcccgtcacgatggtatcgctgtcacgcgccttgaggagcgcgtccttataattttcgtggatggggcactcggtgctggtcagcagacaggtgccgacctgaacgccgcaggcgcccagcgccagcgccgccgcaaggccgcgtccgtccgcgatgccgccagcggcaatgaccggcagatccacggcatccacgacctgcggaaccagagccatggtagtcatctcgcccacatggccgccgctctcggtgccctcggcgatgacggcgtcaatgccgaggggggcaagatgtctggccagcacggcggctgccacgaccggaatcacagtgatgcccgccgctttccatgcggccatgtacttgccgggattgccggcccctgtggtcacgattttgacaccctcatcaatgacgatttgggaaaattcgtccgcctgcgggtgcatcagcataatgttgacgccaaacggcttatcggtcaggcggcggcattggcggatgttctcccgcagtgtttcggggttcatgccgcctgcaccgatcaagcccagcgcaccggcgttggagcaggccgctgcaaactcaccggtcgcaatgttggccatgccgccttgtataatcggatattttgtgcccagaatttcattcagcagtttcattttctctacctttataagtaagcagcatgccgccccatgtaagcccgccgccaaagccgatgcaggccagctgctggccgggctgcagcagaccactttcgcacatctcatgcagggccagcgggatgctggcggcgcttgtgttgccgtagcggtcgatgtttttgtaaaatttggcggggtcggcgttcagctgctttatgcagtgatcaaggatacggctgttggcctgatggcagaccacccagtccaaatcatcgagggtctggtttgtctcatcaagcaccgtatgcaggcagtgcggcagggcctccaccgcaaagcgaaagacggcgcggccgtccatcgtgatgggcgcggtatcgcgtgcggacacaccgccgacccggatcgcgtcactgccgcgcgcgcccagcataacggcaaacggtgcggtatcaatcagctccagaatagcggcaccggcaccgtcaccgaacagcacgcaggtggagcggtcagcagggtctgtcagccgggagagtgcctcgcagccgatgacaagcgcgtaccgcccgcccagtgtagccagcagcccatgggctgccgcagcagcgtacagaaaaccggtgcaggccgcgttcacatcaaaggccggacggttttccggcaggtgcagcgccgcctgtacacggcatgccacgctcggcgcggcagtgggggaggagagggtggcagcaacacagcaggcaatatcctccggggcaaggccgctgcgcgcaagcgcctgacgggctgcggcgatggccagtgtggccgcgtcctcctcgtccgtgcagtagcggcgctgccggatgcctgtgcgggtggtgatccatgcatcgctggtgtccacctgatggctcagttcctcatttgtcacaacgcggccgggcttggccccgccggtcgcaatcagctgcagacctctcatgcgcccctcatttctccgatgcggcggtactttttgtaccgctgatcggccaatgccttaccgctcatgcggcagagctttgccagatgtgcctgaatggcggtatccatccgggcaaacaatgcctgccgcccgcgctgtgcgccgcccagcggctcggaaatgatctcctccacgatgccgtcatcgtacagatcctgcgcagtcagccgcatcatggtgcaggcctcaccgctgcgggcggcatccttccagaggatgctggcaaagccctcggggctcagtaccgaatagacggcattttccagcatcaaaatatggttggcaacgccaaggcccagtgcgccgccgcttgagccctcgccggtaacgactgccagcacaggcacgctcaggccgctcatctccatcaggcagcgggcaatcgcctcgccctgaccgcgctcctcggcgtccttgccggggtaggcaccgggcgtatcaataaaggtgatgatcgggcggttgaacttttccgcctgcttcatgacgcgaagggccttgcggtagccctccggccccggcataccgaagttacagcgcaggttttcctccagcgagccacccttgcggtgccccagcacagtgaccggcatcccgtggaaccgggcaataccgcagagaatggcggcatcctccttgcattgtcggtcgccgcattgctcaaaaaagtcggtgaacaggttgtcgatgatctcatcaatgtgcggccggtcagggcggcgggccagaaacacacgatcctccggcgtcaatgccgtgcagcgctgcagaagtgcgtcctcctgcgcggcaagctctgccagctcggctgcgtgggcagtcaaatcaagcatctcgccgtcctctgcaccgcttagtgcgtcgatctgtgcatccagcggttcaagctgctgcaaaacctctttgatcaactgtacttcctcctttgggtgtgcaggcgcagaatgcgttccagcgtttccttcatcgcagcgcgcggaacgacctgatcgagaaagccatgctccagctgaaactcactgcgctgaaagccgtggggcagcttttcgccgatggtctgctcgatgacgcgcggcccggcaaagccgatgagcgcgcccggctctgcaagcatgatgtcacccagactggcaaagctggcggtcacaccgccggtggtggggtgggtcagtacgctgatatacagtccgccgcggcggctgaaccgctccagcgcggcgctggttttggccatctgcatcaggctgaagatgccctcctgcatacgcgcgccgccgctggcggaaaagatgatgagcggcagatgcttgtccgccgcgtattcaacggcgcgggtgatcttttcgcccacggcagtgctcatgctgcccatgaaaaaccgactgtccagcacggcaaccaccgcctgcacgccgccgattttgcctgtggccgtgaccgccgcctccttcagcccggtcttggcggcggctgccgtcagcttttccgggtattgcggaaaatgcagcacatcctgcggggtcagatcggcgttcagctccttgaaggtgccgtggtccagcacaaggcttaaccggtaataggcaccgatgggcagatgtacaccgcagttggggcagacatacaggcttttggcccagacctgccgtgtggcgcggcgcccgcacttttcacagtccacaaactggggcggtgtccagttgggggctgctgtaccggcatcgcggcgggccttcagctgaaagcagcgctcctgcggcgtggacgggaacagcttttcaatggtgctcatggctttcggctccctcaggcagcgcgggcggccagataatcaaagatatcgcccacggttttgagattcacaagatcctcatcggcaatcgaaacaccgaatttatcctcgaatgccatattcagctccacagcgtccagactgtccgcctgcagatcctcggtcaggcttgcctccggggtgaccttatcggcatcgcagctcagggtgtcaacaaatacttccttcagttcctcaaagcacatggtatgtacctcctgtatatttacctaaatttattgatgcaaatttgcaacgaggtcattataccatggattgttgatatgtcaatagaaatagctaaaataatttacctataatttttgcgataaaaataaatgcgctgccgggcttgattttccgcagttttacggcagttttttc

SEQ ID NO: 14058 - DNA, 3031 bp, Unknown
  gut microbiota DNA sequence
gctccgcccgtggccgtccgcggctgcggtaacttcccgggcggagcagagccccgcccctacaattctaccaataaaaaatcggctgtcgcattttgcggcagccgacttttttattttagctgaacatcacgacatcctgtgcgggcttctcgccgggctccacagaaatcgcggtcaggaccgggccggtggaatccggggtctggcccttgtagatggggtggtattttacattgaccttggcggtaatgttgatccagctgcgctgctccagactcttgtaatcgtcatagcggcagggcatgccgacaaactggatatcctgcacgcagcaggtcatggcaaagcggccgggcacgaacgagccttttccggcctgctgggtctggcagacctgcgccagatattttaccgtcttgccgtcatatttcttcgggtcgtccatgcagtccatgtaccagacgccgaagaattcctccgggatctcaatgacgggggcgtccacatcaaagggcagcgggtcggggatgtcatcgtaggcaacgctgccatccttgaactcataggcgatgtcgcagcggcggctggcctgacggaccagcttgtggatcagctggcggctctcctcatcgttgacagcctcggcacggttgacgaccagcagctcgctgccgcgcagcttgtccagcagcagaccgcgcatggcgttatcgcccgcataggtcttgatggtcgtgccgtccgccgtggccagacactggtagaccagccagttgtccggcagggcatcgtacaggtcctgaatgagccacatgccgttgtattcgatgatgacgcggccgcagccggactttttctccagcgcggtcaggttctcctgcgtcagctcgctcttgtcctcaatctgggcaacatgcacgccgccgaaggcaaactttttgggatcgtactcgatctcgccctcctcgcagaccagcagcagcgtcttgtcgccggagtcgaagttggggtcctccatcgtttcctgaatgaattttgtcttgccgctctccagctggccgacaaaaagatatacggggatttgtttaggcataggggtgtcctttcggttcgtagttaaaggcttcccctttgggggaagctgtccgcgaagcggactgatgaggggagagctaatcgcggcctgtcattagtgggctgttgcggcaggctcgcccctcatccgccttcgggcggagcctcaggcaccttcccccaagggggaaggcgtcgcaaaatcaaacgtggaacagctcggcgatctcatgctccttgagctgggagccaatcacacagagcttgccggtgacatcggggccgcaggtgcggatctcatgctcgccggggaccatatcgaactcataccatgtgtcgccgccgtccacgatgcccttggcgcgcaggatcatgccgtaagcgccctcgtccagcgcgtgcagcgccttgtcgagatcctcgcggctgtacttgtgggccgtttccttgccccagctggtgaacacctcatcggcatcgtggtcgtggtggtggccgcagctgcagacgccatgctcatcgtagtgatgctcatgatgatggtcgtgctcatcatggtcatggtggcagcaatgctcgtgatcgtggtcgtgctcatcatggtcatggtggcagcaatgctcatgatcgtggtcgtgctcatcatggtcatgatggcagcaatgctcgtgatcgtggtcatcctcatcatggtcgtgatggcagcaatgctcatggtcatgctcatcctcgtcatgatcgtgatggcagcaatgctcgtggtcatgctcgtcctcatcatggtgatgatggtggtggtgatgctcctcctcgccggcatgtgcctcgttggcggcacgggcctcgttcagcagctcagccacaaggtcgcgcttgccgtccatgacagagacgatctgggcgccggtcagggcggtccagtcggtggtgacgatggtggcggtggggttcttctcggccagcagggcaacggcggcagcaaccttatcctcaccggcgttgccggtgcggctcaggataatgcaggaggcatggctgacctgatcgtcatagaactcgccgaagttcttcatatacattttgaccttgttgacatcggccacggtgacaaagctgttcagcagcaccggcagggtctcggccacgccctcgaccgcgcgggtgacatcgctcagcttgccgacgccggacggctcgatgaggatgcggtcggggtggtaggtctcaacgacctttttcagcgcctcgcggaaatcgccgaccagactgcagcagatgcagccggagttcagctcgttgacctgaataccggcctcgcgcataaagccgccgtcaatgccgatctcgccgaattcgttctcgatcaggacgatcttttcgcccgcaaaggcttccttgatgagctttttgataagggtggtcttgccggcaccgagaaagccggagaaaatgtcgatcttggttttgttttcagccataattgggtacctctattcagatgtttatgattttggcaatctaaaagactaactgctaatactattataacaaacgagtcaaggggttttgtgcctttttgcgccgtaatttttgaattttttgcaaaatttatgggatttgggcagcactgtaggggccgggcactgcggggttgtgagcgtggggccacggttgagcggagcgaaaccggggagcgaacaatgtttgcccccgcggggcaaacaaccgcacgagcgggccagctttgctggctggcggcgctcgttgtgcgccgccaagcgtccggcccgggggtgtcccgcgggctggcgctaatgggacactgcctcggaggggtcaaggcccctccctacgggctatcgttcacgggtgctttgtagggagcggtcttgaccgctccgccgggctggcaggtgtgccgggttggtttgtaggggaggcattcatgcctccc

SEQ ID NO: 14059 - DNA, 13937 bp, Unknown
  gut microbiota DNA sequence
acacagaagttaagctcacttgtgccgaagatagttggctggaaacggcctgtgaaaataggtagatgccggcttctctttcagccctgctccaaaaggagcagggcttttttgtactataaaaatacccgggtaggggagagacagaacaagatacaattcgcctcataaatattgacaaatcaataaaatgaaggtatactagcaaatgttgccaaaaaaataaagagagggaatgtgtcttgagaacaaaaatgaaggtcaaaacgaaaatcggaattgcgattgcggcggtgattgttgttctggtggtggcgctgggggcggtcagcaattatctggttgactatgccatcgggcgcagcggagacggcggtgaccgcgaggtatcactggaggtcgagcagacgccggaaggcgtggaagcggttattgcagccaaccgggccacttttgagaaacaggaggaggactttcttgccgcaaatcccggggaggcggtagaaacaacctctgatgacggcctgacgctgcgcggtgtctgttatacgcataacgaagccgtcgacagtcaccgttgggccattgctctgcacggttaccgtgcgaaccacacaggagcgcagcagctggcggcgccgtactatgaggccggttataatgtgctgacccccgacctgcgggcctgcggagacagcgagggtaattttgtgggcatgggctggctggacaggaaggatgtgttgcgctggattgactatatcattcagcgcgacccggacgccgaaatcgtcatacacggcatctctatgggggcggccaccaccatgatgacggccggggaggacacccctgacaatgtgaaggcctttgtggaggactgcggctataccagcgtctgggatgttttttccagtgaactgcagctgcggttcggtctaccggaatttccgattctgtacacggccagcggcgttgccaagctgcgggcgggctataatttcacagaggccagcgcgctgcagcaggtggcggcctgtgaaaagccgatgcttttcatccacggcacggcggatgattttattccgtatgaaatgatggacattttgtacaacgcaaaacccggtgacaacaaggccgagctgaccgccgacggtgcgggccacggcgaggctgtctacgcgctgggcgatgcctattgggacgcagtatttgattttgttgccccttatatggagtgagtgcaagggtggtgcggccttctggctgcgccgccttttgtgttatcggcaggtggtgtggcgtatgatacagcaggggaggggtggatatggagtattgcgtcacggaaagctacctttcggccagtgaagcggagcgcagacagaatctgaatcgcctgctgggcggggatgctaatgcccccgcgtaaggggtgggcggcggtatactgccgcctgagcaaggaggacgaggaaaagaccgcgccggagtccgagagcatccgcaaccagcgggaactgctgctgcgctgggccgaggagcacggctaccgtgtctatcgcgtttacactgacgaggactattccggcatcgaccgggcgcggccggggttcaatgccatgctggcggacgcggagcagggacggtttgaggtgatcctagccaaaacgcagtctcgctttacccgtgatatggagttggtggaaaaatacctgcacggcctttttccggagtggggcgtgcggtttatcgctgtgctggaccatgtggatacacaggacccggcaggaaaaaaagcgcggcagatcaacggattgatcaatgaatggtatcttgaggatctgtccggcaatgtgcgggccgtgctggatcataagcggcgcagcggctgctatatcgccagctttgcactttacggctaccaaaaggacccgcaggatcacaatcggctggtcattgacccggaggccgctgtggtggtgcgccgcatttttgcactgtatctgcagggaaacggtgtggggaaaatcgcgcggctgcttaacgaggctggcattccgccgccatcggcctatcgcgccagacagcagggatgcaatttaccgcagccgatgccgctttggagcaagccgactgtccgccgtatcctttcaacgcagacctatgtgggcgatatggaacagggccgcgtgcgtaaagtgagctacaagtcgcataaaacagttcgcctgccgcagcaggcatggattgttgtgccggatacgcatcctgcaatcgtgagccgccgcgactttacggcggttcaggaacggctgggccgcagcgtcagggagcagcacaacgccccgccgcatttgctggccgggcttgtccggtgcggaatctgcggcgggaaaatggaactgacaggcacggcaacgcggcgatactaccgctgccgcacggcgcagaaatgccgtactgcctgcccggggcagccatatctgccgatgcaggaccttgaagcaatcgtgcgggagcggggtgctgcgtggatcggcactgtgccgaccgatgcggcattgcgtgcgctgttagagcgggcagtcatctgcccgccgcaggatggcaaacggaaaattgagctgcattggcggttttgaggcgtggggcggtacgccttcccaggtagggtagacctcactggatgcgacattcgcaatgtaggactgaaaacttaccgtcacattgccggtgttcgctgtgggcttgcccagatgcacggtgatctttttggggataacgacccggctcagtacactgccgggcagaacctcctccggtgcagggccgctgccgccgttcccggaaaacagcgtatggggcggtattgcaatgacctccgcttcgctgctgcgtgcagcgtcagggactgtaccgcgcggtaagagtgcaagccgtgcgaccgtctgctgcccgtcaaagacctgcacaccgtccagcacaaggggctgccagccgtccagtgcggcctctatgcggtagagtgcgtaggggcgcaccgccgtgttggcggcgtccagactgtaggcggcatcgggtgcgggcaggtcggcagcctctgcgcggccgtccgcatcggcggtcaggtgggcaagggcggtaccgctttcatccagtacggtcagggctgcccctgccaggggcgcggcctgccctgcggcagaggtatagatcagtatactgcctttggacatataaaaacacctcctgacccacgctatgcaaacgcgcacaactgtgctacaatagggggcaggagggacgattatgatatatctttccggttttcggttcccagatcgggcacaggaagcgaagtacatggcattcagcccgcgcgcgaggcagacctgttatgattcatactatccgtttggattgttcgaaggccgcacgctgcctgagctggactttcttgaaatcacgattctgtacggcggcaatggcagcggcaagacgaccctattaaatgtaatggccgatgccctgcggctttaccgccgtgcagagtataatcgcacgcctttttttgacgattatgcgcgcttgtgtgagccgcggactgcgcgccccatacccacaggcagcatgatcttgacaagtgatgatgtgtttgactatatgctcgatctgcgggcgctgaacgatggcgtagacatgcgccgtgagcagatgtttgcggattacaacgaccttcggcgggaaaagttccagatgcacggcatgaaggactacgaccgactcaagcaggtaagcgccgcgcggcgatacagccagtcccagatggcgcgccgcacattgcctgccaatgtgcgcacccgctccaacggggagagcgcattggcggtgttcagcgagcgcatccgtgaggatgcactgtatttgctggatgagcctgaaaacagcctttcgcccgagcggcagctggagctggcgcaatttttgcatgattctgcgcggttttacaactgccaatttatcatagcgacacactcgccgtttttactggcaatgccgggggcgcgggtgtatgatctggatgccgagcctgtcacaacacggaagtggacggaattggagaatgtaagggcaacatgggagtttttccaacggcataaagaggaatttgagtaaaacaaacgcccgcaggcggtggcagtcagccacagcctgcgggcgattcttatttttttcaggcagctgaaaaatcaagccttgttggcggagccgaacagctcgatcttctcgcggacggtggccttgatggcctcggcgccgggagcaagcagcttgcgggggtcaaagcccttgccctcgaggtccttgccggcctcgatgtacttgcgggtggcgtcggcaaagctcagctggcactcggtgttgacattgatcttggagacgcccagagagatggccttcttgatcatctcgtcagggatgcccgtgccgccgtgcagaaccagaggaatgttgtcggtggcgttgtggatcttgtccagagcctcgaagtccagacccttccagttggcggggtacttgccgtggatgttgccgatgccggcagccaggaagtcgatgcccagagcagcgatcttggcgcactcagcagggtcagcaacctcgcccatgccgatgacaccgtcctcctcgccgccgatggagccgacctcagcctcaatggacaggccgtggtcgtgcgccatagcaaccagctcggtggtcttggcaacattctcgtcgatgctgtagtggctgccatcgaacatgatggaggtgaagccggcatcgatgcaggccttggcaccctcgtaggtgccgtggtccagatgcagcgcaacgggaacggtgatgcccaggctctcgtccattgccttgaccatggcggccacggtcttgaaaccggtcatgtatttgccggcaccctcagagacaccgaggatgacgggagagttcatctcctgtgcggtgagcaggacactcttggtccactccagattgttgatgttgaactggccgactgcgtagtggccatcgcgcgctttcagcagcatattggtagcatttaccagcatagttcatacctccacatataacagtaacaatggtggtacaccgacccccggcgcaccattaagtctattataacccgactttgacaaaaaatcaacaggttttttctttgcggcagatgtacttttgtcacaagggcgggaaggcccggatttgcggcgcgatttggtgaaaatgtggggaaaccgaacggatttgcagggaaaatcggcgttattccgggttgacaaaggggtttatccgggctgttatgtggaaaatttgtccaccgtgattgttgaaaacttggttgaaacggtggaaaagcccattataaagcatctttttaacactttccacagagttttcaacaggtggaaaagtgcgccatcgtctacgctctgtataaacagcgatgctgcgacaaggtgaataaggcgtttgcatttttgacgcattttgaccggcaaagttgtaaaaaagcggctgcgcggccccggacggcgcaaaaaaaggtgacaaagcacaccgaaatgtggtatactgtttactgattataaagcatagtcgattactgtcggctttttacgatacaatggaggacactatggaaaaatttgcccgcgaacgcgaacagacgcccgaccgtgccgagcgtaccgatacccttgtatggggcaagaatgccgtgaccgagctgctgaaaagcggcggcgcggtggatacggtctacctgaccgatgcgatgcctcaggcggtggctggctactatacggccctgtccaaggagagcggtgcggtggtcaagcgcgtgcccgccaacaagctgcagaagatgtgcggcacgccggatcatcagggtgtggccgcccgcgcagccgaggtggcgtatgcgagtcttgacgatctgttcaaggcggcgcaggccaaggatgagccgcccttcctcgtcctctgcgatggagtcgaggacccccacaatctgggggctatcgtgcgctctgcgtatctgtgcggggcccacggtgttgtcatccccaagcgcggcggtgtcggcgtgaccggtacggtcatgaaggccagcgccggggcggccgcacggctgcccattgcccgggtgcccaatctggcgcaggcgatccgcacgatcaaggagcataatatctttgtctactgtgctgacctcggcggtgccccgctggccaagaccgacctgtccggcccggttgcgctggtgctgggcagtgagggcggcggccccggcgcgctgacccgcaagctctgcgatgcggcggtcacgctggagatggcgcccggtcaggcgaccggcgttgacagctacaatgtcagcgtggcggcaggcatcctctgctatgatgtgatgcgcagacggattgcgaagaagtaactataatacaggggggaggcaggggtgcctcccgccaaaaacgaagttcatccttttacaaagaggaatcaccatgccaagcaaacgtaccaatgattcggtcgaccgtattctggaggacctgaatatacagcaggcgcaggccggcctgcgggacagtgtcaccgaccgtcaggtcgatgagatcctgcgcagtgtaggcatcaccaccgcgcccgcacagcctgtgcccgaccgcagcccggcctccagtgcggatggcgggctggacgccctgctgcagcagcccgctgcggccgtgcagcctgcaccccgcccggcgcgccagacacagccgaccccctacacgcccgcgcgtcagcctgtgcagcccgtgcagggtacccggccgccgcagcagacgatgccgaccccggcggctgcggaaaacacgaccggcagtctgggctatgacggcgatacgacccgcaccggcatcatcaaggattttctgcttaaaatggcgccggacggcagcgctgcggacaccgatgccctgaatcagggcaaaaaccagttccagaagttcttcaagaactcggtcgcggtcgtgcccgatgaaaagggccggatgccgaaacccgaaaagaaaaagcgcagctttctcggcctcaagcatgccgaggatacgggggcatttgtgcccatcaatgtctcgctcagcggtaaaaatgcggagtatgaggacgaccctgccatgctgcaggagtattatcccgatcaggagccggagcagccgccccagcgcagcgcagagccgcgcagaaaacagggctttctgggcggttttttcgccccggaggaggagaccgaggagctgatgatccccgaggagcgggcggaggagcctgcccgcaccgccccggcccctcagctggtttgcccggctgagtcggagaccgaacgcgaggacccgacgcaggaggtctggcgcagcaaatatacccgcccggcccgccgcagcgcggaggagcagggcggccagacgatggactttatccgcagcacggtcgatcaggcccagaagcacccgtccgatacgctgaccggcggcatgaccggcacgatctaccgcaaaaagcgcaatacggtcgaattcacccccggcaaaaagccccagaccgccccgccgccgcagcctgtgccgcagcgcagcggagagcctgtgggggagccgatcgaggtgccccgcagccagccggtcccaagcggctttacgatgcagatcggcggtctggacaccgtcccgacggacagcacgcaggagttcatgagcgcctacaacgccgtgcgcccccagcgcagaaaggctgcagcccaaccccgccccacgcccgccgcgcaaagtcctgcgcccccgcctgacgctgccggggaggacccctacgaaaacaccgttgttgtgggggatgccacgcaggaggaaaatcgccagaccggagagcggctgctgccccaccgccagcgcgatgatgtggatcagctggtcgataccctgaccggccgcatcagcctgacgccgcagccgcctgctgccccggcccataccggttttacccagagcctgagcgccccggccccggcgcacagcggctttacccagaatctcggcagcgttgctgcggcacctgcccgcacgggctttacccagcagctgggcggtgcgcctgccccggcacagcccgcccacagcggctacacgcagaacctcggtgccgccccggcggagccgaacacctctgcctttgtcagtgacattgccaatgccatcaacagcggtgagccggcaggggataccctgcgctatgaagatgccgccgcccggctgacggcctcgctggccgaggacgccgcggctgcccgcacccacacccatatcccgaccgccgccgaggtcaggcaggctgccgcccgctttgccggccgtgccgaggatgagagcgaggacaatgcggtctctccgtttgaaacggcggagatccccgtgccccacagccgtgagtatgagcgcgccgaggatgcccctgcggtgcgcgctgagctggccaaaaagctgacacaggccacggtggcctgccttgtgtcgggcgtggccgctgcggtcatgatcgtgctggcggtgctgccggtgcgcccggccgcgctgggcgatgccatggtctacccggcagtcatgcttgtgctgctgctggcagcctgcgccgccaactgggaggcgtttttcagcggcatccgggggctggtcaagaccccctccccggacagtctgtccattctgcccgcaatcggcgcggcgctgcagtgcatcctgatgctggccaaaggcggctacacggccaatctccccatgctggcaggccctgcggcgctggtactgtgcctgaacgccgtcggccgccgtttgaacgctgcgaccatcagtgacaacttccagctggtcagcgccaaggtcgagcatgccgttgcctaccggctcaaggacgccggggcgctcagggctgtgtctcagggtctggccgagccgcaccccagcgtgctggtcagccgcccgacccagatttttcgcagctttttggccaacagtgccgcacgcggcaccagcgacaaaaaccagcagcagtttgcatggctgctgggcggctgcagtctggcagccttcctctttaccgtcatccgcagtaaggacccggttctggccgccacggtcatggcgggggtcggctgtctgggggcaccgctggccggtacgctgctgtcggctctgcctgcccgcatgatgcagcgcagcgccgcgcaggtgggcgcggtcatccccggctggcgcgacattcgccagctcgggcgcatcaatgtcattcaggtcacagcgcgtgacctcttcccggtcgggtgcgtttcgctcgccggtatcaagcccgtcaagccggagcatatcgacaccgccatcgtctatgcggcctccattctgtcggaggcaggccccacgctgcgcgatgtctttatgaacatgctgggtgagaaccgcagcctgctggccaaggtcgatgaccgccagacgatctacggcaagggctatgtcggctggatcaacaagcgccgtgttctggtgggcaaccgcgccctgatgcaggagtacggcatcaagattcccagcttggaatatgagcagcaccataccgtgaaccagcgccgggtcatctatctggcggtgtccggcaagctgtttgcaatgtttcaggtggcctaccagcgcgaccccgacacggcggccgtgctggaaacgctgcaccatgcggggctttctctcgttgtggactgcgatgatttcaactgcgatgtccgcttgctggagacagcctacagtctgcccgccggttcggtcaaggtgctgacgagcggtgagcatcaggccatcgccccggcggtggcgtggctgcccgaaagtgagggcaacatgctccatctgggcagctttgccagctttgtgggcggcctgcaggccgcagccggtgctgccgagggcgagcataaggctgccatcgtgctgacggtctctgtgctgttcagctgtgcggtcggcgtgctgctgaccctgacgggcggccttgtcaccctgccgctggccggcatcgtgctgtatcaggcagcgtggtgcgtgctggcgctggtgttcccgcttatgcagcactactactgataaaaacagggcagggccgtcccgctgaaaaggggcggtgctgccgtaggaagggggaaaaacccgtgtaccgcacacgcgaaaaacagatgtcgatctacgattatctgccgccctaccatggcgagctgtgcggcgccaaccgctgggtgcggctggctgccgagattgactgggacgcctttgaaaaggcctacagtgagcagtttgcccccggcggtgcggtggcactgcccgcccgcgtggcgctgggctgccgtgtgatccagctgcattacggcgtcatcgaccgcgaggtggtgtcgctggtgcaggaaagtccctatctgcagtattttttgggatttgagaagttcagcgacagcgttccgttctcagcccgcacggtggcgcggttccgcgcccgtatcccggataaggctgtgcgcccggcggtccgcctgctgcgcagctaccgatgaattttagcttatataatagagaggtattcatggaattgtttttagacgccctgctggacgccttgatcgacggcgtgaagatgctgccgtttttatatctggcctacctgctgatcgaatggctggagcgccaccatggggaaagtattgaggaggcgcttgccggcggcggccgctgggggttcatccccggtgcgctgctgggctgtgtgccgcagtgcggcttcagcgccgtagcctccaacctgtatgcaagccgggtcattacacccggcacggtgctggcggtctttatcgccaccagcgatgaggcaatcccgctgctggcggccgagccgtcccagtgggtcacgctggtcctgctgttggcctgcaaggtggcgtttgccattgtgggcggctggctgctcgacattccgctgcgccatgttctgccgcattccctctacggcggctatgaaggccacgccgatgaggtggactgccatgaggagcacgaggggacaagcagcatctttttggccgcgctgcgccacacgctggaaattttcgtctttatcctgctgttcagctttatcattggccttgtgtttgaagccttcggcgaggagcccatcgcggcggcgctgtccggcatgggtgtgttccagccgatgctgacggcgctggtcggccttgtgcccaactgcgcggtcagcgtactgctggcccagctctatgtgcagggggccatcaccttcggcagtctgtttgcgggccttacggccggtgcgggtgtcggtctggccgtgctgtggcgggtaaaccccagctggaagcagaacctatttatgacgggcctgctctgggcgatcggcgcggcggcaggcatgctgctgcagatactgccgctgtaaaaaaacttggcttcccccgtgggggaagctgccgcccgcaggcggctgatgagggcagagcttctgtcataacctgtttccggacgattgcggaaggtcggccctcatccgcttcacttcgttcagcaccttcccccacagggggaaggcttttacttagaaggaggaatccccatgcaatacagtattgaaaatgagatcctgcgcctgacggtggatacccacggtgccgagcctgtcagcgttcttcacaagccgaccggggccgagctgctctggcagggtgatcccgcagtctggggccgccatgcaccgatcctctttccctacaccggcaagctgaccggcggcaagatgatcgccaagggggtagagtatgccggcggccagcacggctttgcccgcgatgtggagcacacgatgacccaccatgcggaaaatctgctggagtttgagctgcacgccaacgccgaaacgctgcccaagtggccctatgcgtttgtgctgcgctcgacctttacgctggaaggggagaccgtccaccacacgctgaccgtcgagaaccccgttgaggaggagctgcgctttggcatcggctaccacccggcctttgcgcttcccttcgatgaccgccatgtcaccgaggattacgagatccgctttgacggcatcgagtccccgctctgcgtcagtgcccagcccaatggcctgctgaacggccagagctactacctcgcccgcaatgtcgaggccatccccttgacggatgacctgtttgacagcgacagccatgccatggtcaacctgcgcagcggccatgtctcggtcattgagaaggacaccggccgcagcgtcatctgtgatgtgtcggattttccctacacgctgatctggtctgccgccaaaaagccgctgcactttatctgcattgagccgtggcacagcctgcccggtgaggaaaacggccccatcgactgggagcagcgcccctgcgctgcctccctcaagcgcggagagagttggtccaccaccctgtccacgacctttgtgcgctaaatgaaggcgctgaaaaaatatcgctggccgctgaccggcgccctgctcggggcgctggtctttctggctgtgtacggcgtccgtatgctggacccgaccagcgttgactggattctgaacaaccctagccccgacccggcccagcactatctggggtgggagctgttccgccgcagcccggtgcatctgccgtacatcggcgcgaattataacgcggtctacccgttccggaccagtgtgctgtttacggattcactgccgctggcggcgctgctctttaagctgttgggcggggttctgcccgcgcggttccagtatttcggctggtggggtctggcctgctacatgctgcagggcggcttggcgcaggcggtcatagcccgcattgccggtgtgcagcccacggttgaccgcagcggtagcaaggcagccatcggtgttatcatgagtccacagcagacggccaagctgtggggcagcgcggcgggtgcaggattacttgtgctgttcccggcgctgacaatgcgcatgtttgcccacacggcactcgcagccaactggcttgtgctgctggccctctacctctggctgcgcagtgacgagcttatgcccacgacccgccgcgcctgccttgtctgggcgggcatgggtctgctctgtgcgggcatccatctgtactacctgccgatggtcggtcttgtgcttgtgggatacgcggtgcgccgcgccctgcaaaaacgcggcccggcggctgtgctggcaccgatagcagcgttctgcgctgcggcgctggcggagttggtgctgttgggggcgttcgctgtcaactttgcgggctactccaacgactacctcagcggcgcggactacctcggcctgtttgtgccgtggctggcgcaaagctgggagcaaaatgtctatgcaggcgtcggaacatcgctggccgtggtgctggcggtgttcggcatagtctgcaacgcccgcaaggcggaaaaattctttgccgcccaccgcgactggctcattgccggcgctgtggtgctggtgctggatttgattgccgcgggcggaaacgccatcacggtgaacggaaaaacgctgttcaccgtgcccatcccgcagtttttgatgaacttctgggcaatgttttcctcctgcgcgcggctggcgtggttggcaggtatgctgctggctgccgttggctgcgggttggtgctgcgcttttgggataacggtgtcgcgcccgccctgatgctggcagtctgcgccgtggcgcagggctgtgg

SEQ ID NO: 14060 - DNA, 1171 bp, Unknown
  gut microbiota DNA sequence
caatgaaggacaagcctttcctgctgatggagtccagccccagctttaccaactggcagcctgtttccaagcaaaaaaagcccggcattgcagagcttgccgcgttgcagacggtggcgcacggcgcagacagtgtgctttatttccagtggcgcgccagccgcggcgcggaggaaaaactccatggcgctgtcatcggccatgatgggcgggagggtgcccgttcttttacggagactgcgcaggtagggcaagaactggagactttggccgaaattacagcggtaaaacgagaaaagcaggctgcgatagtccatgattggcagaataagtgggcgctggaaggctcctgcgggccgcgcaatgccggtatgggctattgggatgagctgaagcggcactataatgcccttgcacgggagggcattgccgtggagtttgttgaccagaatgccgacctgacaggctatggcttggtcgtggtgccgatgctctacctgctgaccgatgcttttgcgaaaaagctttgcgcatttgcgcaaagcggcggaacggtcatcgtcacttactggtctggcgttgtcgatgagagtgatctctgccgtctgggggacacgccctacggcctgaccgaattgttggggctgcgccgcaccgagattgacggcatgtatgacggggaaacccgccgctgcgtgccttcagctggctgcacactgcctgcggcactggcatccaccctgtgtgaggtggcggcccttgatgagaaagatccggcagagccgctcagcctgtatgaggaggactattttgccgggcacccggctgcggcggtccatcgatacggtaagggtcgtgcgtactatctggccagccgctttgacgaggctttttatcgggcgttttatcacgatgctgcaaaggaaatcggcttgagccctgcttggccggaggctctgccggaaggagtcttggcggtgcggcgcggcagctttgtgtttgtgcagaactgcacggaacagcctgccacggtgggaaacactgtgcttgaccgctaccggactgcagtttggaaggacatggaccgtattttttgacaaaatcggcctgttttagcgttctgctaaaaagcagaacgctttttgttgctttcggacattgacaacgaaag

SEQ ID NO: 14061 - DNA, 15079 bp, Unknown
  gut microbiota DNA sequence
gtgagattgttggccgcgtaggccgcgttgaaccatgtcagggtcaggataccggaatcatctgccgccagcacgcggctcatgacgcgcccgccggtgatgcggcggggcggctccttctgcagcacggtggcgcgcacgcagcagtcggtgtcatagggcgctgacacaacggtgtagggctgggtgtagtcaatgtatttgcgcgggtagcacaaaagcaggtcgcggatggtatggatgccgagcttttcaaactttttggcaaaggccgggccgacgcccttgaggtattggacggaatcgttgatggtggccatcgcgggacctcctttcgcggaaggttgttgtgtgggggccgatgctcgtcatcggcccgcggggcaaattatataccaaaaaaggcgaactcggttcgctcccaaattcgcctttttatgttatagcgtccggatcactctacagagatcatgtagtagtagaccggctggccgccgctgatgtggctgacctcaatgttgccgccgcacttggcgcgcaccagatcggtcgtcttttcggcgtcctcgtcactgacatcacagccggaaatgaccgtgatgaactgggtgtccttcttcttcatggcgcgggccagacggtaggtcgtcttgaccagatcggtgccggtggccacgatcttgccgttctccagcgccatcagctcacccttgcggatgggcttgccgtcaaactcgctgtcgcgggcggcataggtgaccagaccggtgttgacatggtcggccgcctgcatcatggcaacggcgttctcctccggcttcaggtcggggtcaaagttcagcatggccgtcatgccctggggcacggtgcgggtgggcagcacgatgaccttgcggtcggccagcttctgggcctgctcagaggccatgatgatgttcttgttgttgggcagcaccagcacggtcttggcaggcacgctctggatcgcagccagaatgtcctcggtggaggggttcatcgtctggccgccgctgacaacggcatccacgcccagatcgccgaacacagccttcaggccctcgccggcggccacggccacaaagccgtactcgcgctcggggtcaacggcggcgtaggtgaactcgctcgtctggttctcctcggcctcggcctgcttctccagacccttggcctgcttctggcgggcgaggaactgctcatgcatgttctcgatcttgaagtcggtcaggtagccgtacttgatggcttcgctcagcatcatgccggggtcggaggtgtggacatggcagttggccacatcatcgtcctcgatcacgacaacggagtcgccgttggactcaaggaaggcgcgcaggcgggtaacgctggcatcggcatccttgtgcagcaggaactgggtgcagtagccgttcttgatgtcctcgaccttcatcaggtcatcggcaaagacgcccttgccggcggcctcgctggagaccttgggcttggcggcaacctcggcaccggcgatgatctcgccgccgtcgaatacctgcttcatgccctcaaagatcagcatgatgccctgaccgccggcgtccacgacaccggcctttttcagcacgggcagcaggttgggggtatcgtccagcgcagcctgaccggcctgcagggtggcgtcccacatggcggggacctccatgccggtgcattcggcagccttctcggctgccaagcgggagacggtcagaatggtgccctcggtgggcttcatgacggccttgtaggcggcctcgacaccctgctgcagcgcggcggcaaggtcggcggcggaggcctcggtcttatccttcagcgccttggagaagccgcggaacaaaaggcttgtgataacgccggagttgccgcgtgcgccgcgcagcatggcggaggcagcggtcttgctggcctcggccacggtgcagctgtcaggcatggcctccagctcggcgcgggctgcgccgatggtcatgctcatgttcgtgccggtatcaccgtccggcacggggaaaacattcagctcatccacgcgggtgcgctggttggcaatattgttggcgccggaaaggatggcgtcacgcagggtctggccagtaatcatggtttcgttacacctcatattttctgggtaaaaacagtctttagtcggcaatgacatcgtccacatagacatcaatgcgggcgacctttaagccggtggcaagttcaacttcgtctttaacgcggtgggtaatgctctgggtgatggtcgaaatgttcaggccgaacccgaccttgatgtgcagggcgatgaccagcttgccgccctcctgcgtgacggtgacacccttcggcggcagactgccggtgcgcagggcgctgcgtacaacgctttcggccggggcctgacccatggcggcaatgccgtagcactgcttggcggcctgctccaccaggccggagaagtagtcgttcgtcagggagatatgtccatagggattgaccttggtgatcatctgcgatcctcctttacagggttagctgcggctaaggccgtagctgcacgatatgaatcattagctattatacaccttttttctccgcttgaacagagatttcagagaaatttattttgtggcgcggatttaacattccattcacaaagtttacaggcaaagcgtatatactggttacagaagtatgacaacattgccaaaggagtgcagtttaaagcatgaaccttttattctttttgacacccaagcaggatgtcttgtacatttacgaggatttcaccctgcgccagacacttgaaaaatggtcaaaccagcgctatgccaccatcccggtgctgaaacgcaacggcgaatatgtgggcagcatcaccgagggggatatcctgtgggcgatgaaaaacctgcacgggctggatctggaggccagcgaggatgtgccgatctcaagctttccccgccgccgcgactataagcccgtgacggtcacgaccgatatggcgaccctgctcaaggcggccatcgaccagaactttgtgccggtggtggatgaccgcaatgtgtttatcggcatggtgcgccgtaccgtgctgctgcgggagctgtacgacaaatatacgaccctgccgcccgacaagcggttccaaagcagccacccgccgatgtaagggcttgcaatccgccgcgcgttgcggtataatcagcacaacggacagagaagtcacacagggcttctctgtttttttagtttgagaggtggagaaatgtgaagaaacctttgattgggatcgtgccgctggtggatgaggcgcgcgagagttactggatgctgcccggctatatgcagggcgtggagcaggcgggcggcgtgcccgttatgctgccgctgacggctggtaccgccgcactgcggcagctggccgatacctgcgatggctttttgctgacgggcgggcaggatgtttcccctgccctgtacggcgccgcgccgacgccgcagtgcggcgagacctgccctgcgcgcgatgcgatggaggcacggctgcttgaccttgcgctggcggcggacaagcccgtgctgggcatctgccgcggcattcagtttttgaacgtccatttgggcggcacactgtatcaggacctgcccgctgagcacccttcggcggcaaatcaccaccagacgccgccctacgatgcgccggtacacagtgtgacgctgacggccggcagcccgctttgggcacttttgggcaaggatacgctggctgtgaacagcctgcatcatcaggccataaaaacgcttgcgccggggctggcggctatggctgtctcggaggatggactgacggaggccgtatgcctgcctgataaaaggttcgtctgggctgtgcagtggcaccccgaattttcgtaccgtgtgaatggggacagccggaagatttttaaggcgtttgtgggtgcgtgttaaaggaaaagccttcccccaaggggggaagccaaaaaaatcccttctgtggtgtcacaccacagaagggattttcttttattttgctttttcagcagctttttttgcttttcgctttttgcgcttgcgggcgatgaacaaaatcaccagcagcagtgcggctgcggcaccgcaggcggccgcgagcaggggcaccttgcttgcgggggcctgcacggcggcaaacgccgtggtgcccgcaggtgcggtgcaggtcaggtagctgccgtccacactcgtttcagcctgctgccagcctgcatcggtcttgacccacagcacggtgttgtcggttgtctcgggcggcatgtagcgcagggtgtggcccgtgtcggcgggcagctccagcccccaggcctcgaccagagtgccgagggtctggggcgcgtcgtcgagctcatgaagcatcagctcatcggtcgtatcaaagctgccctccaccagaacgatggagcggccgctgcgcttctcctgactctggcgcacagtgttcatgctgttgtactcggcatggatcgtagcgtcaaaggtcatgttggtcaggtccacatcctcccagctgccgtactggccctcatgatggggcaccggcggaagctggtcggtcggaaaatcgctgccgtagggaatgtaatactgctgcaccagtgagtcatcctcggtcacaaagcggatgcagaggcttgagaaatcgctgggcaggttctcctgcgcggcaaaatccgcatagggcagcggctcggcaatgcccttgtagcttacgctgtcgatgccggcggtgcccatatccacaaaggtgttgccggtcacgctgccgtccagcgggtcgtttacgataccggcgatcgcgccgagctgctcgctgccgctctcgatcatgaccatggcgcggcagttttcaatggtagcgccgctgccggcaataccgcccacctgcttggagccggacaggcggcacttggcgtagctgtcgcggatgatggatttgctcacaccggccacgccgcccacgccggtggcgtcctcggcgtccaccgtgccgaagccgcggcagtcgatgacagagcccatctcggcatcgccgacaatgccgccgacgcgctgttttttggcgctgacggtgccgtagttggtgcagtcgcgcgccacaacacgggtcttgaaggtgaagttcagcgactcgctgccggcgatggtgtagtcgtcctcggggtcgaggtcattctcgcgggccattgcgccggtaatgccgcccgcattgatgtcagcgtagacagagccgctgttgatgcagttggagaccttggcctcgacatcgctgtcggtgtcctcatcggagatgtcgtccacgatgtcgtctgcatcccggttgacattctcgctggcgccggacagcgtctggccgatcttgttgatctggttggagatggcgcggacatcgttgatcagcgcctgagaattgccgctggcgcttgtattgaggctgctgacaatatcgccgatgccggtcaggttgctgctcaggtcgtttttgctggctgtgatcgcgtcacggttagtcagctcgaccttggggatctcaacatctacagaatcggggatggcgtcgctgatgccgtccaccagatccttggcgatgtcgttgtttcccggctcctctacaatgtagccggtatctgcctgatccttatccggcgtgggcatggggccgacggtcggatcgctgtcatccgcggcggtgccgggatcgggctggctgtggacctcgcgcgcagtgtccggccccgcctgctcggcgggggtatcctctgcggcgggctgctcgggctgctctgcaggggtgtcctccgtcacagcgggctgctcggccggggtggtgtcggcagactcctccggcgcagccgcaggcgtttccgtctccgagctgctgccggtgagatcaccgatggagtagccggggtcgacgatcgcgccgcccggctgcttagtcgcatcgggatcgcttggatcgccggtggtgtccttcagattctgcttgaactgggtcagatcggtcttgatggtctgggagctgatggagaggccatccgccgcctgcttgagcagattctcgatggcgctgcgggagctggtgacgctgttctgcagattgtgcagttggttggagaggtcactgctggcggcgcttgcgtcatcgcaggcgcggtcgaccagtgcctgcagggtggtcatctcctcgctcagctcctgcagggtatccttggtgtactgcagggtgctgctgggctccatctggcccacgatgccgccgccctccttgcgggcgtagacggtgccgtagttgacgcagccctcgatgtagccggtctggctgcctgcgataccaccgacattgtagcccatgtgctggtagccaacggtgccgcggttcatgcaggcgcggatcacgccgctggactggcctgcgatgccgccgatgtctgtgatcgaggcggcgttctcggtgccgatcaggtcgccgagggtcagctccgacaggtcaatgtcgttctgctccaccgtggtgttgacgctggccgcattggtggagttggcgatgatgccgtggttctgcccggcaaggccgccgatgaagtgggcgccgtagacgctgccggtggtggtgcagctctcgatcacgccggtgacaaggttattgccggcgatgccgcccacgatggacgcgccggaggaaacgccctcaaaccggcagttgtgcagcgtgccggcattgctgccggcaaggccgcccacagtggtgcggctgccggagggcatggcgcggccgcgcacgacaaggtcgcggacattggcccccttttggacatagcggaagaaaccgatgaccgagccgtcatccacaaggctcaggccggagatcacatggccctgcccctcaaaaacgccgctgaaggacgggatgccggtaaagccgctgccggtcagctcaaggtctgtgtccagcacaacggtgcggttctcgctccagctgtccagacggcagtagtcggccagctgcaaaagctcgtccaccgtgccgatgtggtaggtcgccttggcctccggctcagtatcgctctccccctccgcaaagacgggcagggcgaggctcagcgtcaggcagagggcgagcagcgcagcccaaaggcggcgcgttaaatcagaagtgcggttcattcggcgtcgcctcctttcgcggtgtcgtcggtcgtgtcggggtcatccgcagcttcgcggacattctcctccgacaggtacatgtcaggcttttcaaccgtgagctcggtgccggtggcaatgctggcgttgaactggccgtgcagcacacccttgatctcggcatccacaacgccgttgatgtagccgcggacgcggccgttgacatgcatcgtgccgctggcggtgcgggtgatgccgccgacgcccttcatctcaaagctggtgcgctcgatgatcgtatcgccgaggatcaggatctgcggcagcacaaagaggaccagaaggatcgaaacgatggtgccgcggcccagacaggtgccgatggcggagataacagggttcgtggtcaggacgctgatcaggataccggcggatgccagaatagagccggaggtgaagattgtcgggaaggactcgttcagtgcggcgacgatggcctccttcgggcgcatgaccttcttcaggtcggtgtagtggctcgagataacgatggcgtagtcgatgtttgcgcccatctggatcgagttgacgatcaggtagccgaggaagtacagcggggtgtgctgcagatacggcaccgagaagttgatccagatactgccctgaatgacgatgatgagcagcaccggcagaccggcagacttgaaggtgaacagcaggaccagaataacgaacagtgcagacagcacactgatgagcaggttgtcctcaccgaaggagctggacagatccatggcgctggtggtgttgccgacaacatagaacgaatccctgtcgtagtattttccgatgatgtcgtgcatccggttgacaaaggcaaaggtctcgtcggtttcctcgggcaggttcagatagacgaccatacggctgtagctgtcgctctgcagctgcttctgggcctcgtccagctggtcaaacaaatcgtccagtgtgtcctgtacatcgccggacagtgtgatgttgccgtcatgcatctcctgctccaaaaagcggaacatatcataaagcggcacgcggtaatcgtccagaccgttgatgatctcgccgtactcgtcatgatcgacagcgtaggcgccgtacagcgccttggcaacctcatagtccagatcagccagctcggccagctggcgcggggtcagcgcatcggtcagcacatagccgtccattgcctcgatgttggcaaggcccatcgtggatttgacctcggcgcagctgtccagctcgtcaaggatcgcaccctcggcctcatagttgccggcaggcacaatgacggcgaccatgttgctggagccgaactcgtttttgatcttctggtaggcgatctggcgcgcgctctgcttggctgtgaccagatcggtgaaggtgtagcagtaggggcagaggttggcaaagacggccgctgcgatgatgacaacgccgaaaatcggaggaatgacaaagcgggtcttgatgtcgaatttgccgaccgccgtgatcttgggaatgaggttcttgtggcgggttttgtcaatcagcttgctgaacaggaccagcaggccgggcatcagcgtgaaaacgcagagcatactgaacaggatggccttgatcagcaccgtggcaaggtcgcggccgatgccgaagtgcatgaaggccagcgcggccagaccgctgatggtggtcagcgaggaggaggaaatctcggggatcgccttggagagggccgcaatacaggcctcgcgggtgggcagcgtctcatgctcatcgctgaagcggtggcagaggatgatggcgtagtcgatggccagcgccagctgcaggataacggtgacagagttggagatgaagctgatggtgccgcacaggaagttggtgcccatgttcagcagggcggcggcgccgaaggtcatgatcaaaaccgggacctcggcgtaggagcgggaggtcagcgtcagcacaaggacaatgataacagccgcgatgatgacgatgacgaccatctcgctttgcagatcggccgaggaatcgtagcctacctccgagtagatcgaggtatcgtagctgccctccagctcgtcacggatctgctgcagggcgttctcggcacgctcgtcccctacctcagcgtcaaagctgacggaaaagagggccgatgcatccttgtaatgatccttggtgtcatcaaattcgaccgtagagacaccctcgatgtcctcgatctgcgcctgcaggtcaagtgcggtgtcgtaggtgatgtttgagaccatgacattggctgtgccgtaggtaacgaagttgtcgttcatgacggtcaggccctgacgtgtctcggtggtgtccggcaggtaggtcgtgatgtcatcctcgaccttgacccagccggaggcaatgatgctgaagatcagcgcaaatatgtataacagaaagaacaggttgcgtttatcaacgataaacgcagcgagcttttccatgccgccgccttttgccttttcattctccaagggtatacagcctcactttcccattatagataccaaaaggatactacattattatacgaaatacaagcctgcaggaacacggtcaaaactgtgggaatgtacaaagaaacgatgaagcttttgttaaggtgtacaaacaaaagagccttcccccacagggggaaggctctcagacgaacgactgcggcgcaaaacaaaaagtaccgtgcggtacaaaccacacggtacttgaaaagctattgggtaagctaaattacttcagctcaaccttggcgccgatgtcggccagcttcttctggatgtcctcagcgtcagccttggaagcctgctccttcagcttggcgttcggggtctcgaccagcttcttggcctccatcagggaagcaccggtcagctccttaacggtcttgatgacctgcatcttgttagcgccgacgtcagccaggatgacgtcaaactcggtcttctcctcctcagcgggagcagcagcaccggcagcagcgggagcggcagcagcaacagcagaaacgccgaactcctcgcagatggtgtcaacgagctctttcagctccagaacagtcatagtcttgacagactcgacaatggcagtgatcttctcagaagccatggtagttacctccataaattttatagttttaagcggcgcggtttgtattcaaagagcgctgcgccggtgcgctcaacctgcttgacctgaagtcaggcagcagtctcgtcctgcttgtcgacgataccctgcagggcaacagccagaccaccaacgataccgttgagggagccagccagcatagagagcaggccttcgcggttgggcatggtggacaggctcttgacacctgcagcatccatgacaacaccatcgcagaagccacccttgacgacaaagcgcttggacttgtcggcgtcagcaaacttgcacaggatgcgagcagcagcagccggatcctcagcagacagagcgatagccgtgtcacccttgaagcagtcggtcagagcctcgtactgggtgcccttgacggccagacgcagcatggtgttcttgacgaccatgtaatggacgccagcctcacgcagctccttacgcagcttggtgtcgtcagccacgctgatgccgttgtaagcaacaacaacaccggccagagaagaaacaatcttctcgttcaggtccttaacaagagccttcttggcttccagaatctttgcactgggcatttgaaattcacctcattccacttacagattggtttcggtaagcggcttttttgtgatgtacagaaaaaagccccttcccgtcgccgggaaagggcttgaaagcattgcattcaaacgcacgtttctcggcaggtgggatattctcccgttatgccttgcggcacctgctgtctcaaaaacagcttaataattatagcacgcgaacgtgcgtttgtcaatagagaaagcggaattctctacttaattcattgcccatgttcatgggcgacccatagcggaacgccgcttcgcgtcgtttaatggagcgcgcatatgcgcaacgcgctcaattaaacaccgtacttgttggtagcaacgcggacgccggggcccatggtggtggcgacggtagcgctcttgaagtactggcccttggcagcggcgggcttagccttggcgatggcctcgaggacggtgtccaggttggtcatcagcttctcggcgccgaaagaggccttgccgatgggcacatggatgatgttctgcttgtccagacggtactcgatcttaccggccttggcatcggtgacggccttgccgacatcgggggtaacagtgccggccttcgggttgggcatcagaccacgggggcccaggaccttaccgagacggccaacgcggcccatcatgtcaggggtggtgaccaggacatcgaagtccagatagccgccggcgatcttggcgatcagatcgtcatcgccgacctcctgagcgcctgcagcctcagcggccttggcagcgtcgcccttggcgattgcgataacgcggacattcttgccggtgccgttgggcagaacaacagcgccgcggacctgctggtcggcgtgacggctgtcaacacccagacggacgtgcagctcaacggtctcgtcgaacttagcggtagcggtcttgcagcacagctccagggcctcggtgggatcgtaagtcttgttgttctcgatcagcttagcagcgtcgatatacttcttgccgtgtttcattgcgtattaccctcctattcagccctcaacggtaacgcccatgctgcgggcggtgcccttgatcatgctgacagcggcttccagagaagcagcgttcaggtcgggcatcttggtcttggcgatctcctcggcctgtgccagcgtgatggagccaaccttgttcttgttgggcacgccggaagcagtgtcgatgccggcagccttcttgatcagaacgggcgccggaggagtcttggtgatgaaggagaaggagcggtcagcgtaaaccgtgatgacgacggggatgatcatgcccatctggttcttggtacgctcgttgaactccttggtgaacgccatgatgttgacgcccttctgacccagagcaggaccaacagggggagccggagttgccttgccggcggggatttgcagcttgatgtagccagtgattttctgtgccataatacttgcacctccaaattttgtggtgagttgcggcctgcggtgcagacctcccacgggcgtgcgacctccgcacaccctataaaaaccgtaccccggggtgttccccgttcgcggcctttaccggaaactgggtgtcctgaaaaaatcagaacagcttgacctgatgcagctccagctctgccggaagctcgcggccaaacatggtgatcttcacgcgcaccttgcgcgcaggaatgtcgatctcctcgaccgtaccgacagagccttccatcgggccggccgtgatctcgacagtatcaccgaccttgtactcgacctcaaggtcgacggtggtttcgacgcccatcttggcaacttctgcctcggtcaggggctcgggcttggactccgggccgacaaagccggtgcagccgcgcgtgttgcgcacgatgtaccaggtgttgtcgttcatgaccattttgacgaagacataaccgggatagagcttcgactgaacctctttctcgccggtcttgttgccgtgcttgtcaaaaacttcttccatgcgggtctcggtcggaacctttacatcgcagatcagatcctgcagatggcggttctccaccatcgtcataagatccgtagcgaccttgttctcgtagccggaataggtatgtgctacataccagtttgcttgctcagccatggtctttgcctccgctcaacgcgctcaggcgccgatcaacaggtggatggcgccgccaaagatgagatccagcaggatcagcacgacagctgcgactgccacgaccacgataacggtgatcgtattggtcttgatgtcgcccttgctgggccacacgacctttttcagctcgctcttcgtatccttgaaatacttgccgatccctttgaaaaagttcttgactttaccgaagaaggaaaccttcttcgcgccgtcgttctttttgggcttgtcgctttgagtctgggcggcagcggtggctgcttttttatctgccatctctaagctcctatcctcacttggtttcgcggtgaagggtatgcttcttgcagaaacggcaatacttcttcatctcaagacggtcgggagaattcttcttgttcttctccttgttgtagttgcgctgcttgcactcagtgcaggccagggtgatcttgacagtcattgttcggcacctccattatcggttaataagcctccctcgcgcttgcaggcgcccttgaaaaagggcataaaaaataaacccgcaaaagaggtgctaccataataacacgactgcgggtttaagtcaagcaggtttgcaaatttttttgtgtttttttgacgccgtggcgaggaacgcaatgtctgggcgggcattgcccgcccacaggtcgtcgggtacgccgacctactacgataacaaatcacgcaccgctgccattcccgcatccgtcaagcataccccgcccttggctttggcggtttcggcggttacataatccacagccggcgcagggcgggtgctgagataagtcagcgtatcttctaaggcgcttacatcggcggccagcaggtcggtcaaaaggcgtgcgctctggctgcgcagccctgcggggaacgccgccaaaagcgccgggttctgccgggcaaaggcggcccagacggcggcgcgggcatcggcctgcgccgaggcgcctgtcagcattccctgcattttttcgatcagcgcccccgcctgtgcggcggtgcattcggcaacaggctccctgccgtagcccagcgcctgccgtgcagcgggcgtgagcagtgcggctgtgtcgaaccggaccaaggcatcggacccggcgcaggctgcccatgtcgcgggggtggcggcgatataatgcagcgcaggtgcagcgctctcccctgtggccacggtgccgcagagcagctgtgccgcccgcccggcccctgcggcaagggtacagtccgccagtgtagtcgtgccggcgggcgcgtccacgcgcagcgagccgggcagtgcgcagaaggtcagtgtctgctgcgggccgtctgcccggaccagcaggaaggcaggctcctcctgctggatgaccagcagaagggggaagatcccctgcgcgccgggctcaatgcgcagggtgctgtctgcggcggaggcccggcgcagaagctgctgcttttggtactggtcggcaaaaaaggccaccgtcaagatcatgggcagaagcagcagcagcgtcagccccagactgtaccagaagatcccccgttgagaacgcataacccacacaccccttgcaaagactatgcccagagtgtagcccggaagggctgcgcttatacacgaaaaaaaggagtgcttggtatgtttgatgtgtttggcccccacggtgccgaggaggagcgcgaggcgctctggaccgatttgagcgagatccccgatgagcattacagcgaggagaatccgcagcacaccacgcaggaggtcatcgttcccccggcgcaggagccatacggcccggcaatcgtgccgccggaggaaaactgaacaggggcgcacactgtgcgcccctacataaccgtgttatcgtattactgccaccgctttatacacc

SEQ ID NO: 14062 - DNA, 887 bp, Unknown
  gut microbiota DNA sequence
cgggcggctccgtctgcgggggtgttccagtaatagggcgtcatcgcaaacagatcctgcacgctctgcccctgcagggtgaggacggcctcagacgaaaccgcccgcacaaacgaaaagccgtcatattcggtctgccgcacctcgttctcataggggtggtcatagaggatttccttcagcccgaagagatgccgtgcggtgggtaccgcatagatcagatgtccgcccgggcgcagcatacgggcaaactcggtctgtgccatcggtgagaagatgttcagcagcaggtcagcccagccgtcccgcacgggggcgcaaaagctgccgcctacacagaaggcagcctcgggcaccagccgggaggccagccgcacggcctccttggagaggtcgaacgctgcgatctgcgggccgccaagggcatcataaaggtattggtcgtagctgccctcgccgcagccggcgtccacgatatggccatggggcagctcggcacagagggcggccagcgtctgcataagcggcgcatagtgcccggcggagaggaacgcgcggcgggcgcggaccatcgccttgccatcgccggggtcggcggtgtgctttttctgcatcggcagcagataggcgtagccctcccttgcgaggtcaaagctgtgtgcctttgggcagcgcagggtgcgcgcattcagcagcagcggtccgccgcagacagggcagcgcagtgctgccgctgtggcgggggtcattccgctgccggggcggcgggtgcggccgtctccggcgtttcggttttctcagggggcaggggcacggtcatgccgccgtgggctaccagatagtcctcaaagttcgcacacttctgcttcggcgggcggcgggtgatc

SEQ ID NO: 14063 - DNA, 4048 bp, Unknown
  gut microbiota DNA sequence
ctgccagccatcgcccttaccgttcttgttttctcctgcggcagtcagcgctttgttgtacgcggcaatttcgtcagcgttgacctcataggtctttgcgatggcctgcgtttccgcagaaaaatcccacttcggatgctcgttatcgtaggtcttatcaatgtaggcatccaaaatgctttgcagggtgtagctgccgctgcgggtctgctcaaactgcttcagtttggacaggtcggacacaaggaagaaggtaaagcccgcgccctccagttccagtccattgctttggccgctggaggatacgattttactgatttctacattgccttttgccgcttggtcttggctctcggccagcgcattgtccgcatggatgtggtaattggcgctgtaactggtcttatcgatctgttcaccggctgcctgtcggttgtcggcaaaggtggtcttttctacataccaaccctcatcagaataggctggcgtgatgtagtaattatgctcatcgcagaggtagccatctgcaaaggacaggtaataggcatcgtaagtccaagagccatccaacgctttacctttagagactgtagaaaactggttcttgtacacccaatccgtgtactgcccgctgccgttcttggcaagcgcggcggtctgcccggtggctgccttggtgcagctgtccacggtgggataggtgccggaaactgcaagagcgccgtcacgcagcgggataatcacgccggtggagcgctctacgacataatatttgccgaggtacaaattgctgaagcacagccagccattctcgattttagcgctggctacaaggtggtcttttttcagaacgggtaaataatcagacacccactgcccgctgttgtcgcggattgtggtgtgccagatgggattgccgtctgcatccacgattttggagtagtccaccacgccggtcacgccatcggggtgcgtaatatcttcggcggcgtagaggtcatacaccgcgccgtccagcgcggcatcgccgtgagcctgcccgctggcaagggctgtgccgtgggcggtgctgccgcccacataccgcacggcatcaaggtcaaccttggagatgctgatttcgcccaaggtgcggtcatttttcataacgccgtctgtgggcgtgattgtgtagctatcctcgttggccgccttgccgctattgtcggtgttataagtacgacggggatccttggcagtgtcgtaaatggtaacggtggtttctacgcctgtactggtgacaagtttggtgccgcctttgtcggcagcggcaacgtcggcattatagtcagcattgtccagccagattacagaattgtccttatccttggtgatttcgatatagtaaccgcgcttgcccagcggagtgttggccatgccgggatgattgatgtctgtccaatcgccaaaatagcctgtgggcgctttggtttccacgatgataaacttgcccgcattacgttgtgtgtagtagagggtgtggcgcatagaatccgtggtcgcataggccgcactgttgatgaccgcataagtgccatcgccttggcgctgcacactgtaagtgttgtagccacctgtgggctggtatttgcccgttacagtatcccactggaaaatctcatattgcgcgtcggcagcaatctgattgccggtttcactgtcggttttcttgatgttgacctgcaaggaccattcatcgtttttcatcagataggcattgtttgaattggccggtacagaaatagtctgtttgctgccgttgctgccccaatacattgcaaaaccgtaaggaacacccacttcctcatagcggaatttgacgttcgccagttctgcttttgcagatgcaactgcgttgtcaaccatgcgctgggcttcgccctgcaattcggcaatcgcagcatcgcgggcgctgtcggcggctgcatcggcttcgtcctgcgtggtgtaggggcctactcgtccgctgcggctgtcggtagttttgcttacggagtagtgcagcgtccaacttgcagatgcagcaccgccattgttttgataattgtcatcgttggtatggccagcagtggtgacggtctgtttatctgcgggagaaatattccatgtgccgccgtcaatagtaccacttttggtgatggggtcaatctcgatggtcgcaccgtccactttctcggtggttttgagctgcaccttgtcggtgatgatgccgtagtcaaaatcaaagctgccgcttgcggtctgcgccggggcttcccaattggcgtaaatttcctgcacgatgggtttggggttcggttcgtcatcggagatttcggggccaatcacggctacagtctgccagcccgcacggcccggctgataaatataggtgtagtagccgcgggcggatgcgtaagcgtctgtgccctccaacagcgtctgcgcggatccaagaagaattttggcggcagtgctgtcggggtaattctcgataatctgcatctgcgcatctgtatagatcgtgcggcagaaatccagcaaactcggcgcttctgcggagagcgcaaccggagggaactcctgcataccgagcgaaagctgggtcaaaccgccccagattctgtactggttgccatagtggtcgccgggtacatactggtctgcgccaaccatagaagtattgacataagtgtacgttggacagttcttgggctggccgtctgcgccgggagtgcagcagtacgcctcatcgccattgaaccaaatcaaccaagtgctattgactttggctaccttggtgattttgccgcttgttacgttggggatggggcgctcggcaaaggtggcaatttcgctgtcagggaaaggatactcggcagtcacattgcggtcgatggtcacatttagtgtcttggtcagtgtgctgccgtcgggcgcggtataaaccagctgtgcggtaaaatccgcatccgcctgtacatatacgcccatgacggcggcagaggtttcatggtagctattgtgcagcaaggcatcggcatcagtggcgggttcgccgtaaaagtccagcaaggtcacgccatccggcaggatcatgtcggtgctgctgccgtctgcgggatattcgacctgtgccataatgggaacaatggcatagtctgcgccgtccagcaggggcgcggccatggtaaggccgtcattgtccagtgcaaaggcagtcagatagctgccgctggtttcttccagttggctttcgggccactcggaaataccgattttagtttcaccggtggcaaccggcagaccctcgctgccgatataggaaccaatgggtgcgtcggggagatcggtgtacagttccgcgccgacaacggcagcagggatttcttcttcagcgggctgctcttctgccgtttccggggtggcttcggttacatcctcgccggggtcggggctgctctcgtcggtctgaccattgtctgtttcagacggctcggtctgctgctccatctgcacggtttcctcggtgggctgcggtgtgggttcctctgcaaacgctgcaccgggcagcatggagcagagcattaccgccgccgcaaacagcgcggtaacgcgatgcttcaatttataatgtgtttctttcattgtgaaatcctttcaaaacagagattttttcacgaaaaaaagcgcctgcaaaatgcagacgctgcggttatctttcgggggtatcctgagcgggctggccttttgctttttcaaattttcgcacttggtttacaaaaccgtccaataggcaggtatgcgcttgtaggtcagcgtagtaacaggaacggtcaaatccacggcgatccatatctttgatcgtgcgaatggaatctgcccattctctatttgtgtgagaaatacgaccatctccatcacgggtttgaatggccgctgccaacacatattttgtgcgctccaaaccatattctgtcactacctgttcaacagcgccagcgtccagtcgcataccatcaaagcgctg

SEQ ID NO: 14064 - DNA, 8718 bp, Unknown
  gut microbiota DNA sequence
gtccacagcccactgtgcgggcgcagggcgtacaacgccagaagaaccagaaaaacggaaacgcagcgcagaacagaaaagtccatcgcccgcggcgcattggcagttatgccgctgaaggtcagcgccaccgggaaatcctgatgcgctgtgtggtacggctgcgcctgcataatcagcgtgccgaccttcccggtcaaatccagactgatgacatggctacgcggcgactgcaggccgacttcccagctgccgaagcgaatcggcgcaccgttggcctcgtcggaggcatccagtgtaaaggtcaccatgctgtctgtgtgcagcaaatccgtgtcatcgttgaccagaccgtcaaagcgcagattataaataggttggtcgatgttaagaaaccgcaggtaggtgcggtcggaatccagcgatatcgtgcctacgccgcggccgacattgatgttggggtccagatagtccaccaactggaaaggctcatagctgtgggtgttgaaataggcaatgttgcctataaaagcctctgcgcccagtgccgtcacggccagcagcggtacaacggcccgcaggcccttcttgccgaagcagcgcagcccggcggtgacaagcccggcccagccgcacagcgcagtgagggccagcaggcggaaggtgtcaaagccgaccgtcagtccggggcgatggtaagcgcaggcagcaaacagccagacgcccagccacaggccgaaagtccagacacgatcacgccgggcagccttgcggcggctcagtacagcgggcgccagcccgataaaggctgaaaccagtgctgtcagggcaagagcaagaaatatcatatcggcgcagggcctcctttgccaaggttactgattcgcgtacctttcgatctcgtgcagccagaagttggcggtgcggtcccagctgtatttctgcaggacctcgtcaggggcggccacgggctgggcggccagcttgtcaaggtcggtgtcgtagtcatagggatcaaaataccgcgccgtatcgccgtacagctcgggcaggcaggtggcgttggccagcgcgatgggggcaccaagcgccagtgcctccagcggcgggatgccgaagccttcaaacacggcagggtgcaaaaacagcttgcagtgcttcatcagggcggcgttctcggcgtccgagacatagccggggtagaaaacattgtgggtatccctggcctcggtgtcatcgccgaaggcgcgcagatccttgccgcccgcgaccacaaaggtcttgtcggggttgcggcgggcgacctcgcggatccatttgaagttcttgtgcttcgccagactgccgagcgcgtaataatactccccttttacaacgccgggcatcttgtcaaagatgctctcgtcgggggtaacgcccttcatgtgctcccagccgttgtaggtgatgccgatcttgtccagcggaatgcccagcttttcgctgatgaggcggcgctggttgtcgctgacggtgaacacccgctgtgcgaaccatttggtggacaggcagtgtacccagaacttgaagcggaaaaagcccttgtcggtatccatgacgagcgggcggatgtcgtgcagcaccacaacactgcgctttgtcagcagcatatcgctggcaaggccgacataaaaggcgtgggtgcggcgcagataagcgggcagtacggccagattgtagaaatatttgacggccttgagcggcacaagccggatgtttttcagctccggcaggtggatggggcggccgtcgtcccggtaggcgatgcggacatccagaccggtgccctcgatgagcttgtccagacgcaccacagtttcatagacatagcgcgggatgccggtgatgttgtcgcacagcaccgtgccgttgatgacgatggggttcaatccagttcctccttctcccagtgggagcagtccagcagctcctgctgccagtcggccatgcggcgttcgcaatactccttcagctcgcgctcaaagcgctcctcactgaaggagcggctgtgctcacggatttcttctttagaataagccacgccgtcgcgctcaaaccgctcgatgcagtcggcaaggctctcgacggtctgctctttgaaccaatagccggtcttgccggggcgcacgctctcgcacgcgccgccgcggccgtaggccagcacgggcgtgccggcgctctgggcctccaccggcgtgatgccgaagtcctcctccccggggaagaggaatgccttggcccgcagataatagctgcgaacctcctcatcggacaggccgccgcccttgaactccacggtcgggccggccatagccttgagcttgtccagctctcccccgccgccgatgacgacaaggcgcttgcccagtctggtgcaggcctgcacggcgagatcgacccgcttataccatgtaaggcggccgactgtgaggtaaaagtcctccttctcgacaaagggactttcgttgatatggcagcaggggtagatgacatcgctgtcgcggcggtagtactttttgatgcgctgggcgatataatgcgagttggcgataaaatagtccacccggtcggcggcgcacttgtcccagacgcgcatcttgtgcatctgccccggcatgacgaggcgggcaagccagttggcattggcgcggtaggtgtagtaaaaatcccacacatagcggatgggcgtatggcagtagcagatatgcacggcatccgggcgggtgatgacgccctttgaacaggaggaggacgatgacagcacaagatcgtactctgtcaggtcgaacgcctcaaaggcaccgggcatcagcggcagcatggccttgtacagcttgttggaaaacggcaccttctggaaccagctggtgcggatgtcgtagcttttgaaccactccggcatgtttttgggatcgtacacaagggtgtagatgacagcattggggaaaacatgcttcatggcatcgaccacgcggtcgccgccggcatagccgacgagccagtcgtgcacaatggcaaccttgggctcctttttgctcattacagacactcctgtccgataacgcagaatgcgttactgcaatttttcgtcattgaccatcttgccgccgaacaccgtgcggaagatgatcttgatgtcaagcgctacggtccagttttcgatataccagatgtcgtagcggatgcgctcggcaatgtcggtatcgccgcgcaggccgtggatctgcgcccagccggtgcagccggggcggacctgctggcgcaccagatagcgcgggatctcctccttgaaatgctctacatggtagggcacctcgggacgcgggccgaccagagacatatcccccttcagcacattgaagaactgcggaagctcgtcaaggctgcatttgcggataaagctgccaaagtgggtcttgcgcggatcgtaatcggtggaccagccggtctgctgctgcacattgacccgcatcgagcggaatttgtacatcataaagggctttttgttcaggccgatgcgctcctgcttaaagatgatcggcccggggctggacagcttgacgccgatggcggtcgccagcatgatggggctggttaaaagaatcaggaccagactgccgataatatccagcccgcgcttgacggccgcgttgagcaggttgtcaaagggtgtctgccgcacattgatcagcttgcactcgtccagtacatcgatcgtcggccgcgcgggcagatagtcactgtaaaacggcaccatcgtgatgcgcacgccgtttttgtcgcaggcggcaaagacatggggcaaaagctcgatctcgtctgcctccagcgcaacgatgacctcgtccaccggtatttcatccagcctgacgggcaggctgtcgtacccgcccagaaatttcacacccagacccggctcctcgaccttggccagatagccgtccacaacaaagccgtagtaggggttatgctccagcgcgcgcagataaagcgcggccgatttgccgccgcccaccagcaggatgtggcgcaggccaagccccttgcggcggcgggcgcggtcgatccagcgcaggaccatccgctcaaagacaacggcggccgtggccagcagatagaacagcgccagcacgatgcgggaataatcgtcaaggtgcatcaggtagagcgcggcgacaaagatcatgatgcctgccgcgttgataacggcaattttggtgcagcgctccgccagaccgtgcaggcgggcgttggagtagatgcccgcgacccagtagataagcaccagcacaagtgaggtgcccagcccggcaaggatgttgcgggggtcgcgcgctacggccagtgcggggccggcgccgcccggctcaaagaaccggacaaagttgaagcggatatagttggcaagcaaaaagccgataaaaagcagcgctgcatcgagcagcagatacaaaaggcttttgatgcgttggtttttttccagcacctggggtgccctccctgaaacgaaaaatactgtgccgcagaagcggagcatagcccgcccctgcagagcgttgggtacaaaagatttaacaatctattttatcatattttggccgctattgcaaatcagcggtacaattcctgcagctggtctagggtctttttcatctcggcgcggacctccggcgggccggacacgacaacgccggtgccgaagcctgccacccagccgaaaaactgcggactgacctgaatctcggccgtcatggtaaaatgctctccgtctgcgcagggcaccagcaccggcccggtgccgaagcggtcgatcatcgccccggcaaagcggttttcgcacagcagcgtcacccgcttgagggggccgttgaacatgccgaacatctgctgcatgtaggcgtttacatcaaaatttgcgtactcatcggcgccctcgcgggtcgtgtcgggcagggggcggacattctgcatcttgtcaacgcggtagtgcttcaggcggccttccgtataggcgatgagatagtagttgccgttttcccacaccagcacccacgggctgacgcagtacagctggccgtcatggcggggggtcatccgcttttgcaggttccagtcgcagtatttgaactgcacctgctgcccggccgtgatggcagagtgcagcgcatcaacggtatacaggatcttttcgtcggtgcttttgatccggccgctgacaaggaccttgcggtcaagctcctcctgccggtatttggaggtgaactgcccgagcttgtcgatgagaatcttggacttgcgcgctgtgatgaacttgctggcgtagacggcgtccacaagcagcttcagctcggccagctcaaagggggcctcggtcatataatagccgccgccgcgcccgcgctgctgtacgatctcatacggggagtcgggcaggttgttcagcgtgttcaggtcgtcatagacgctcttgcgctcggcaacaacgccgcgctcctgcaggcgctccaccagctgcgggacactcagggggtgcttttcgtccgtttcgcgggcgaggatgtccaaaaggacaagcagtttgcgtttctggccttctttgcgcggcatagcaacggctcctttccggctgtaaacatatatagtcctattatacaccctataaagggagagggcaagaggtatggtgacgattgtacgcaggatctcggagcgagggggacggctgcaaaagcccctccggccagcttcgcggccagctccccacatgtggggagcctttttgcgcgggctttgcccgcgtgaaagcctcctcgcatagcggggaggtggccgagcctgcgaggccggaggggcttttggggacgccgccctttacatctccatctccgccaaaatttcttccaaatccgcaaaaatatccgtcggcagcatggcggtcatgctgcggtgcttggcgcagcggtcggcagcggccccgtggagccatacggcggcaacggcggcatcctcggggctgcggccctgcccgagcccggcggccagcagcccggcggtcagcccggccagcacatccccgctgccgccccgggccagcccggcgttgccggtgttgttgtgccagagcgtgccgtccggcttggccaccagcgtgccgctgccctttaaaatggcgatgcaatcgtatttttccgcaagctgccgcgcggcctgcgcacggtcggcctgaatctcggccacggttgtgcccagcagccgcgcggcctcgccggggtgcggcgtcaggatcgtgtttgcgggcaatccgccccggagcctgccggcggccagcgcgttcagggcatcggcgtccagcacggccccgcgccaaggggcatttttgcccagcagggcgcggcacacctcgggggcgctctcccccagcccggggccggccagcaggacggcgcttctgtcggcaaaccagtcccgcagggcggcggcgtcatgcgggtgaatgccgccgtttgccgccgtgcggcagccgcaggcacagcactcgggtgtgcgggccagcaccagctgcacaacaggctccacgctggccagaaagaccagcccggccccgccgcgcagcgccccctctgtgcagagcgccgccgcgccgcggtaggccatgctgcctgccgcagccagcacgctgccataactccccttgttgctgtctgcccggcgcaccggcagcagctgctttaccagctcttgtgtgatctcgcgctgcatcttgcatccctccgcaaatgtattataataggtacagtataatccatttataaaaaaagggaaaggggcagttttgcatggttccggcattggaagaaattttggcgggcacaaaaaacatggtctttttcggcggtgcaggcgtatcgaccgagagcggcatcccggacttccgctcggtggatgggctgtatcaccagaaattcaaatatccgcccgagacgatgctctcccacagcttttatgagcggcataccgcagaattttttgatttctaccgccaaaagctcatcgtgcacggcgcagtgcccaatgcggcccaccggaggctggcggcactggagcacgagggcaagtgcagggcggtcgtgacccagaacattgacgggctgcatcaggccgccggcagcagggtcgtctatgagctgcacggctcaacgctgcgcaactattgcacccgctgcggcaagtttttcccggtgcagttcattgaggcagcagccggagtcggggacggtgtcccccgctgcgatgcgtgcggcggtatcgtcaagcccgatgttgtgctgtacgaggagggactggacgaggaaacgatggaaaatgccgtcagggcaatctcccgcgccgataccctcattgtgggcggcaccagtctggcggtctatccggcggcggggctgctgcggtatttccggggtgaaaatctggtggtcatcaacaagcagcccaccccggcggacgccatggccaatctgctcatccacgagccaatcggtcgcacgctggaccccaatgacccggtggaaggataaattttacacaaaaatccatgcttttttcaaaaaagccattgcaaaatgccggggatttttgctatgatagaatcatagtggcttactgggtagagagcttagagggggactgtttttatggcaaacgcgctgacggattttacaaagaaacgcgaatttttggtgtgcatggactccgacggctgcgtgatgaacacagtgcgcatcaagcatacgactgtcatgtgcccggagcttatccgcgtttttgcgctggatgagcaggcggattttatcaccgctgcgtgggacgagatcaatctgcacacgatcacccgcgggatttcccggtttgagagtgtgcggctggtgtttgaccggctgaagaaccgcggcatcgagatctccggcagcgaggatattgccgcatgggtggacactgcgaccgagctttccacggccagcctgcagcgggaactgcaaaagaccggcagtctggccctgcgcaagctgcaggagtggaacaatgcctgcaaccgccgcattcaggcgctggagcctacctttgagccgttccccggcgtggaggaaagcctgcgccagctccatgccgtggcagatgttgccgttgtcagcgccgccaacgaaagcgccatcgccagtgagtggaagcgctacggtctggcccgccatgcggatgttatcttcgggcaggaggtgggcagcaaggcaaactccattgccacgatgctggcctgcggctatgagagccgcaaggtcgtgatggtgggcgatgctatgggcgatgctcaggcggccgctgccaacggtgttgcctttgtgccgatcctgccggggcgcgaggctgccagctggcgccgcctgcaggaggaggccctgcccaagctgctgcacggcaccttcagtcccgcctatcaggccgagctgatcgccgcgctgcgcagcgctttgcatggataaaccaaatacgccaaatttcgcgccgtcactcttgtgacggcgctttatttatggtatactgactataattatctgtataaataaacggcgcgtgtcatgctgatgcaccgtaggggcggggttctgctccgcccgtggcactttg

SEQ ID NO: 14065 - DNA, 12920 bp, Unknown
  gut microbiota DNA sequence
ccgcctttggcggtcactttcccgttattcacacaatttagttgattttatacaaaaggggcgctacaatggaaacgatcaccagccgtgataacgccaagatcaaatacgcctgcgcggtgcgcgactcagaaaagcagcgcgccgctgacggcctgttttttgccgaggggccaaagctctgtctggagcttgccaaaagctgcacgccgcgcacggtctacgccacggcggccgcactggccaaaacgcccgggctggcaacgcttgcccccgctgaaattgcgccccatgtggcggaaaagctcagcggcaccaagtcaaatcagggcgtttttgccctgtttgaaacacccgtgccgcccgccgatacgctacacaccgcccgccgcatcctgatgctggagggtgtgcaggaccccggcaatgtgggtacactgctgcgcagcgcggcggcgttcgggtttgacgcggtcgtgctggggccggggtgtgcatcgcccctgtcgcccaagacgctgcgctcctcaatgggggcggccgggcggctgccaacgctgcacagcgccgacctgcccgccgcactggcgcagctgcgcagccgcggcatcacaacgctggcggcggcgctctatcggtcgcgcccgctggacgaggccgggaacgacttcccgcacggtgtctgcgtggtcatcggcagtgaggggcagggcctgacgcagcagactgttgaagcctgcgacatggccgtgcgcatcccgatgaccgaccgggtggagagcctgaacgccgccgtggccggcagcgtgctgctgtggcatttcaggggcgtgtaagcagatacccgccgctatgcagccgtaaggataaaagggggcatcctccatggacaaaacacttgcatggctctggctggcggacgccgtcggctcggcgtgccagtatgcacaggagctgcttgcgctttaccccgacccggccgagctgtatgacctgctgcgcgcaggcaccgaggccccgccgacctgcctgacgccccgcgcccttgcccagctgcaggatacgaccccctttgattttgaggagcggctcgaccactgcctgctgagcgggatcgagctgctgacccccgatgaggacgcctaccccgccgcgctgcgcgacctgcccgacctgccgctggtgctgtatctgaccggcgagtcggcctgcctgaatgggcagcgctgtgtgggtatggtgggcacccgccgccccagcgcttacgggcggcaggcggcctttgacctgtcgctggcgatggcgcaggcgggcgcggtcatcgtcagcggtctggcggacgggctggacagcgaggcccaccgcgccgcgctgcaggccgaccgccccacgatcgcgtttttgggtacggccattgacaagacctacccggccgccaacgcaagactgcgcaccgccatcgagaagggcggcggcgctgtctgcagcgaatacccgcccggctacacaggccgcacgaccgggacctttctggcccgcaaccggctcattgccgcccagagcgaggcgctctgcgtggcggaggcccgcacccgcagcggcacactgaacaccgtacaccatgccgagcggctgggccgcccggtgctggccgtgccgggcagcatctacagtgcgctgagtgagggcacgaatgagctgctgcgcacccaccgcgccgagccgctgtgcaaggctgccgatgtgctggagatactgggcatcggtgcgcaaacggccgcgccggagcagcagcggtttgaccccgctgccgtcagcccggacgcacagcaggtctacgcagccttaaagcccacgccgcagggcattgatgccctgtgcgcggccacccgcctgcccgccggccgcgtgctggcggcctgcacggagctggagcttatgggcggcgcacaggcacaaccggggagaagatatattgcgctataatgataacgcacggtaggggcggggctctgctccgcccgccaaccctgtggcacaggtactttcccggaaagctgctcacgcggcaaacggccacgggcggagcagagccccgcccctacgcagcaatagcgtaactgatatctaaaatactttttcattgaggtaacttatgccaaaattagtcatcgtggaatcccctgccaaggcaaagaccattggcaagtatctgggccgcggctacaaggtcacggccagcatgggccatgtgcgcgacctgcccgccagtacgctgggcattgatgtcgaaaatggctataagccgaaatatatcacgatcaagggcaagcagaagcttgtcaaggagctgaaggccgaggccaaaaagtgcgatggcgtgctgcttgcgaccgacccggaccgcgagggcgaggccatcagctggcatctggcgaacattctggggctggaccccagcgcacccaaccgcgtgacctttgacgagatcacgaagaagggcgtcaaggagggcatggcccatccccgcgccatcaatatcgaccttttcaacgcgcagcaggcccggcgcgagctggaccgtctggtcggctacaagctcagcccgttcctctggaaaaaggtccgcaggggcctttccgccggccgtgtgcagagcgtggccgtgcggctcatccgcgaccgtgagatcgagatcgagaacttcaagccggacgaatactggaacattgacgcgctgctgcacccgcagggcgaaaagggcgagttcaccgcccggctggcggcaacggcagacggcaaaaagctgacggtcacggacaagcagcaggctgatgccgtgctggccgcgctggacggcaaggattacaccattaccaaaatcgaaaagggcaagcgccgccgtcagcccgcgccgcccttcatcacctccacgctgcagcaggacgcgagccgtgcgttcggcttctcggctacgcggacgatgcgcgccgcccagaccctgtacgaaggtgttgacattgcggggcacggtacggtgggtctgatcacctacatgcgtaccgactcgctgcgcatcgctgccgaggcgcaggccgccgccaaaacctttatcgccgaccgctggggcgagggctatgtctgcaagatgccccgcaagtggaagagccgctccgccacggcggcgcaggacgcccacgaagccatccgcccctcgatgcccgagctgacgcccgatgaggtcgagcagagcatcagcggcgataccgccaagctgtaccgcctgatctggagccgctttatggcaagccagatggccgactgcattcaggacacggtctcggcatccatcacggcgggggcgtatcttttccgcgcatccggcttccgggtgtcgtttgacggctttacggcgctgtatgaggaatccacggacgacacgaagaaaaaggagaccgccctgcccccgctggaggaaggccagaagctggcgctcaaaaagctgacggcggaccagaagtttacccagccgccgccgctctacaccgaggcaacgctcatccacgcgctggaggagaacggcatcggccgcccgtccacctacgcgccgatcatcacgaccatcgtggaccgcggctatgttgagaaggaccagaaaaagctgaaaacgaccccgctgggtcaggccgtcaacacggtcatgatggagcagttccctgacattgtcaatgtaaaattcagcgctgacatggagaaaaagctcgatgtggtcgaggccggcgaggcagactgggtcaagacgatcgacgagttctatcagggctttgagaagagtctggagcaggccgagaagaacatggagggcaagcgcatcaaggtcgaggacatcccgaccgatgagatctgcgagaagtgcggccgccccatggtcatcaagtcgggccgctacggcaagtttgtggcctgctccggctttccggagtgccgcaacgcccacccgctcgtcaaggacacgggtggcctctgcccgctggacggcggccacatgctggtgcgcaaaagcagcaagggccgcgtctactacggctgcagcaactaccccaagtgcaattatatgacatgggacgagccggtgcccgagcgctgcccccagtgcggcagcaccctgttcaaaaagaagggccagctctactgcgccaaagagggctgcgggtttgtgaaggcgattgagaagaaataacggtgaattatgcaactgaaaatcattggtgccggtctggccgggtgcgaggcggcactctggctggcggaccgcggcgtgcaggtcgagctgtacgagcagaagcccacaaaatattccccggcccataaaagcgcgggctttgcagagctgatctgctcaaactcgctcaaggccgagcgccccgactccgcgtcgggccttttgaaaatcgagatgaagctgctgggcagccatctgctgaccgcggccgagaccgcccgcgtggcggcgggcggcgcgctggctgtcgaccgcgatgtgttttccaccgccgtgacggagatggtggaaaatcacccgaacatcacggtccggcgcgaggaagtcacggccttggacgagagcgtcccgctgttggtggcgagcggccccctgaccgagggtgcgctggcgcaggcggtcgcagcgctgaccggggaccaccggctcagcttctatgatgcggtggctcccatcgtgacggccgaaagccttgactatgacaaggtgttcgccgcgtcccgctatggccggggcgaggccgactatctgaactgcccctttaataaggaggagtacgagagcttccacgcggcgctcatcgccgccgagcgcgcaccgctccacgactttgacggcgacctgaccgtctacgagggctgtatgccgatcgaggtcatggctgcgcgcggcgcggatacgatccgctttgggccgctgcgcccggtcggcctgcgcgacccgcgcaccggccaccgcccgtgggcggctgtgcagctgcgcgccgagaacacggcccgcacgctctacaaccttgtcgggttccagacgaacctgaaatggggtgagcagaagcgggtgttcagcatgatccccggtctggagcatgccgagtttgtgcggtacggcgtcatgcaccgcaacaccttcctcgaaagccccagagtgctgacaaagcagcagtttctggcggaccaccccaatgtgttttttgccgggcagatcaccgggtttgagggctatatggagagtgcggcgtccggcctgctggccgcccgccagatctacgcccgcttgcagggccacgaactgccgccgcccccggcggccacgatgtgcggctcgctgctcgactatatcacgaccccgaacaaggacttccagccgatgggtgcgaacatgggcatcctgccccgcaccgaggagatcaacgccatccgcgacaagcgcgagcgctatatggcgctttcgcaggccgcacaggacgccatgcgtgcatggacggaggaatataaagcatgaaaattttagtggatgccatgggcggtgacaacgccccgctgtgtgtgctgcagggcgcaagtcaggctgcggcggagtttggggacggcatgacgcttgcgctgctgggcgaggaaaaagccatccgcgactgcgcaaaagagaataaaattgaccttgcaccgtttgaaattatcaactgcaccgagaatatcgacatgcacgatgacccggtcaaggctgtgcgccacaaaaaggattccagccttgtcaagggcctgaccatgctgaagaacggcgaggccgatgcctttgtcagcgccggctccaccggtgcgctgcatgtcggcaccagcctgatcgtgcgcaccgtcaagggggtcaagcgcccggcgctggccaccccgatgcccggcgccaagcagaatttcctgctgctggactgcggcgcgaatgtcgagtgccgccccgagatgctcaacgccttcggcacgatgggcagcgtctatgccgaaaaggtcatgggccgcgaaacgccgaaggtcgcactcgtcaacaacggcgccgaggacacgaagggcacccctacctaccgcgaggcgcaccagctgctgaaggcgaacccctgcatccattttgccggcaacatcgaaccgcgctatatcatggacggtgaggccgatgtcgtggtctgtgacggctttgtcggcaatgtggtcctcaagctgaccgagggcgttgccaagacgctgctgggtatgctgaaaaaaatctttttgcagaatatcatcaccaagctcagctatctgggcatcaagggcggtctgggtgagctcaagcggatgatggactccgaggaggtcggcggcgcgccgctgctgggtgccgccaagccggtcatcaaggcgcacggctccagccacgccaagggcatcaagaacgccatccgtcaggccaaactctgcgttgccaacgacctgtgcgggacgatggagaatgccttggccgcagttgcgaagcagaaagaagaaacagaagcttaaaagtaaagccgccctgtaggggccggacatgtccggcccgcggcataaaaaataccgcccgtaaaagggcaatcgagataaggttgagggccgggcatgcccggcccctacggaccagccggaaaggtgaaagaatatggctcacaaaccggaagaactgcaggaggtcctgcagtatacattcaaaaatcctgcgctgctgcgcattgcgctgacccataccagctatgccaacgagagcaaggtcgccacgacccacaatgagcggctggaatttttgggcgacagcgtgctgtccgttgtggtggcggactatctgttccaccagtccggccgccccgagggcgagctgacccggatgcgcgcaagcctcgtcagcgaggaggcgctgttccagttcgcgcaggagatccacctcggcgagtatctgcgccttggccatggcgaggatctcggcggcgggcgcaaccgccccagcgttgtctccgatgcgtttgaggccctcatcgccgcgctgtatctggacggcggcatggaggtcgcgcgcaatttcatcctgcccttcattaccgagggcaagaccgccgaggacgactacaagacccgtttacaggaggtcgtccagcaggacccctccgccgttttgaaatacgaggtcaccggcgagaccggccccgaccacaacaagcagtttaccgtctgcgtctggcgcaacggcgaactgctggccaagggcaagggccgcagcaaaaaagccgccgagcagcacgctgcaaaggtggcgctggaaaaattgcagtaatattgccgtttaatgatgctctgtaggggccgggcatgcccggcccgcggcataaaaatcgcagcccgtttacgggtatacagggcggggttgagggccgggcatgcccggcccctacgaccagacagaatcgaaaggtaacaccatttcatgcgcctgaaagaactggaaatccaaggtttcaaatccttccccgataagaccaaaatcgccatcggggagggcatcaccggtgttgtcgggccgaacggctccggcaaatcgaatatatccgactccatccgctgggtgctgggcgagaccagctccaagcagctgcgcggcaccggcaagatggaggatgtcatcttcggcggcacccagtcccgcggcgctatggggtttgcctctgtcgcactgacgatcgacaacagcgaccacggccttgacatggacgccgatgaggtcacgatcggccgccggtactaccgcagcggcgagagtgaatactccatcaacggccagaatgtccgcctcaaggatgtgtatgagctgctgctcgacaccggtatcggccgcgacggctacgccatcgtcgggcagggccgcatcgccgagatcgtcggcgccaaatccgccgagcgccgcgagatctttgaggaggcgtccggcatcgccaaataccgctaccgcaaaaatgaggccgagcgccgtctggccgccgccgagggcaaccttgagcgtctgcgcgacattctcagcgagctggaacggcgggtaggcccgctcaagcgggacagcgagaaggcccagcagtttctggagctgagcgaaaagcgcaaggggctggagatcaccctctgggtggacgccatccgccgcgccaatgacgcgctgcgcgaccagcagcgccgctacgaggcggctcaggcggactacgaccgcctgagccgccagctggacgcctttgacgagcagagcgccgccctgcgggaggaggcccagcagctgatgctgacggtcgagcaggccaacaccgacatccgcaccatcaccgaggccaacgccggcagcgagagtgagatcgccgttttgaagaacgagagcgagcacagccgctttcgcattgacgaggccaacaccgagctgcagcgcgccgggcagggccgcgagagcatcgagcgcgaggccgccgaccaccgcgctgccatcgaggcgctgcgcaccggcatggccgcgctggacgcccgtgtggccgagctgcgcgaggccctgcatgcgctggaggaaaaggctgccgccagcggcgaacggcgcgatgtcattgacgccgccatggcccgattgcaggacaccgccaccgccgcgaaagtccgcgccgcatcggcccagtcggcgggtcaggctgccgccgaccgcctgaccgaggcgcgcgcgcaggccgaggcgctgcagaacgccgccgccgccaccgaggaggagcgccgccgcgcggagcgccgctttaaggatgccgaggaggccgtgacccgcaacgacaacatcaaggccggcttaaagctcaagctggacagccgccgccgccagcaggcggacgccgccgaggccctgcagaaggctgaccgcgaaaaatccgccgccgcccagcgcatccatatccttgaggacttggagcgcaacatggacggctaccagcagagcgtcaagtcggtcatgcgggcggccggggcgggccgcctgcggggcgtcatcggccctgtggccggtatcctcacggtcgaaaagggctatgagaccgccatcgagacagcgcttggctttgcgctgcagaacatcgtggtcgaggatcagggctgtgcccgcgccgccatcggctttttgaaggatgagcgcgccgggcgcgccaccttcctgccgctggacaccgtgcagggcacccgctttacgggccgattgaccggcacggcggaggttgccgccgaccttgtcaaaacagactcgaaatatcagcatatcatcgacaatcttctcggccgcatcatcgtggtcgaggatctgaccgaggcctccgccgtggcgcggagcctcggctaccgcaaccgcatcgtcacgctggacggacaggtcatcaacgccggcggctccttcaccggcggctccaccgcccgcagtgtcggcgtgttcagccgcaagcaggagctggacgagctgcgcagcaggctgaccaagctggaagcccgccgcgccgaggccgaaaaggagctggccgcccgcaaggcggaggtcgataacctgaccgcccagctggccggtgccgagggcgagggcatgagcgccgcgaccgagcatgtccgcgccgggctggaggtggagcgcctgacgaaggccgccgcccagaacgaggagacggcccgcaatattgaaaaggagatcgccgcccagcaggccgccgcgacccagaacgaggccgcccgcgccgaggctgaaaaggcacaggccgacgccgaagccgagatggcaaagtacaccgccgagctggcagcactgggcgaaagcaccggcagcctgaccgccgagcgggagcgcatcacgacagagctgtccgaaaagcagctgcagcgtctggccgatgaaaaggacatcggtctgcacgaggctgcgctgcagggcctgcagagccgcaccggcgaggccgaggcccgcgcccgcgagctgcagaccgtcatggaggctgctaaggcaaagatcgaggccaacgccctaaaaattgccgagatggagcgcacccgcggcgacaacctgcagaaaattgccgccgccgagcagaccatccgcaccgcaaacgcggcccgcatggagaaggaggccgccgttgaaaagctgaaccgcgacaaccgcgccctgaccgatgagcgcgagcggatgagcggcgagatggcccgcctggccgagcgccgcaccgccgccgagaccgagctgaacgataccaacagcaagctgtgggaggagtaccagctgaccgagggcgaggcccgcagccattgcgtgccgtttgagagcctgaccgagctgcgccgcagcgtggccgaggtccgcagcaagatccgcggtctgggcaatgtcaatgtgggcgccatcgacgagtacaaggaggtcaaggagcgctacgacttcctcaaggcgcaggtcaccgatgtcgaaaaggcaaagtccgagctgacaaagatgatcgccgagctgtgcagcgagatggaggagctgtttacaacaagcttcaagcagatcaacacccacttccagcagatcttcaaggagctgttcggcggcggacatgcacggctgtatctgtcggacgaggcgaatgtgctggaatccggcatcgagatcgaggtctcgccccccggcaaggtcatcaagaatctgagcgcgctttccggcggcgagcaggcgctggtcgcaatttcgatctacttcgccattctgaatgtcaacccggcaccgttctgcttcctcgatgagatcgaggcagcgctggacgatgtgaatgtggcgcgctacgcgcagtatctgcgccgcatgaccgataacacccagtttatcgtcatcacccaccgccgcggcacgatggaggccgccgatgtcctctacggcgtcacgatgcaggaggacggcgtctccaagattttgcgccttgatctggataaggtgaacgcggaactgattacctgatggcatgtaggggccgggcatgcccggcccgccacataaatacgaccacccgccaatgggaagccacacaaacccgcgggccggacatatccggcccctacggggcggcaaatcaaaagtaaggagggccagctatgggctttttcaactttttcaaacgcgatattacggaagaggagtttcaggagcagcaaaaggtcaagcgcggtctggaaaagacccgcaccggctttttccagagcatcgtcaatacgctgaccaacgcgcagatcgatgatgacctgtatgaccagctggaggagcagcttattctggccgatgtcggccccgcctgcgccgtgcgccttgtggatgaactgcacgatcaggtcgaggaaaagcacctcaagaccgggcaggaggcgctggacgccctgcgcggcatcatctgtcaggagctgaccccccgctacccgatggagctggacggcaagcccgctgtcattctggtcatcggcgtcaacggtgtgggcaagacgaccacaatcgccaagctggcaagcctgtacaaaaagcagggccgccgcgtcatgctggcagcgggcgataccttccgcgctgccgccagtgagcagcttgagctttgggccgagcgggctgaggtgccgctggtgcaggccggcatgggcgccgacccggccgctgtcatttttgacgccgtcaagagcgccacggcccgcggctatgacatggtcattgccgacaccgcaggccgcctgcacaacaaaaagggcctgatggacgagctgtccaagatctcccgcagcgtcaaaaaggccagccccgaggccagtctggaggtgctgctggtgctggacgccatcaccggccagaacgccatcagtcaggcacatgagttctgccgcgctgccagcgccaccggcgtggtgctgaccaagctggacggcacgccgcgcggcggctgtgcggtctctgtctgggagaatctcggcctgccgatccggttcatcggcgttggtgaaaaaatcgacgatctgatggagtttgacgcccagacctttgtcgaaagcctgctgccggaatcggctttgcagaaggaagaaaaggccgggaacacagaggagggcgaagcatgatcgtctgcgcagcaagcaacaatgccggcaagctgaaggagctgcgccgcattctggagcggatgggccatgaggtcaaaagcctgcgggagttagggatagacctcgaccccgaggagaccggcacgacctttgccgaaaatgcacgcatcaaggccgaggccttctgcaaggccagcggcctgcccaccgtggcggacgattcgggcctttgcaccgatgcgctgcagggcgccccgggcgtttacagcgcccgctatgccgggcaccacggcgatgacgatgccaacaacgaaaagcttctgcgcgagatggccgatgtcccggcggcgcagcgcggcgcaaggtttgtgtccgccgtctgctttatgctgccggacggccgtgcgctcgaggttgagggcgagtgcccggggcgcattgcgttcagcctgcagaacggggactacggctttggctatgacccgctgttcatccccgatgcatacggcacgcccgatggctgccgccccaacaccgagaaccgcagctatgcccagctgaccccggcggaaaaggacgccatcagccatagaggccgtgcaatggagaagctggcagaaaagctgcccgcgtttttgggataaaagccttccccctttgggggaaggtggccccgcagggccggatgagggggtaccccacgctac

SEQ ID NO: 14066 - DNA, 4080 bp, Unknown
  gut microbiota DNA sequence
ctacaaaaaatacatacaatatacaataataaaaaaggagcacccttatggcacttaccagcaaacagcgcgcggcactgcgcggcgcagccaacaccatggaccccgtttaccagatcggcaagggcgagatcgacgataccctcaagcagggcatcgcagactgcatcgccgcccgcgagctcatcaagatcaaggtgctggaaaacagcgagtacgacccccgcgaggccgcagacatcctgtgcgaggcactggactgcgactgcgtgcaggtcatcggccacaagttcgttctttttaagccgaagaaaaaggagagcgcctacgccgccctgctcgcaaaatgaaaatcatgctctacggcgggacctttgacccgccccacaacggccatataaacaacctgcgcgcggcgctggcgctggtacggccggaccgcgccatcgtcatgccggccggcacgccgccccacaagcaggccagcaccaccccggcggcgctgcgtctgcaaatgtgtgcctgctttgcggcgctttcccccgtggtggaggtcagcgactgggagatacgccggggcgggcgcagctataccgtacacacgctggaatggctgcgcagctgtgacccggcggcggagctgtacctttgtgtcggcagcgatatgctgctgacctttacccagtggtaccgctggaaggatatgctcagcatggcagcccttgtggtggaaagccgcaccggcaccgatgaggctgctctgcacgccgccgcagcagcgctggagcaggccggcggccgcgtcctgtttgccgaggccgagagctacccctgcgcatccagcgacatccgcagcggaaaactcccgccggaaaagtggccggaggtcctgccgcaggaggcgctggcggttatccgccaaaaccagctttacggcagcttgtagcactgtaggggccgggcatgcccggccctccgcataaaagctgctggccgttcaagggcaggtaaggcaaggttgagggccggacatgtccggcccctacagcccggttcagagaggaaaatgtatatcatggattacgccgaagccaagaagcttgtgaagtccagattgagtgaaaagcgctggacgcacacgaaaaatgtaaaaaaaatggcggtaaagcttgccaagcgctggggggcagacccggaaaaggccgctatggcggcaattttgcatgattccgccaaggaactgcccaagcaggagttgttgcagatttttgccgataatgctataatagcagaaaatgcccccgcacgccctgcgccggtatggcacggcatcgccgcagcgatccttgcccagacctgctggggcatcgaggacccggagattttgtccgcaatccgctgccataccaccggcaagccggatatgtcgctgcaggacaagatcctttatctggccgatatgaccagcgccgagcgcgactggcccggcgtagaggcgctgcgtgcgctggagatggaggaccttgaccgtgccctgtgcgaggccctgaagcagagcattgattttgtcgaagaaaaaggcggcgcgctggaccctgagagcgtggctgcctatgagtatgcaaaagcacatctgaagtaatactccagaaacagggaggaaaaactatgagcgaaccgcgtaagctgtataccggcagtgcctccggcgggctggatcaggagcagtatgaggctgcccgccgccgcgcccagcagttggccgaacagaacgcccgccgccgcacggtgcaacagccgatgcgcacggcccagggccgccacatcagtcagcgcccggcggcccagcctgcaccggaaccggtgcaggaacccgtacaggagccggtgcagcagcctgccccccagccggaggccccgcgtgagctgacctatgcccagcgtcaggccatggcctaccgcgctgcggctgagcgcaaatacggcgataccctgcagtttcaggtgcagcgcccccgccgcacggtcaaccgcccggccgatgccgagcagcaggcccggcaggccgctaaccgcctgtatgagcagcccgcagaccggaagcccgccgccgcgccccgcacgcaggtgcgccagatggacctgaacggggtacagggcagcaagccaatgtacaactacgatgcagccgcaggcggtatccagatggaggaggctgccgcgcagccccgccgcgccccgcacaccgaggccccgcaggcggcccgcaagcccaagaccgccgcaggcggcagcggcggcggccataagcccccgcgcagccatgacgcagccgaagccccgcgcaagggtaagaccggcggcaaaaagagcggcaaaaaaggcggcgatggcaagggcggcaagaaaaagaagcggatccgctggtggcagatcctgcttatcacgctgctggtcatcgcgctgatcttcggcggtgcgttcgctctcatcatgggggccatcaccccggagggcggcaacatcaagcttaatcagctcatcaacacccccaaggagttccaaggcaaggaattcaatgttcttgtcaccggcgttgaccgctcaagcaccggggcgctggccgcaggctcggccaatgactccaatgtcaatgacggcatgaccgatatgatcctctatctccatttcaacaatgagacaggcgagatgaagatgctgcagatcccccgcgacacaatggtcacgaccgacacaagtgtctcgggcaactaccgcatcaacggcgtggccaagacgcagggcagcgataacaacaacaatatggccgccctctgtgagctggtggccaaccagtaccagattcatatcgacggctttatcacgatccgcctagaaatgctgaccgagctggtcgatctgttcggcggtgtggagatctatgtcccgagggagatggactatcagggcagccatctggatcagggctaccagacactcaagggcgatgcctgcgagttcctgctgcgcgcgcgccacatttacccggacggcgacatcggccgcctgaacatgcagcgccagttctatgccgcactgttccgcaagctcaagagcatcggcaacatctgggatgtggccaagctgacccccgctgtgctgaattatatggagacgaacctcagcgcgtctgaacttgtcagctttgccatcagtatgctgaaaattgattccagcaagatcatgatctgccagatgccggtcatcagcggccccaagtacaacgagcagtcgctgctctacccggcgcgtcaggcggacgcggacctgctgaaccagtatttccgcgagaataccggccccgtggacgccagtgccttgaatctgtgcgacaatgtcattgacctgtccggctatgcggccaccgacccgaacatccagtggatgggtggcctgatgtcggaggccgaccaggcgcagaaggacgagaatctggatggctcgaatcaggtcacggatgtcatggcgtccgagtctgccgccgagagcgaaagcgagagcaccgaggccgaaagccagcccgcagcgtaatttacactaggagagttactttatggaaagcaaagaacttgccattcgtctggcccgtgcgctggacgccaagaaggcccagaacatccgtattctggaggttcaggacctgaccaccgttacggaatattttgtcattgccacgggtatgtctaccacccacacgggcgctctggccgatgaggccgagttccagctggagcgcgagggcgtcaaggtcctgcgcaccgaggggcacgacggcaagcgctgggtgctgctggactacggcagcgtcatcgtccatgtctttacgcaggaggcccacgactactacgatctggagcatctctgggccgacgccaagcccgtgcccgccagtgagtggatgcctgacgaaagtgcggacgagcagtaaacatgcggaatggcttccccctcgggggaagctgtcagcggccccgaccgctgactgatgaggggcagccctgcggcagccgacccggaaac

SEQ ID NO: 14067 - DNA, 5057 bp, Unknown
  gut microbiota DNA sequence
gccccttggcaaatactatgtgctgggcaaccacgatctgtttcaccactggcgggagccaagctttggccgcgccgagctggagcgcggccttgctgccgccggggtgcgcattctggaggatacctccgtcctgctgccctgcggggtgcgcatcgtgggccgcaaggactacctgtacacgaacggcagccgttttacggctgcgcagctgatgcccagcggcccggatgaccgctacacggtctggcttgaccatgagccgcgggacttcaaggctgcggccgcggcaggggccgatctgatcctgagcggccacacccacggcgggcaggtatggcctgcgggcgccgtgggcatggttgctaaaaacgaacgcaactacggcaaaaaagtcattaacgaccattgtgccgccattgtcagcggcggcactggcacctggggctacaaattccgcactcagggccgcacagagatcgtctgtgttgaaatcactaccgaaaaggaaatgtaaaaactatgcaggaacgcgaacgccttggcagccgccttggctttatcatgctgtccgccgggtgcgccatcggctgcggcaatgtctggaaattcccttggatgtgcggccagaacggcggcggcagctttatgctgctctacatcctctgtcttttggtgctgggcctgcccgtcatggtcatggagtttgccgtgggccgcgcagcgcaggccagccccatctatatgtaccagcgccttgaaaagccgggccagcggtgggggcttttcggcgtattcagcctcatcggcaacattgcgctgatggccttttacaccgttgtcacaggctggattctctactatttcgtcaagttcctcaccgggcagaacgccgacttcggctttgcgcagatgctggccgacccgaaggtgaatgtgacctacctgtttgtcacggtggcggcgtcctttgtgatcctgagcttccacctgcagggcgggctggagcggctgaccaaggcgatgatgaccgccctgctggtgctgatgctggtgctggcgctgcacagcctgaccttttccggcgcagcggaggggctgcggttctatctggtgccggacttctccaagatcagcggctcagtcatcgtggcggccatgaatcaggcattcttctccctgtcggtcggtatgggcggcatggcgatcttcggcagctatatcggcaaggaccgcgcgctgatgggcgaatcggtccatgtcatccttctggacacctttgtcgcggttctggccggcatcatcatcttcccggcctgcttcacctacgggctggaggtcaccgccgggccgagcctgctgtttgacacgatggccggcgtattcaaccacatggcgggcggccgctggtggggcacccttttcttcctgttcatggtgtttgccgcgctctccaccgtgctgggcgtctgcgagaacatccttgccatgatccgggagctgaccggctggagccgccccaagggctgccttgtctgcggtgtcggcatctttctgctggcgctgaccacggcgctgggctacagcgtgctgcactttcagccgtttgcgccgggcagcgcgtggctggacttctgggatttcatcgtcagcaacaatgtgctgccgctcggctctctggtgctggcgctcttctgctgcagccgcctcggctggggctgggaccgctttgcggccgaggccaacaccggcaaggggcccaagctccggccgtggatgaagcccgtctttcaattttttgttccctgcgccatcgcctttatctatgtgtacggcatggtgacctttacttggcggtaacaccgcccaaaaagccccgccgcccgatttcccgggtgacggggctttgcgctttattttgccagacggcggtattccatcggcatcaggcggaactggtcgtaaaacgccttggcaaatttgccctgactttcatagccgacaccggccgctatgtcctgcacccgcagcgttgtcgtgcgcagcagctcggcggccttctccagcctgcggcggcggaaataggcaagatacccctcgcccagcacattctggcagtacagcttaaagccgctctcgctcaggccgaagccatcggccagcgccttggccgtatgccgcaccgagagatcgcgcagcacaagcgtttctgtttcgcgcaccagctcgacctgccgcgccgggcagcgggcggcctcggcgtcatcaggcaggcgcagcagctcatacagcagccgcaccgccgtgtagcgcagctcgcccggggtggcgtactcggcatcgctccactgctcgtccagaatgtcggtgatggcctcgctgagcgggcagcagtggacaccgtcccggcagaagtagtccgcaataccgccgatctcaaggcccatcacggtcaaaaagctgtccgcctgcacggcgtccgggtcgatgaaaagctgcagcccttcatactggccgcccggcaggtagaacggctcatccggcgcagcaaagctgacggcggcgtgtgcctccgtcacgatggcgtattcctccggcccgtcggggatggcccgccgcccggcgcggcagaagtcaaagaccagcagccgcgcagcctgcacaggcagcggcgcaaggtggctgtccagccgggtaaagctgagccagattcccccggccagcgtatgcagcccctgcggggccgcctttcgttgtgttttcatggttacattataacaaataatttaaaattccgcaaattgtgctttccaaagcacaatgtcaaaaggaacaattcagcttgtatctaaagaattatccgctttatatattgctaaaagggcaaaatgtgcgaaatcggaaaattggcattttctgacattttacgccgtaagctctgttttttagtccgtgaccggcacatcaaggccgaactccgccgggcggaagcgcgggcagacattctccgatatgcagatgaccgaggccgccagccggctgccgatctcacaggcctgcgccagcgtcttgccgtaggtcaggccgatgaccgtgccggcaaaaaaggcatcgcccgcgccggtcgtgtcgatgacatcgacctttttggccgggaccatgccgcactcgccgccgctgcgggcgtagacggcccccttgtcccccatcgtgaccaccatgcaggggatgttggcgctgtgtacattgccagccagcgtgcggcacatctcgtccgcgtccagctcctcataattgtctgagaacatcagcccggcctcctgctggttgcagacaaagcagtcgatctgctgcaaaaagtcgcggcgctccatcgcaatgctcatgttggacaccgccgcatagacctttttgcggtactttttggcaaaatgcagcacctgcttgacggtctccttctcaaggtccagctcaatggcgatgccgtcacagtccgcaaagatctcatcaccctgctcctgcagcagccgggtcagcggcgtggtgtcgggccgcttggagatagcggcgcagacatcgccgtcattgtcaaacacggccagccatgtgcccatgccgtccggcacgcgccggatgtaccgggtgttgaccttgtgtctggccagcttgtcgatgacatcctgaccggagccggtttcatccacaaggctgacaaaggtggggcgcagctccacattggcaatatcctcggccacattgcggcagacgccgccgtgtacctgctcgacccggcctgcgttgcgcccgcccggtatgtaggtggacagcggataccccttaatatccacaaaaacagcaccgatcacaacaatacccatggtaaaggtcctcacttatatgattttacctgtattttaccataagtccgacaaatacgcaaacacaggcggcgtccgtcccgcattttgtatccccaaaagcccccttgacatctgtgtgcgcatacggtttaataagagcaaacggaggtgctcgcccatgaaaaatcaaacgaagaaacgcgcgttttatgtattgaccggctgcattgccgcgctggcgctctgcattgcggcggcgctggcactgctgtgccgcacccctgccgcgcaggatgtcagcatccccggcgtgcggggcaccatctacgccacggtgcagctgccgggcaagctggcccgcagcggggatatgccgctggccgtgctttgccacggctttacgggcagccgcgcaggtgacggccactttgccccgctggcgcaggatctggccgcgcagggcatcgccacggtgcggctggatttccccggctgcggcgacagcacggagccgttcaccgcgtatacgctttcccacatggccgatgatgttgaaagtgcgatcctgtacatgcaaagcacctacggcaccggcccgaccgcgctggtcggccacagcatgggcgggcggctggccagcctgtacccgcagcaaaagggcggcatcgccgcgctcgtgctttggagccccgccaacggtgccgggctgaacggccttgaatttttgaacatcgacgatttctccgcagtggaggccatggccgccgaggccgaggccaacggcagcgttactgcctggggggtcgagctgagcgcagcctatatggatgagatgcgcacctctgacccgaacgccgccctgcgggaaagcgccctgcccaccctgctgacctacagcggcagcgagggcattttaagcagcaccacccaggccgaaacgattgccgccgtgcagagcctgccggacggtcaggtcgtgctggacccctttgcggccggcaaccacaactatctcagcgatgaccccgccacggccgccgcccttgacaaggccctgcggcagaccaccgtccggtttttaacacagtacctcgggtaaggccgcgcctgccgaagcttttgttaaatcgcacaaccttggccttgacgcagttttactgcagtgctacaattatggcaataccgcataattctaag

SEQ ID NO: 14068 - DNA, 22523 bp, Unknown
  gut microbiota DNA sequence
ctgagattcttctgggcaagccgtgaatgttacatggtataaacatagtataaacaacaagcgcgccttgacaagcacccatgggtgcggtattctttaaaaaagtgtaatggtttgcggctccgccggagcagatctgctttttatggtctgctttgtgaggaaaactgcgcggcggataaatcagattcaggagcaaaagatggaaataaaggaatatactgaattcaagcaaagcgaagttttagacctctacacacaagtggggtggactgcatataccgagaatatgcttgcgctggaacaagggtacaaaaaatccctgcttatactggcggcatacgaaaacgatgagctacttggcattgttagagccgttggcgatgggttcactattatccttgttcaggatattctagtatatccaaaatatcaaagacacggtattggaacagcccttctcaaggccgttcttgataagtactcagatgtccggcagcttcaacttgtaacggataacacccccaaaactgtggccttttataaatcacttggattcttgaatttttcggaaattggatgctgtggatttatgagagcttaacatttccgttttaccgcgcagggccggtcatcgactgcccctgcagccatcgctgtggcaagctgcgcggtgcgcatacctgcgtcccctgcaagcccgccggggacaacagataaatcagaagtcatagaggatatacatatgctgaacaacaaggaatttgacctttgggctgatgggtatgacaaagcggtcggcctttctgatgagggaaacacctatccctttgccggttacaaacgggtgcttgggctcatttttcagaccataatggaatcgggaaatgccgttgtgctggacattgggttcggaacaggcacattgacaaccaagctgtatgagcacggctgcgccatctatgggcaggatttttcagcaagaatgattgcgctggcatccgagaaaatgccaaatgcacatttatatcagggggacttttcaaaagggcttgttgagcctttgcgaagctgccgctatgattatattgttgctacatactcgctgcatcatttgacggatgcgcaaaagagaagctttctgtcagacctgcgcagctatttaaaggagaacggcaaaatcatcatcggtgatgttgcctttgaaacacgcgaggctttggagcagtgccaatggaaggccggcgacgcatgggattctgatgaaatctactttgtcgttgaagaactgagaaaagatttccctgctctttcctttacacaagtgtctgattgtgcaggcgtcctgatgttaggctgacaatcacgctttcgccacgccgcccgatttttgaaagaaaaggtagcatagcaatgaatcatctggttatgacctccctgcttatggcggcaacgcatattgcctgctttgccgcaatgaccgaacggaagtattcggtcaaaaagaccctgctgctctacgggctttacaccgtgttctttatcgtatggatcttgctggcgtttatgctgctgggcagggcctccccgcatgtgagccccttctcgttcgtgggcaccatcgtaccggccgttgcgctgtttttgtacacctcggccgactccttcagcaaaaagctgtttctgatcctcacctatgccaacatcttctgcatcatactctgtctttcggttttgctgtgtgacagcctgctgccgggcctgtcgagcgttgggcagacatatgcgcgcagcattgtgcgcacagcgctgaacataccggcgatcctgctgtatctgcgctatgcccgcccgtatatgcgcacggtgccgggggacaaaaaacggacatggtattccatctcgcttgtatcggcgctgtttctatttgtgttttccctgctggttgcacttatcatgcgcaatgcgcgcgacaccgtatattccatgctgttcggcacgaccacggtgattttcattgccgttctctgggtcgtattcggtacgatccaatccatgagcgccgaggcgcggatggagctgatcagtcaaaatgtgcaatacctgcaggggcagcttgccaccgcgcgggaaaacgccatggcagccaaggccatgcgccatgatttccggcatcatatgcagaatcttgcgctgctgctccggcaggaaaaaacgcaggaggcggagcattatattgaggaatttatccacagtctggacaccgcaagccagattgatttttgcccgcatgtcacggtcaacgctattctgaacaatttttacaaccgcacaaaggaagagggcatcgccgtttcggtgactgccgaggtgcccgagcatacggcgattgccgacatggactttgtggcaatcctttccaatctgctggaaaacgcgcgcaacggctgtgcggcgtgcggctcccacggaaagatcacggtaagcctgcgcataaaaaagggaaagctcgtgattgtgtgcagcaacccctgtgcccccggccttgtgattgaggacgacatgattgagccgaagggtaccggcattgaaagtatcctgatggcggtcgataaatacgacggcaacatccgctatcacctgcaggacggcatcgtaacggccagccttgtcctgaattgctgagcgccgcagccccaacaggcgcaaaaacacaacaagctaagacggaggctccccagtgagcctccgctttttttgcggcggacgctgccgtatttcacgcagaataaccggcgtttcacacaaaaatgaggaaaagccggattatccgattataatcagagtatagatgaagccgcttttcaaggcactgcaaagcatgaaatacgggagggctatcctctgctatgagtcaacataaagatcactttacaccgcggatgttccaccgcctgctcgccccctcactggcgtactccttagggctggcgtttgctgccatggcggacgccatagtaatcggctggcagatgggcgccaccggtctggcggcgctctgcttcagtctgccgctgcatacgatgctccttgcctttgtacacggtctggggctgggcggcagcacgcgctatgcccggcttctggcggagggaaagtgcgcgcaggcaacagattgtttcaaccgcgtcctgcaggcggggcttgccgtcagcgtgctgcttgccgcgcttgtcaatctgttcccgcaagcaattctggagcttttgggcactacacccgctgacggcacactgtacaccgccgccaaaggctatctgtgtctgattgcagccggtgcgccgctctttcttttaaagtatgtgctcaacgactttttgcgcagcgatgataaccggcggctggcaacgcgcggttcgctgtatggcaacgccgtccgcattgcgctggatcttgtgcttgtgccgggtctggggatgggcacggccggtgccgccggtgctaccctgattggactttcggtgtcggtgctgtgctatatgcccgccctttttgcgaaagaccgcacactgcaccttgccgccgcccggccaaacccgcgcgagacactctcctgcctgaaaagcgggctgcccgccgcggccccgtacctgtaccggatggtgtttttcctctttgccaatcatctgctgctgcgcctcgagggggaaaacggcgtggcggttttcgccgtggtgcaaagcaccgcgtatctgattttgtacctatacatcggtgctgccaaggcggcgcagccgctgttccacaccttttacggtgagaaaaacctgccggcggcacggcgcgccctcgcgcttgcgctgcggtggggcctctatgccggcagcaccgcagcggcgctgatcttcctgtttccgggccttatctgcagtgccttcggtctgcatgaggaggcgctgcactaccttggcgcaccggcgctgcagctgtatgccctgagcagtatcggggccggtgtcagcatggtgctgcacacctattattgctcgattcatgaggagcaaaacgcctttatcatcaccctgctgcgaaactttgtaatactgctgccctgcacggtattttttgccacttccctgccgcagttttggtggctttaccccgtgaccgagctgctttctctgctgctgctttttgtatggcgctgtctgacaggccgggaacgcctgtttgatgccgcgcgggtctacgcactgacgatgcacggcagcagccgggagttcacggccatggccgacggcattgcagccttttgcgaccggtggcaggcggcgccgcggcagcggtactttgtttcgatggctgcagctgagagctgctcggcgttccttgcgcaggcacccgggcatattgcggagatacagatcacgcttgtcgcgcttgaggacggcgcttttgagctgcacatccgggacaacaccgactttctcgactccttctccgcacaggccgcccgccttggcggaaaaggcgccttggacatggaggccgtgggtatgcaggtcatccgccagcaggccaaggagttctcttaccagcagtatgagagcttcagcacccttgtcgtgcggatataaaaagtgttttcccgctttcccgatttcctttacccttgccgaaaaggcttgtgcgggctgtgcatttatgctaaaatatcagcaatacggttacaactatatggcagtaatgctcttatataccggaggaaggcggcagcttgcggccctgtgccttcggcgggcattggtaaaggagaacaggaaatgagaaaagaatgtaccgcgctggcactggcgggcgtgctgctgcttgcggctgtcccctgtgcatggcccgtttgcgcgcaggacgcagcaccgggcacaacggtggacatcgcattcacccacgacacccactcccacctgaacaccttcaccacgatggtggacgggctggaaacagagctgggcggctttgcacgcatgaacaccctgatcgaggcgcagcgggcgcaaaaccccgatacgctggtgatcgacggcggcgacttctctatgggaacgctgatccagaccgtatttgaaacgcaggcggccgagctgcgtatgctggggcatcgtggctgacctgtacagcggccagatgctgagtgccgtgaccgacatgtcctatggcatcctcgccatcgtaccgaagtatgcggacggcacccccgtcaccgactttgaggatgtcatcatcacggaaaacggccgggagctgaaggcgtgggattcgatcgcgcgctatatggcctcgtttgccgacacggacggcgacggcattgccaatgtgccggcgtattacagcacaacccacggccgcaagctggtcgataccagccgcagcccccttgccctgctgaagaatcccaataaattcaccgccgtttacgccggtctgctggccgtggcggtgctgctgatcgtgctggttgtgctgctgatccgaaagctggtcaaaaaggccagacgccgcgccgcataaggccgcccttgccaaaagggcgcatcggggctatactggatacgaatacagtataagcattgccctaaaaggagagcaaacatggagagcgaaaaaatcattcttgacattgtggtcgatgtgcagaaggactttatcaccggtgcgctggcaaaccccgctgcgcaggccaatgtagcccatctggccgataccgccaaggcccacgccgaggccgggcactggatgttctttacccgcgacactcaccccgacaactatctggaaacgcgggagggccgccacctgccggtggagcactgcatcgagggcgaggacggctggaaccttgcccccgagctggaaaacgcgatggccggcaccgagcctgcagtctgccgcgtgatcaacaaggccaccttcggcagctatatgctgcccagcgatattctggacgagctgatggcccacaacaaggccgtgaccgaccttgaaaaaatcgttatctacggctactgcaccgacatctgtgtcatcagcaacgcgatggtgctgcgcgctgccttccccgagacggagatcgagatcctctccgactgctgcgccggggtgacaccggacacccaccgcaccgcactggacgccatgcgtgcctgccagtttacgatcctgtaaggccggaggcatccgcaccatgacaccgcttgaagcgctcaaacgctatttcggctacgactccttccgtcccgggcaggaggagatcgtcaacgccattctggccgggcgggacgcactggccgtcatgcccaccggcgcaggcaaatcgctctgctatcaggtccctgccctgctgctgccgggcatcacccttgtcatctcgccgctgatctcgctgatgcaggatcaggtcaaggcgctgaacaacgccggtatccgcgccgccttcatcaactcaagcctgagcgaggcgcagatcgacaaggcactggcccttgccgccgagggcagctacaagctcctctatgtcgcacctgaacggctggagagcagcgccttccgcagctttgctgcagcggccgagctttcgatggttacggtggacgaggcacactgtatcagccagtgggggcaggatttccgccccagctacctcaagatccttgcctttgtggacagtctgccccggcggccgatcctctcggcctttacggccacagcgacccgggcggtgcaggaggatatacgctgcacgctgcggctgcaggaccccaaggtgctggtgacgggctttgaccgcccgaacctgtattttcaggtcgaggccacccgccgcaaggacgattttgtgctgcaatatctgcgcgaccacccgggcgagagcggcatcatctactgcgccacccgcaaaaatgtcgataagctgcaggagctgctggccggggctggctttgccgccgccaaataccacgctgggctgaccgccgaggcccgccgcaccaaccagaacgatttcatttacgacaaggcgccggtcatcgtggctacaaacgccttcggcatgggtattgacaaatccaatgtgcggtttgtcttacactacaacatgccctccagcatggagaattactatcaggaggccggccgcgccgggcgtgacggtctgcccgcccaatgcgtgctgcttttctcggcgcaggatgtcatcatcaacaaattcctgcttgagcgcagggagaaccctgatttagaggaggaggatgccgcgctgctgtaccagcgtgatttgcagcggctgcaggcgatggagcagtactgccgcaccggagcctgcctgcgcaacacgatcctgacctatttcggcgagcatcccaccgcgccctgcggcagctgcggcagctgcaacaatgtctatgagcaggccgacctgaccgatgccgccaagcggatgatcaactgtgtggcggagctgcgcgggcggtacggcaaggcggtcgtattcggcacgctgcagggcgcgaaccgtgcccgcctgcgggagcttggcgcaccgggcctgaaaagctacggcaccctgcaggcactgccgcgcgatacgctggaccggctgctggcccgccttttggaggacggctaccttgtacagaccgatgaccagtacgctgtgctgcgtctgggtgacatcaccccgctgaaggagggggcgcaggtccttgtacggctgccgccccggcaggagccggagcgccccgccccgaagccccaaagccgcagcatcatggacagcctgaccggtgcagggcttgcactttttgccgagctgcgcacgctgcgccttgagatcgcgcagagcgagggactgccgccctatgttgtctttggtgataaatcgctggccgatatgtgcctgcgcgcgccgcgcagtgtggaggggatgatcggcgtgtacggcatgggcgagcgcaagtatgaaaagtacgcagcgcgcttttttgccgccatcgaaacctaccgcaccgcacaccccgatgccgtgctgagccttgcttcccccgctgcggagcctgcccccgccgagggcgaggcaccccgcaaggccgccaagggccccaaggccgctttttccctgaccgaggagactgccgggcagttccgctacggggacgcctactccggtgcggagctgaaggccgcgctggccgaggccggcggccccggcatgaaggccccgaccatcaaggccattgaggcatggctgcttgaacagcgcctgattgccatggaaaagctgcccaccagcgggttctactatgtccccacccccgccggtgtcgatgccggtctgcgcagcgccgagcgtgtcagcgcgcgcggcacgccctacgccgtgctgcagtacaccccgccgatgcagcgaatgatcgtagagcattttatcgtgaagtaacggccccgccgccgtataaaggcatcgcccgccgctgcgtgactgcagcggcgggcgatgtttgttttttgttttacggttagggcttgtaatactgcgccagcacgcgcagcagcgcggcctcattcagcggctttgagatatggtcgttcatacccgcctgccgggtgcgctgtacatcctcggcaaaggcgttggctgtctgcgcaatgatggggatctcattggcctgcgggtggctgctttcgcgtatcgcgtgcgcggcctgcagaccgtccatcaccggcatgacaacatccatcaggatcgcatcaaacagcggggcctcccccttaccggttgccaaaaaggcgtcaagcgccgcctgaccgttttcggccaccgttaccgcagccccggcgttttccaacaggtagcaggcgacctcggcgttcagggcgttatcctcggccagcagcagcctcatcccgttcaggccgggcagcggcttgcactcggcaggctgcttcggcgcgctcagatccagctcaaggggcagctctatgacaaaggtcgtgccctcgcccagcgtgctgtttaccgtgatcgtgccgcccatcagatccacaagctctttagcgatagccagccccagcccggtacccttcagctcactgcgcagggcttcatgctcctgcataaagggctcatagatatggcgctggaactcctcactcatgccgatgccggtatcctgcaccgtaaagcgatagaccgcgtggttctcgtccttggggatctcgtccagcgtgtagttgatcgtaccgcccacccggttgtacttgaccgcgttgctggagatattcgcaatgattcgctgcacatgcagcgggctgccgatgacatggctgtgccgatggttgaaattcacatggcaggtcagctgcatccttaccgcctgcgtgtgcagtgtgtccccgcagcgggccagcagctcatacaggtcaaaaggctcatgggtgatccgcatacggccgctctccatacggctgatgtccagcacatcattgatgagcgtttccagctgatgcccggcggcggtcagcttttccatcgtgtcgcggaccttttcagggttctccgcgttgtcgtaggcgattttggccatgcccaaaatgccgttgagcggcgagcggatgtcgtggctcatccgggagagaaaggatgattttgccttgttggcagcctcggcgctgttgcgcgcctcgaccagccatttttcgcgcttgtgcagtgcgttgcagtcgcaaagggtcagcagccacataacgcggccgtccggcagctgcttttcgcccttgcaaaggtaaaaccagcgccagcccccatcccgggtgtgcaggcagagggtacgcttgcccttgaaccggcggaaattctcaaggtcgcgcaggtcgcagtcctcggcaaagcagtcggcaaactgcatcgtatggccgctgccgaacacctcgtcctcgtggcagccgagggagtgcagcgccagctcactgacgatgccaaccggcagccccggcgtgtagaagccgcctacaacgccgacaccgttatttttttccagcagctgctggatggatttgtcgattacctgcagatccttccgctgaaaatcgctgctgaaaattggctcctcgtaaaagcttttgatcatgccgtgctccctgttcttttgttgcggttcgcgctcacttggttacattgtaattgttttgcggttaaattgcaagcgttatttgtttcattgcaacaaatacagcgattctgcccatttgccgcatcaaaaacaccaaggggcaggcccattggcctgccccttgcagcgaaaaactatattactttgtcatactgactgcggcactctgcaatgagacaatgcgcttttcagtcgttggtcgagatgtccgtgccgaaatatttctcgctcagcgccttgagcgtgccatcggcgcgcagctcctcaatggcggtgtcgatggcagcgcgcagggcagcggtctcctcgcccttgcgcatcgggatcgcaacctcgttggcatcatcggtcagcacagcaatcttcacattggcatcgggatgctccttcgtgtagtcgtagaaggtcacctcggcgttgagggtcgcatcgattcggccgctgttcagcagctcaaaggtctggttcaggtcatcgaccgccgtgacggtcgcgccgtactgctcggccagctgggcataggtgctggagatcgtgtttgcggtcgtcttgccgttcagatcctccagcgtctggatgctgtcatcgtctgcccgggtgatgacagccgtgcggttgtaggcgtagggggtggaaaaatcgtattttgcggcgcggtcgggggtgatgtcaacgccgttgaccatgatgtcatagcgcccggcgtcaagaccggccagcaggccgtcccactcgccctcaacaaactgcggctccacgccgagcttttcggcgatcttggtgccgacctcgacatcgtagcccacaagggtatcgctctcatcgtggtaggtccagggcgcccaggtgccctccattgcgatggtgatggtgccgcgggcctggatctcactcaacaggtcggcggcggtggcatcggcagacgctgccgtgccggaggatgctgcagccgtgccgccgcaggcagtcagcgccgcggtcagggcggcggtcagggtcagggcggtcagcttgttcaggtttttcattacaaaaggctcctttgcttgtaggtctgtaaaaattcttgggtgcggggctgctgcgggtcgttaaagaacgcctcggcagtgttttgctccacaatgacaccctgctccataaacaccacgcggttggccacatggcgggcaaaatccatctcatgggtgacgaccagcatcgtgcggccctcctgcgcaagctggcgcataacggtcagcacctcgccggtcagctcggggtcaagcgcggaggtcggctcgtcaaaatagaggatctcggggtcggccgccatggcgcgcgcaatggctacccgctgctgctgcccgccggaaagctggctggggtagtagttggcgcggtcatccatgccgaccttgacaagctgcgcatgggccagctcctcggccgtgcggcggggcatcttgcgggcaatgataagcccctcggtcacattctgcagcgcggtcttgtttgcaaacaggttgtagttctgaaagacaaagcccgtgcggcggcgcagggcgttgatctcggcatgggtagcgcggtgcagctcgatgcggcggccgtcaaaatccatcgtaccggcgtctgccctttcgagaaaattcaggcagcgcagcatagtggtcttgccgctgccgcttgagccgaggatggccaccacatcgcccttgttcacatccagatcaatgcccttgagcacctgcagcgggccgaaggccttgcgcaggtttctgatttccagcatagcttcaactcctttgtgcgccgcggctgttgaggtagcgctcgcccacggcctgcaggcgggtcagcaccgtgcagaacagcaggtaaaccagaccgacctcgatatacagcgccagcggctcataggtgcgggccacaatgcgctgggtcgtcataaacatttcggtcacggtgatgttggccgccagcgaggtatctttgatcatggcgatcagcgagcttgccagcgtggggaacgccgtgcgcagtgcctgcggcaggatgatgcggcggatgatctgcagatagctcataccgacgcactgcccggcctccagctggccccgtgggaccgactcgagcgcggcgcggatcgtttcggcgcagtacgcgccctcgttgatggaaaagacgagaaccgccgcggggaacggctcgatcaggatgccgacgcccggcaggccgtaaaatacgacaaaaagctgcaccagcaccggcgtgccgcggatgacccagatgtaaaaccgggcgatgcgctgcagcaccggcacctgcgcaaactggaccagcgccaccgccacagcgatgatgagcgccagtgtgaaggaaatagcggtcagcgggatcgtaacggtcagacccggcagcaggattttaccaaaggaatccagaaggatgccgacaaggcgttcggacatggggcggttctctcctttatatacgggggcggttgtatttcccaccaaaacagtatgctatgagattgtagcacatctgcccgcattttgcaagagccgccgggactatggtatttttgtcggctttgtgctatactgttgagatagaaaagtacactgctttcacagaaaagagaaacatcatgagcactactgaagaaaaacgcgaatccatcccaaacagcgtcaaccggatgctgtttgccggtatcggcgtcatcctgcaggttgcgtggatctgctggctggccatcaagctgaacgactactcgaccgccattcaggtctgcacctcggtgctggccttcctgatcacgctgcgcatatacgggctgcatatcaactctgcctataaaatatcgtggatcatcctgatcctgctgttcccggtgttcgggctgacgatctacctgctgttcggccgcgccggcgcggtcagcgtcatgcgcaagcggttcaacagcaaccttgcgctgctgcgcagctaccacgcgcccctgctggcccagcgccgggcgctgccctaccccgaccgcaccgcgcgcaaccacgcccactacctgcagacgcaggcaggctacccggcctatgacaacaccgatgtgaccttctacggcgacacctgcgcagcgttggaggcacagaaggaggccctgcgcagcgccgagcattttatttttatggagtaccacgccatcgaggacgcctccgcctggcaggagctggaggacatccttgccgagcgcgccgcccacggtgtcgaggtccgcgttttttacgatgatgtgggcagcatcggctttatcacgagcgcctttgtcaaaaagctggagagccgcggcatccagtgccgccagttcaacccggtcattccgatcctgaatgttttcatgaacaaccgcgaccaccgcaagatcacagtcgtggacgggcgcatcggctttaccggcggctacaatctggccgaggaatattttaaccgcacccacccctacggccagtggaaggacaccggcatccggctggagggtgacgctgtgcgcagcctgacgctgatctttttggagctttggggtgcgacccagaaggagccgcccgagatcgagcgctacctgcccgaggtcccctacaccgcgcgtgagaacgctgtggtgctgccctatgccgacaacccgctggatgatgaggctaccggcgagaatgtctacctgaacatgatccgcagcgcgaaggaatatgtctacatcaccaccccctacctgatcctgagcgatgagatgcagcgcacgctgcggcttgcagcctccagcggcgttgatgtgcgcatcatcacgccgggtatccctgacaaaaagatgatcttctcggtgacgcgcagctactatgcggcgctggccaagagcggcgtgcgcatttatgagtacacgcccgggttcatccacgcaaagcagtgcgttgcagacggcgcagaggccgttgtaggcacgatcaattttgacttccgcagcctgtatctgcattttgagaatgcgtgctggttctgcggctgccgggccgtggccgaggtgcgccgtgattttgacgagctgttccccctctgccatgaggttaccgaggagtacgccgcccgccgcagcgttgccctgcgcggtctggactgcgtgctgcgcctgttcagcccgctgatgtgaccccgtatacaaaagccgcctgtgtgaaaccacacaggcggcttttcctcatttcagggcaggttatgcgccgaacaccttggtgtagtcggccttgaacttctcaataccggcatcggtcagggggtgatgcagcatctgctcaatgaccttgtagggcacggtggcgatgtcggcaccggccagcgcacagtcggtcacatggatggggttgcggacgctggcggcgatgatctgggtgtcgatgtcgggatagttcaggaacatatcgtggatggtctcgatcaggtcgatgccgggctggccgatgtcatccagacggccgaggaaggggctgacataagtggcaccggcgcgggcggccagcaatgcctgattggcgctgaaaatcagggtgcagttggtggggataccctccgcagagaggaccttgatggccttgaggccttcggccgtcatggggatcttgacgaccatgtgcttgggatcgagcgcgtagatggcgcggccctcggcgatcatcccctcggcgtctgcggtcgtggccttgacctcaccggagatggggccgtccacgatcgtggtgatctccttcagggtctcggcatagtcgcggccctcctttgcgatcaggctggggttggtggtcacgcctgcgataacacccatgtcatttgccttgcggatctcatccacattggcggtgtcgatatagaacttcatagaacgctcctcctgtaaaaatgtgctttactgtcaacattattgtacacggcagaccgtgcccgggcaagaaagtgtgtgataaaaaccggacagaagtttggattttgcgcaccgcttacccctgcccgtagtaggcgttggggccgtgcttgcgcaggaagtgcttatccagcacatgccggggcgccggctctgcgttggggtccagcgtcagggtcaggatgcccattttggcgacctcctccagcactgcggcgtggtagacggcctcggcggccgttttgccccatgtaaagggaccgtggcttgcgcagagcacggcgggaagatgcaccgggtcgatgccgcgctcgcggaaggtttcgatgatgaccttgccggtgttcagctcgtagtcctcctcgatctctgcgggggtcagctcccgtgtgcagggcaccgggccgtaaaagtagtctgcgtgggtcgtgccgaaggcgggcagatcccgccgggcctgcgcaaacgccaccgcatgggtggaatgggtgtggacgatgccgcccagcgccggaaatgcccggtacagcgcaagatgagtctttgtatcgctgctggggttgaggtccccctcgaccttgttgccgtccagatccatgacaacgagctgatccggcgtcagcgcgtcatacgcgacaccggacggcttgataacgaaaagaccgcgctcccggtcgatgcccgacacattgccccatgtgtaggtgacaagcccgcggcggggcagctccatattggcctcatagacctgctgcttgagtttttccagcattctgatcgctccttgttgacttttgccttcattatagcagacccggtgaaaaaaaacaggccccagagtcaaaaacactggatttttgttcaaatatttgcagcggcgaggtcagaattgtgctgtgcataacaccaaaacctgcatacagacaggatttttggcgccgccttgcgttttactgcggcacagcgtaccagatatggtggcgcaggcaggattttgcagtggggtgttgtaataaagcgcacaacagcgcactgccctgccgcgccactttgccttgacaaacacgcgctttgttgtatcataaaggtaggaggaagagcctatgctgacttgtaacatggatgtggaggagcgcagcgtctggctgcgggccacccccggcgccgctgccatggcgcagcccttttactgcaccgaggccggcaacttttacggccgcgcccactttgccacagcccgcaccgacaaggatagctatatcctgttttataccctgtccggcagcggtctgattgagcagaacgaccagcgcatcgagctgcctgcgggcagcgccctgctgctgaactgccgcacaccgcaaagctactgcacagcccccgggcaggaccactggcaccactactgggtgcatctggacggcgcgggcgttgccaatctcgccgaggtgctgctgcctcaggggcggctttccgccgtgccggtcagccggctggaaatgcagccgctgtttgaatcgctgaccagcgagtgggagcatggcaccgccgccgcccagatcgagaccgggctgctgctgcacaggatgctggcgctgatggcgcgccagctgctggccggggacgagagccgctccaaccgcaccctgattgagcatgcggcagagtttatccgccagcactacgccgagccgctctcgcttgaccggctgctggcccagacgccggtgagcaaaagctggtttttgcggctgttccgccagtatatgggcacaacgccctataactttttgttgtccacacgcatcacccgcgccaaggagctgctggtgctgacggatttttccatcagcgagatcgcgcatcaggtcggctttggggacgagagcaatttctcgacccgctttgccgccatggtggggcaaagcccccagcaataccgcaaaagtgcgatgaagcccgccggggccgagtgactgcgctttggagattttgggttttgggaaagaaggcatttttcatgaaaaccgaacgcattgaccgtgtgcgcaccgccctgcgcgcagcgggactgacccagatgatcgtctgcgaccccaagagcatctggtacctgaccggggtctctgttgacccttatgagcggctgctggcgctctatctgccggtggacggcgagccggtgctgtttttgaaccggctgttccatctgccggaggtcccctgccgggccatctggcataccgacaccgatgccccggtggcacagatcgccgccgtggtggaccccggtgccccgctgggcatcgacaaggagtggccggcgcggtttctgatcccgctgatggaggcgcaccccggcatgcgggtcgtgctgtccagcgactgcgtggatgactgccgcgcctgcaaggacgccgaggagcaggcgctgatgcgcaccgcctcccgcatcaatgacgctgtgaacgaggccgccaagcagtatgtaaaggccggcatgaccgagcgcgaggttgcctcgttcatcgacagccagtaccgcgcccacggctgcgaggggccgagctttaccacgatcgtttccttcggtgccaatgccgccgacccccaccacgagccggatgacacagtgctgaagcccggcgattgtgtgctgctcgacatgggctgcatcaaggaccgctactgcagcgatatgacccgcacctggttctgcgggcagcccacggagaagcaggccgccgtgcatgaccttgtgcgccgcgccaacgaggccgccgaggcgcttatcaagcccggcgtgcggctctgcgaccttgacgctgccgcccgcagcctgatcacggcggccggctatggtgaatacttcaaccaccggctgggccatttcatcggccagaccgaccacgaaaagggcgatgtaagcagcgccaacacggccgttgccaagcccggcatgatcttttccattgagccgggcatctacctgcccggtgagttcggcgtccgcattgaggacctcgtccttgtgaccgagaccggctgcgaggtgctgaaccacaatgacaagcactgggcgcttgtaggccaataatacccggcacgccccgcatagacaaacagctcccccgcccgcactgctgcggacgggggagctgtttgtctattgcggaattgcttagtcgaggaagttctcgttcagggtaacgccgaagtcgcgggcgatggcgcgcaggtcatcgtcggtgatggtctggcggatcaggccgccgcccatcgacagcaccttgacatagatctcggcgctcttttcgatggtgtgcgccagaccgaaggtgatgtcaaagtccgggccggaggcaaacaggccgtgctgcgcccagacggcagcctgataggtcttcatcttctcggaggtggccatggcaatgtccgcgccgcccggcaccatccaggggcagacgccgacaccctcggggaatacaaccgggcactcggtagcgctctgccacagagcgcgggtgaagtcgcggtcggtcagcggcaggatataggtcagcgcaatgacattggtggcgtggcaatggtagatcacacggttggcgccgttggtggccgccttgcggacactgtggttcatgaagtggctcgggaactcagaggtcggacgggcaccctcggccaggccccagacaatgcgccagctgtcgcccttgtcgttgatctccacgatgccgatgctgtggatgggatcgggctcgacattgcggaaaaacttgccggagccggtcgtgatgaagtactcccctgcaaggttatcggcctgaacgcccatgttgacccactcgcgcggctcggcgtcgaagtaggggcggcaggcagcgacctcctccgccgtcatgcggtaggtcaggttgccgccgttgcgctcatgccagccctgcagccagccatcgttgcacatgcggataaagcccttcacacaagggatttcatagattgtagacataatttctgctcctttgcattgttgtgtaggcttcccccgtgggggaagctgtcagcggccccgaccgctgactgatgagggcaaagtctcccctcatccggcctcgggcggggcctcggccaccttcccccgtgggggaaggcatcctgaaatcagcgcgtaacaatatccaccggcacattgaagatctttgccaccttcaaaatcgtgtcgatatgacggcccggggcggcggccatatggtgggtggggccggcctcgctccagcggttgcagaactcgcgtgcgccgcagctgaaccgggtgcgcatgttggtatcgccaaaggtgaagatggggcccggctcgttgacgccctcggccacgacaaacttgaagtgaccgtccttgtcctgcgtgatgccgaggtaggtcacatcgcccaccggcggatagaactgggtcaggtagccgccgccggtcttgccgtggaacaccggcacgatcttcatggtcggcttcttggcctgagagatgtcggcatcgccggagccggagtgaccgatgatgcagatatcctcgttgaagtcaatggagtacatctcgctcagctggccgcagccggagatcgtcttgaggatggacatggccatcgacaccttgatgtcgccctcgactgcacaggcaacgccctgcttaatcagcatcgagaatgcggggatcagcatcgaatccagcacgcccgccttgccctgcgcaaagccgtcatagtggctggccacaaaggcgatcttctcgtccttgacccactgctcaaacgcgaccacatagcgggccatatcccagaccttctcgatggtgccgcccccctcgatgtcaaaggtgtcgagaatatcctgtgccttggcgcggatggcgttttcatcggtgatgttgtcggcaatggcccacatcttctcccaatcgaactgcttggtgtagagccacatgcggttgtacaggttcgtctcgtcaatgtacagatccatcatgccggggtaggggcggccgatctgggccaggtttgtatcgcggaagcggcggcgcacctgagcggcacggcaccaatcttcaatctcagcctgcacggtggggtcaccgccctctaccacaccggtgataacggcatggcgcttgccggcgcgctccagatccgcgaccatctcaccaacggcaccgcaggcgtacagttcgcccagccatgtcgggatgtcggtattggcgtagtcgggcgctttcttcttctggacattgaccagcacgaccggcacatccagatcgcgcactgccggcagcatattataagaggtagcgtaggtcagcagctgcaggatgaccagatcaacatcggcagcgcggaatttatcgcctgctgccatcgactgctccttggtcgtgacaatgccgccgtcaacgatctcaacggtgtcgggcagcgtctttttgaaggcggcgtactggccctcaaactccggcaccagcgtggggaactgcggcagataagcgcccagcgcaatagcaaacacgccaacgcgggccttggtttcaactaacatggtggacctcctgtatgtgaattgttgtatttggtaggggccgggcatgcccggccctgtcgtgtaaggcaaaaggccgtttgcgggaaagtgcggcggcataagggtatgccgccgggccgtttactgcggctgatattccttaatttcaaagctgcgcttgatagcggcgcgggcctcggccaaatccttgaatacacccgcgtggataaactgcaccatcaggttgcccagcgccgtgccctcagtcgggccggcaaagacaggcaggccggtcgcgttggcggtctgctggttgaggtaggcatcctgactgccgccgcccacaatgttcaggctggtgtaggtcttgcctgtcagcgtctgcagcttttccaccgcgcggcggtaatcctgcgtcagggagttgtagacgcactgcataacctcaccggtggtggcggggacctgctgctgcgtgtctgcgcaggcagccttgacctcctcgatcatcgactccggcgccaaaaagcggttgtcgtccggatcgacacagctggggaagtctgccgcccccttggctgcggcgatcagctcagggaagctgggccgtgtgccggtctgctcgcccagctcgcggcggatggactggatcatccacaggcccatgatgttcttgagatagcggtagcggtactcgtagccgccctcgttcgtaaagttggcagcgcagctctcggggtcggtgatggcgcgcgggttttcgacgccgagcaggctccatgtgccgctggagaggtaggcggcgaactcgtcccgcgccggcaccgccagaaaggccgagccggtgtcatgggtcgcaggcaggatgacctcggcatcaaagccgacctctgcctgcaccgccggggtcagatgccccagcacagtgcccgccgttttgatgggctggaagatgccgcgcggcaggccgagcctttgcagcaacgcatcgtcccagtctttgctgtccgcgccgaccagcgccgttgtgctggcgttggtatactcattggcggccacgccgcagagcaggtagttgaggtagtccggcaccatcaggaaggtccgggcggctgccagctgctcggggtgttccttcttgagggccataagctggtagaccgtattgaacggctggtactggatgccggtgcgggcataatgctcggcaaaggtcaggccgtactccttttcaagtgcctcacggatgccctcggtgcgctcatcgcggtaggccacggcatcgccgatgcgctgccccgcctcgtccagcagaacgaaatccaccgcccaagtgtcaatgccgatggttgcgggggcaaacccggcatcgtgggcggcgcgcaggccgttgacgacctctctggccagtgtgtcgatatcccagcagaggtggccatccttgcgccggacgccgttctcaaagcggtagacctcctgcaggacgatcctgccgtcctgcacggtgccgacaatgtgccgcccgctggatgcgccgatgtcgaccgccagtgtacaagtctgcatagtgttctccttctttgcaaaatgacagtacttttcactcaatgtatctgcattatacgccgccgtctgcggctgttccatccccaaaacaacttgattctttgtgaaaattccattctttcccccgccctgccgttcccctttgcagccgtatcagggcgcaggcgggtaagcaggcgcacttacaaaaaagggagggccgccgaagcggccctcct

SEQ ID NO: 14069 - DNA, 3948 bp, Unknown
  gut microbiota DNA sequence
aagcggcgcgcagatcatcagaatgcatctctgccatcatttcctcgatttcactgtccgacataggctgcagcagcattcgttttgtctccaccttcaatttgtccatacccccgcttctttgctggtattcgtaatttataggatactggttattctaatgccggtgcccacaccttgtcaatagaatactgcctgtcatgcacctttggcagaaagattcaatcaaatcttttttatcttttttctttccgcatacgaaagaaaccgactccggtaacttttcgtaaaatcacacgcattgtccacaaaaaaatcctaatgggcaacgggcggcctgtgctacaatgaagccagaagtaaagcaaaaggagaatcgtcatggcacaatttgtaaaactgaaccctgaagccctgcagccgctgcgcgaggtcgatgcacgcctggtctcttacgatgttgagatggccgaggtcaccggcggaaccttctggaaagcctacacccccgcccagattgccggtgaggaagaattcgtgctgaaaaaaggcactgccggtctgatgctggacaaaaacgccctgatgcaatactatgatcccatcgacctgcgcgataaaaagctgcgcaagctggccaaggagatcggccccgcatgggtgcgcgtttccggcacatgggccaccaaaacctattacgactttgacgaccacaccggcggtcaggtccctgatggctacgatgccatcctgacccgtgagcaatggctgggtgtgctggacttctgcaaggagattggtgccaagctgctgatcagcgtggctgactgtgacggcctgcatcatgccgatgagccttggaatcccagtcaggccgagcagatttttgccctgagtgaggaatacggcaagcccattgatgccgccgagttcgtcaacgagccgcacatgctggagatttccggttgccccaagggctacacctccgagctgttcgccaagaatcacgatattttcgcccgctggctgcgcgagaatcatcccggttgcctgctggtcggcaccagcgcctctgatggtatgccggtcagcgatccgacctacaagtccgacaagcctgcgttcaacttcctgccgaccgtcccgctggacagcctgatgcagcccatgcaggaaaagctggatgtattcagctaccattattacaatggcgtttccgagcgtctgaagactgtcatgccgtccaactactggaagcctgaccgcgcgctcagtgaggattatctggcagtggctggcgatttagcgcgcctgcacgctgaaaagcgcgacacctactgtccgggtgcccagatgtgggtcaccgagtccggtgacgcgggcggcggcggtaccacctgggcctcgacctatcaggatgttttccgcacgctgaacgagttgggcagctttgcagccgtcaccgatggcatcatcttccacaacacgctggcgtccagcgattacggctacttgagccacacggcctttgacccgcgccccaactactttgccgccttgctgtggaaccgcatcatgggccgcactgtctatgacaccgccgagcctatccgcgagggcgcgcatgtctttgcacattcccgtgccgacggcaagcccggcactgcctaccttgtcatcaacaacagcaagaccgataccaccactgtcagcctgcccacagatgccgaggtctaccagctctccgctgaggccctgcgctctggcacgatgctctgcaactgcaaaccgctggttctgggtgaggacaactccctgcccgaaatcacccccatcaccgcccctgccggggaactgaccctgcctgctgccacctgcacctttattgtactgtaaatatcatagggcggtcaaacaggctgacccggcaaaggcagagaaagccgagcctaagaaagcaaagagcgcggcaaagaaaaagaggagcgatttagagctttaaccgctgtatctctttaccgcttcttatatcgttttatagccccgcgtgggatttgggcaccatttgggcaccatttagcgaaaaagcaccactaacacaggcgataaaagaaacgccgagaacccgcaaaaacatagagtttatgcgggtttccggcgttttctaatccctcaaccgacctaaaatcatcttgcggcagagagaaaaattctactattttttatagtatcacaaactcacgccatgtaaatcggttgctgcgaaatttcatgaaatatttacggttcgtgctgtctgcagattccgtagtctctctttcaggtactgctttcctccaagccgcgataggtcttgacaatgagataagccgcaatcaggaaggtcagaatatccgacaacggcatcgaatacaaaacgccatccagcccaaagaaatgcggcagcagcagcgcaaacccaacgccgaacaccacctcgcgcaccatcgaaagggctgtagattcccccgctttgcccattgcctgcaggaagataaagcaggccttgtttacacaggccagaatgatcatgcagaggtaaatacggaacgagcgcaccgcgaaatcggtataatacacgctctcattggcagcgccgaacagggcgatgagctgatgcgggaaaatctccaccagcaccaatgccacagcgccaacaccagcctcggcagccagcagcttcgtgaacagctctttcacgcgggcagacttccttgcgcccatgttgaagccaacaatgggaatgcagcctgccgccatgccgaccacgatggagatgacgatttgaaagaacttcatcacaatacccaccacggccatggggatctgcgcatactgctcctgcccgaatactgcgtccagcgcaccgtatttacgaatcatattgttgatcgccgccatagctgcaaccaagctgatctgtgagagaaagcttgtgatacccaatatcagcatccgtttgcagacctttccgcgcaaagcaaagtcccccgcagccggcttaatgatcctcatgtgcagcagataccacacggcgaggattgccgtggccacctgaccgatgacagtggcaacggctgctcccatcatgccccaccgaagtccaaaaataaaaatcgggtccagaatgatattgagcactgccccggcaagggtagagatcatggcaaaccgagggctgccatccgcacggatgatgggattcatagcctgaccgaacatgtaaaacggcacgcccaatgtgatgtagaagaagtattcctgtgagtgacgataggtttcggcattgactgtaccgccgaacatagcaaggatcgtgtctgcaaagagcagatagaccgcagtcagcacaatactgctgaccagacacaccaccacagcgttgccaacactctgctttgccttgcggacctcatcctgcccaaggctgatgctgacaaatgcacagcagccatcaccgatcatgaccgcaatggccagcgcgaccaccgtcagtggaaaaacaaccgtgttggcggcattgccgtaggagccaagataggacgcatttgcaataaaaatctgatctacgatattgtacaacgcgccgaccagcagcgaaataatgcacgggatcgcatattttcgcatcagccttccgatgcgctccgtgccaaggaattgattagagccttccatgggattcaccttacctttaaatttttggacaaacaaaacaacgagcagccccatgcaaccggttttacgcatgagtgctactcgttgtaccaaattattatagcagttcgccagaaagttttcaaaggcagttttgcataagaattatgctgcattccgcaggggatactgcgcagtttgtacatgtgcgccttgcacaggacgccttttgtgcttgaagcaatgcccccc

SEQ ID NO: 14070 - DNA, 1302 bp, Unknown
  gut microbiota DNA sequence
tgtggcaaaagggctgacagaacggggatatatcgtgcaggacacacctccggccatcggcaaggactataacgactatctgctggcggctcgtagacttatcagcatggaacggtaaaggagcggaatatgaaaactattgcagttgcaaaccaaaaaggcggcgtgggtaaaacgaccaccaccgtaaatcttggcacagcacttgcggctatgggctacaaggtgctgttggtggacgccgacccgcagggtgatttgagcagctatctcggctatgcgggcaccgaaaacggcgcaacaatcagcgacctaatggaatctgttatcaaggacgaaaagccgccagaagtggtaattcaccatgaagaaaaggtagatttcattccctccgacattggtctgtctgatatggaagtgagccttgtaaatgttatggcgcacgaaaaaatcatggaacaggcattggagccgtttaaggataaatatgactactgcttgatcgactgtatgccatcgctgggcatcatcaccgtggcatcgcttgttgcggctgacagggtgttgattcctgtgcaggcacagcatttcgccctcaaaggtctggtgtccctgttcaaatccgtcaaccaagtaaagcgccgtatcaatccccggttggatattgacggcattgtgctgacgatggtggacaagcgcaccaacctatccaaagatgtgtgtgctgccctgcgcagtgcctacggtcacgcgctgaaaatttaccgtgcagaaatcccggtcagtacgcgcacagcagaaagcgctgccagtacacatagcgtgctgacctacgatgccaacgggccagccagtatggcatataaagcgcttgccaaggaggtgacggaaaatgagagagtacggcagcaacatcaatctgccctcactcgataatctgttttcgagcgagcaggagcggcaggacgcaaaattagagaaaatccaaattttgccgctgacgaaactgcatccctttcgaaatcacccttttcaagtccgtgacgatgacgagatggacaaaatggtggacagtataaaagaatatggcgttatgacccctgccattgtccgccctcggaaagatggtgggtatgaaattgtagcgggccaccgccgctgtcatgccagccagtgggcgggcgtggaaactatgccctgcattgtacgggatatggacgacgatactgctattattctgatggtggacagtaactgccaacgagagcatattttgccgagcgaaaaggcgaaagcctatga

SEQ ID NO: 14071 - DNA, 2686 bp, Unknown
  gut microbiota DNA sequence
gaagccgctctgaccgaatggcttctacaacacaaaaaaggcagagctttcgctctgccttaaaatgctataaaatatcagcctttgaccgcgatattgaccagcttgcccttgacatagatttccttggcaatggtcttgccggcgatggcctcggccacggcgggctcggccttggcggcggcgatggcgtccgcgttctcgatggcggcgggcaccttgatgcgggccttgaccttgccgttgacctgcacggcgatctcgatcgtctgctcgacgcacttggcctcatcgtaggcaggccacgggtagtaggccagctgctcggtgtggcccagctgctgccacagctcctcggtcatgtggggggcaaacgggttcagcagctgcagcagcagctcatactcggccttagtcgcacccccctgatcgctcagcgcgttgacatagatcatcagctgggcaatggccgtgttggccttgagggcgtcaatatcctcgccgaccttcttgatggtgcggttggcaacggcttccaattcagggcgcacgccctcaccggggacgagcttctcgctcatcgaccagatcttatcgaggaagcgcttgcagcccttgatggaggaggtgttccacggggcggccttctcaaagtcgccgatgaacatctcatacaggcgcagggtgtcggcgccgtactcggccacgacatcgtccgggttgacgacattgcccagcgacttcgacatcttgacgatgggatgctcggccatctcgccgtacttctcgacaagggccttgcgggcgcccttctcatcgccgtactcggccagcaggcgcttgcgctcggcatcgggctggttctcaaacgcatgggggttcaggcccagaatcatgccgtgggaggtacgcttctggtacggctccttggtgggcactacgccgaggtcatacaggaatttatgccagaagcggctgtacagcaggtgcagggtggtatgctccatgccgccgttgtaccagtccacagggctccaatactcgagcgcctccttgctggccagcgcctccttgttgtgggggtcgcagtagcgcaggaaataccagctcgagcctgcccactggggcatggtgtcagtctcgcgcttggcgggggcaccgcagcaggggcaggtcgtgctgacccactcggtgtggcgggccagcgggctttcgccgttctcgcccggctcaaagtccttgatctcgggcaggcgcaggggcagctcgctctcgggcaggggcacccagccgcacttgtcgcagtacaccatggggataggctcgccccagtagcgctgacggctgaacacccagtcgcgcagcttgaagttcacctgcttgtggcccttgccgttctcctccagccatgcgtacatcttattcttggcgtcctcgacagacaggccgttcaggaaatcagagttgaccagcgtgccggtggccacatcggtgaatgcctccttgtcaaggtcactgggggtattgcccttgacgacctcgatgatgggcaggccgaacttcttggcaaactcccagtcgcgggtgtcgtgggcaggcacggccatgatggcgccggtgccgtaggttgccagaacatagtcggagatgaagatggggatttccttgccgttggcagggttaatgcccttgacgccctcaatgacgacgccggtcttgttcttattcagctcggtgcgctcgaagtcggacttgcgggcggcctcctcctgataggcggcaacggcgtcggcgttcttgatgagacccgcatcaacccacttcttgatgaaagcatgctcagggctgatgaccatgtaggtcgcgccgaacagcgtatccgcgcgggtggtgtagacggtcagggtatcaccggcggtggtggcaaagttgatctcggcaccgtggctgcggccgatccagttgcgctgctgggtcttgacgcggtcgatgtagtccacctcgtccagatcgtcgatcaggcggtcggcgtaggcggtgattttcagcatccactggctcttgttcttctgcacaacggggctgccgcagcgctcgcagacgccgttgacgacctcctcgttggccagaacgaccttgcagccggtgcagtagttgacggtagtctctttcttgtaggccagaccctttttgaacagctggatgaagatccactgggtccacttgtaatactcggggtcggtggtgttgatctcacggtcccagtcgaaggagaggcccagcgcctgcagctggctcttgaagcgggccacattctgggcggtgacgatctcggggttgatgtggttcttcagggcgtagttctcggtcggcaggccgaaggcgtcccagcccatggggtacaggacattgcagccgcactgacgctttttgcgcgcaacgatgtccagcgcagtgtagctgcgcggatgaccgacatgcagaccggccgcagacgggtacgggaactcgaccagtgcatagaatttaggcttggaatggtcgatctccgcatggaaggtcttttcgtccgcccaaaccttctgccatttggcctcaacggttttaaagtcgtatttcataaatttctccccacagataaatttttgatgggtcgtaaccttcttaaagccttcccccgaggggc

SEQ ID NO: 14072 - DNA, 3174 bp, Unknown
  gut microbiota DNA sequence
gcagtaaccttatcctgatttgccttgtcaatgtagccagtcagagccggaaccagcagggcggccaggatagccagaatgaccagaacaacgatcagctcgacgagagtgaagccttttttgtccttcagtttcttaaacattttgtttcctccaaaattttctttgatgtatgccgacttcacgaaccccatcgacatttcatattgtcattttataacacaatttgtgttttgtcaactccatttaggtcaatacaacacgatttgtgttattttggtatgctcattcatagagttcgcgcaatgtggggtgttttctatggaattcaatgagtgtttacgctatctgatagattgcgaagaaatcaaaatcaaggatttggcgcccaaactgctgcttgcgccgtccaccttaggcaactatgtacagggcactcgcgagccggactatgataccctgcggcgcattgcggattattttggggtcagcatcgactatctgcttggccacaagacccctgccgaggacgatgagcgccagcttttggcccgctaccgcagctttacccccagccagaagcgccttctgctggatcaggccgaactgataacccgttacaaggtaaaaataaacgattgacccgccgggagtcggcgggtcagtttttttatagcccgccccctgcggggcgtcggggacgccgccccctacaattatccgcgccgcgcgacacccgccgcaccgtaggggcgcattccatatgcgccctcagaccgtcgaaaaaccaccttacccccggataagaatatcgtctttgttgcggattcgtaggggcggggctctgctccgcccgccgacctgacgtagcaacgctttttcgggaaagtttctcacatggcaaacggccacgggcggagcagagccccgcccctaccgcgttttttgacaaactgggggcgcattccatatgcgccctacagctaatgtaggggcgagcattgctcgcccgtgcccgtttatctgtgaaaaaacctttcccggaaaacgcattgctgcgccaagtcggcgggcgaccaatggtcgcccctacactttcaataggccaatgggtgcccccgcatgaaaatacattttttcaaaaataatctagccaacgcacgcataatatgttatgatagtaagctgaagacttgtagtgtgccccacggggccgcgcaattttacaaagggagtctttttgatgaaaactactgccaagctgcgcgtggcgctcttcttcggcggcgtatccagtgagcatgaggtcagctgtgtttcggcctcggcctggctgcgcgcgctggggcagtccccctgtgcagagcaatatgaagcatttcctgtcggcatcaccaaggacggccgctggctggcctgccaccccacgcccgaggccatggccgacggcagctgggagcagggcgactgcacgccctgcgtgctcagccccgaccgccgggaccacggcctttggctgctgaaggacggcaaagccgagcttgtccgcatcgacatctgcgcccccgtcatgcacggcaaaaacggcgaggacggcaccattcagggcctgtttgagctggcgcgcatcccctatgtgggctgcggcgtgctgggcagcgcggtctgcatggataaggccgtggccaacgccctgatggacgccgccggtgtcccccactgccgctgggccgccgccagccgcgccgaccttgcgctgaacggccccgtggtgctggacgccgtggaggcaaagctgggctaccccatctttgtcaagccggccaacgccggctccagcgtgggcatctccaaggcggctgaccgcgccatgctggagcaggcggttgagattgccctgcgcgaggacgacaaggtcgtttttgaggagttcgtggacgcgcaggaggtcgagtgtgcggccatcggcaaccccgatgacccgtccaccgttgccaccacccgcccgggtgagattctggccggggcggagttctacacctacgatgacaagtacaaaaacggcgtgtcccagaccgtcatccccgcgcatctgagcgaggaaaagctcgacgaggtgaaggccgaggcccgcaaggcctatctggcgctgaactgcgcgggtctgtcccgctgcgacttctttgtggagcgcggcaccgggcgcgttttgtgcaacgagctgaacaccctgcccggctttacgcccatcagtatgtatccgaagctgatggagcatgagggctacagctatccggcgctggtcgataagctgctgcagctggccctgcaccgccggaagggggcctactgatggacacacggcccatcggcgtatttgacagcggccttggcgggctgaccgccgtgcgccagctgcgccgcgtgctgcccggtgaggatatcgtctatttcggcgataccggccgcgtgccttacggcagccgcgggcgggacatcattgtgcagtatgcacggcaggatatacgctttctgctcagccgggatgtcaagttcatcatcgccgcctgcgggaccgtgtcctcgacctatccgccggaggaggccgcccggctgccggtgccctacaccggcgtggtgggtgccaccgcccgcgccgccgtggacgcgacccgcaaccaccgcatcggcatcatcggcacggccgccacggtgcgcagcggctcctacgcggcggtcatccgcgatatgctgcccgatgtgcagatttttgcgcgcgcctgcccgatgtttgtgccgctggtcgagaacggctatttcaatgacggcaaccccgtgacaaagctcatcattgccgagtatctgcaggagctgaaggacgccggtgttgacacgctgatccttggctgcacccactacccgttgctgaaaaagatgatcggcgattttatgggcgatgcggtgcggctggtggattccggcaaggtgaccgcacaggccaccgccgccgcgttggcggatctggggcttttgaacggcaaaacagacggcggcaccgcccactactatgtcagcgacacgcccgacaactttgccgagctggaacagatgttcttaggcgagtacgccggcgggccggtagaaagaatctcgattgagacatactaagcagag

SEQ ID NO: 14073 - DNA, 10480 bp, Unknown
  gut microbiota DNA sequence
ctccccgctgcgcgaggaggctttctgcggacggctccgccgcgctgcctataagatgtcaaccaccctcaaaacatccccgtccaccgtaaatttcaccttattgctgccgaaatccagcgcatacacccgcgcggggtcgtgctggtaggcggggcgcgggtcgtttttcagcacacccaacaaggcggggcgcttttcttcgggcaccttgcacaataacgcatcggggcatatcacctgcagggcgtactctctggtcatatccgtgaacccgccgcgcgcatcggggtaggcatccacatagggcaggtagggcttgatgtcaaagatcggcgtgccgtccaaaaggtcggcgccgcggacgatcagatccccgttttccacaccggccagctccacgcaggacaggccgagcgcattcggccggtaggggctgcgggtggcaaagacgccgcgccgctcgttgccgcccagacgcggcgggcggacggtgggccgccagtttttgtcggcggcgtactccgccgccacggtcgagaactgccagatgagccagagccggtcatacccctcgatgccggtcagggcgttgggatcgcggtattccggcgcaaagacgatgcgggcggtcagctccggcacaaggccgctctgccgcgggatgccgaatttatccgtaaaatcactgcgtatatacgcaatggggtgaattgtgtaatccatagtaacatttgccccctttttgcgtttattatataggaaagagagaaaaaagggaagtagccaaagcagcccttgtcaaagggaggcttttcgcggcgaattttacaattttcccatcttttttctttcttcgccgtatggtataatacaggatataccgatcaaaaagggggtatggtattggcgcccattatccatacagaaaagctgcgcaaggtttacgccgtcggcaaggagcgtgtcatcgcgctgaacaatgttgacctgtccatagaaaagggggaattctgctgtattgtcggccagtccggcagcggcaaatccaccctgctgaaccagctggccggactggaaaagccgacctctggcaaggtgttcatcggcaggcatgagatcagcgccatgaccgagaacgagctggccgcgttccgccagcagcatctggggttcatcttccaaagctacaatctgctgcccaccatgacggcggctgaaaatgtggccctgccgctcatgttcaagggcgtggacaaaaagacacggctggcccgcgcccgcaaggagctgaaggccatgggccttttgggccgcgccaaccacctgcctaccgagatgagcggcggccagcagcagcgtgtcggcattgcccgcgcgttcgtcagcagccccaaggtcatttttgccgatgagccgaccggcaaccttgactcccgcaccagcaagcaggtgctgtaccggatgctggagctgtccaaaaacaaccatgttaccttcgtcatggtcacacatgagccggagctggccgaatgtgccgaccgcatcgtgacgatattggacggcaaggtctgctccaatgtgctgcaggacgagcagacaaagaagaaaaaccgcgacgccctgtttgccgatctgaagggggacctttcgattggcggagatgcggcgaaggaacagtccgcaaataagccttcccccaagggggaaggtgcccgcagggcggatgaggggcagtgttcccgcagcacccccgcaaaagaggaataacggcaggcttgcccctcatcagtcaccttcggtgacagcttccccctcaggggaagcctttgggggacgcctatgctaaaaaatttggaggtaccacacttgaaacgactattcaccttacttaccgccctgatgctggcgacggcgctctgcgcaccggtgctggcggacgatgccgccgtgaccgacccgacgcccaccccgactgcctccatcgacacgagcaactcggacggcgtctatgtgtcggcctacactgtcaccaacgcagcaggcggggaggtcacgaacgttgaggtcggcgacaggatcaaccttgtgctgaaggtcgttgaccacgcctcggcccggtactgcgtcaagccggaggagatatctgcccgcatcaactcggccgtattcacctacaccggcaccggcgagatcggccagctgttcgacagcaacgacgaccccaatgccacccgcctgcagaatgtccgcaacggctctgccaccgcagaggagattgcccagaacgcgcagtacaactactacagctatgttctcctgttccgcgatgtcatctacaacggcggcggcaatactgtgccgatcaatctttcttatctggatacctcgaagccgctgcagcagttcagcgtgacgatcggccagtgcgtggacaaggaccagaccacctcgccgaatctgctcgtccgcacctccagctatggggacagcgtcattgccggctcgccgttcaccctctcgctcggcctttacgccacggacggcaatgagaatttgaacgatgtcatcgtttcgctgaccctgccggagaatatcctgctcaacagcggcagcctttccaactatgtcggcaccatcgccgccaagcagacccgcgatgtcacctttgaggtcatgccctcggccgggtttaccggcacggtggccaacatcaccgtcaacatgaccggcaccggctcgatcaccggcaaggaggtcagcggcacaacgacgatctcggtccccgtcagccagcccaaccggtttgaggtcggccagctggagctgtccagcgatacgatctatgtcggcgataccggcagcgtctccctttcttacgtcaacaagggcaaaaaccccgtcagcaaccttgaggcacgcctgaccggcaccaatctgggcgcgggcagctaccagtacctcggcaacctgaacgccggtaccgagggcagcgtggattttgacatcacccccgatgctgcgggcgcggtcagcggcatcatcacgctgagctatgaggatgcctccggcaacccgcagaccatctccaaggacttttccgtcagcgccgaggagatgaacatggacgacttctatgacccctcgatggacgatgtgcagcccgagcagaccggtatgccggtctgggcatgggtgctgatcggcgtctgcggcgcggtagtcgttgtggtgattatcgtggttgtggtccgcaagcgcaagaaggccaaggcgctggccgcactggaagcagaggacagcgatgaagatctctgatgaaatcagcctgtcggcgcgcaacctgctgcgccgcaagggccgcacggcacttacgctggtgggtgttgtcatcggcacctgcatggtcgtgctgatgatctcgctgggcattgcccagaccaaaacgaatgaggaaatgctgcagagctggggcgacctgacccagatccagatctacggctacggtatgatgcagggcagcgacggcaagccgctgtatctggacgatgccgcgatcgccaacatcaagcagcttccccatgtggcggcggcaacgccctacgcacaggggtacaatctggagggcaccatcacggcgggccgcaacgaccgctacacgatggatatttccaatctgatcggcatcgaccccaccgcgctggagccgatgggctttaccctgcagagcggcagctggccgaccaacacccccgccagcgaaaaatcgaacaagctgcaggtgctggtgggcgcgtccgcgggatataactttgaggactcccgcaagagctacaacagccccaagcgctaccgctggcagggccagaccgatgcctccggcaaggagctgccgccctttgtggacatcgacaaggacaagatgaccctgaccatcaagaccggcgaaggctcgaccgaaaaaagccgcagctggcagctggagatcgtgggcgtgctgacgcctgacggcgccaagggctactggacccagtccggcgttgtgctgcgcatacaggatatgcagatgctgcaaaaggtctactgcgacctgaccaaaaccaagcttgaggaaaaaagctacgagcaggtctatgtcaaggtcgatgatctctcctatgtgacggatgtggaaaacgccatccacgagctggggttcagcaacacctactcgatgaaccagcagcgcgaggagatgcagaagcaggtcatgaagagccagatgatctttggcggcattgcggcggtctcgctgctggtggcggccatcaacatcatcaacaccatgacaatggccatctatgagcgcacccgcgagatcggcgtcatgaaggtgctgggctgcgagctgggcaacatccgcacgatgttcctgctcgaaagctcgaccatcggcttcatcggcgggctgatcgggctgatcatcagcctgattgccagctttgtgctgaaccatctgtcggtgctggggcaggggtttgacatgtccggcataatgggcggcggctactacatgggcggcgatggcagcgccgcaatttcgatcattccgccgtggctgatgctggcggcgcttgtattcgccacgctggtcggccttgtggccggtatcctgcccgcaaacaaggcagtcaaaatcagcgccctcgaagcgatccggcacgattaaaaaaactgtctataaaaacagcggcccgcccggcaggggtggaccgctgttttttgtgcggaattgtttttgttccgcttacacctgtgtttttaacaacatttcggacttttcaaccgtgtattttcacaactaaaggcagttttcaacattttccacaggaaaacccctgctgcgggaagttttccacggcggttgaaagtcattttatgcgtataatcgttattttatagttttcaacagttttcacgagttttccacagggaaaaccccgggaaatggtggaaaaccggttttccggtggaaaatgtgtattagtagtggagcgcccctgtatttacgcctagatattgtttgcagccgggcttttgcaccccctgtatagccggttgtagtctgtggaaaaataagagttttcaacacgcatgtggaaaacggtgtggaaagcggggaaagtgcctccggcctgcttcgcggccagctccccacttcgtggggcgcctttttgcgcgggctttgcccgcgtgaaagcctccccattctggggaggtggccgagcctgcgaggccggaggggccttgcacatccacctcgccccccaccaaaaaaagcagcccggctttacagtcaggctgcttttttcaacaattctgtttaaaactcgatcttgccaaaggcgaaatcatcaccgtcgtggatacgctcggtggttttgggtgccatcggctttgcatcggggtcacgcgggcggtcggcaaactcacggccgggcacgctggagcgggggccgccgtagcgcgggccgcggtcattgcggtcacggcggggtgcgccgtagcggggcccacggccgccctcacgcggggctctggggccgcgcgggccgcggttgtcgcggcgggggccacgctggccgtcacggcgggggccgcgctggttgcgggcattgtcgcggtcaggcaggttgcaggcgttggggtcggtggagtacagcaccacatggcgggccgggccttcgcccttgctctcgctgcgcacgccctccataccggcgatggcggtgtggatgatgtggcgctcgtaggggttcatcggctccatctcatagaagcagccggtgcggataacgcggtctgcaatgcgtctggcaagggcagagaggtcgtcctcgcgcttgttgcggtagccgccgacatccagccccagtttgacataggggccttccatgcggttcacaacgaggctggcgaggtaggacaacgactccatcgtctcaccgcggcggccgatgagcgcgcccatatgctcgccggagaccttcaggatcgtggcagcgcccttcttgacggcgctgaaggtgaagttttcaacacccatcagggtaaagatggggctcaggtagtcaaccgcagcctgcaggcgggggtccgcctcgatgtcgagggggagctcggtctcctcgtcagcctcggcaaccatctcgtccacgacctcctgctccagagcaggggcagtctcttcagagatctcaacgacctcggcaggctcagcggcttcggcgggctttacctcctccacgggggcagcctccggctcctcgacctttacaaggaccttggcagggatggtcttaaacagcttgcgggcggggaattccagtacctcgtagctgacatggatgtcatcgcggtcaacgcccagcgcctcgcaggcggcctctacggcggcctcaacggtcttggcgctcatttccatactgcgcataaaagggaacctccttcttatttcttatcgttacgttcatcacaaaggggagcggggcgggcgcatatagaatgcgcccctacggcggcaggggatacactccctcacagccgccaacggcgcgggcgagcaatgctcgcccctacggttgcgcggcgtctttttcttttactctttgttcagaggggtggtgcgctcgtccttgtaaagctcggcctcgcgctggcgggccagctccagacgcagcttgttggcctcgccgagggtgacctctttctggatcttttcgccgttctgctcaaccgtgacggtgcgctttttcttcttttcggcgcgcttggcggccagctcggcctcatactgggccttgaacttttcggggctgtagatcctgtaggtgacataagactggccgatctgcagcaggttggacacgccgtagtacagcgagaagccgaccggggcgttgaagcagaaggtaacgaacatcaggttcatgaccagcatcatgaccttcatgctgccctgcatctgggcgtccatgccggagagcttctgggtgacgaagtagctgatgaacatcgtgactgccgcgatggccgggaagatggcgatcggcacaaagcggaagccggggacatcgcacatatccatgccgaagaagccggtgttgaagttctggatctctgccacgatgttggcggggatgatggacgggtcgatcactgcgccgttgtggatggcctgaatcagcgcggtctgcatcgtggaggtgttggcggtggcaatgccgatcgcctcgcaggcggctttaacggcggcgttgtccacaccaaagatgtaatgcacggggtagtacacaacacccaagaagccgaacagcaccagcatcgtcagcagcatgggcaggcagccgcccatcgggttgaagccatgctcctgctggagcttcatcagctcctcctgctgcttctgggggtcgtttttgtatttctgctggatctcattcatcagcggctgaaaaacagccatctttgccgaggatttctgctgatggatgctcagggggaagagcagcagcttgaggagtagggtggcaacgaccagcgttaccgcgtagttgccgatgaagctgtacaggatcttcaccagcgggccaatcaatatggccaggaagtacataaagttcatagcctttccttctgccccgtctgcgcccgggaccattatttttatgtaggtctctgctgcgcagtgcaaagacatgagaagcaatgttaaaaagccttctcccttgggagaaggtggccgaaggccggatgaggggcgggtttgccatgattgcccataaacgggttattgagggaagtctgcccctcatcagtcagcgggcggagccgctgacagcttccccctcaggggaagcctaccctcgcgtcagcctgcgttccgggttgacccaccggcccttttccggcaccggatcatagccgaattttgcaaacggctggcagcggagaagccgccagacagtcagcagcaagcccttgagcagaccgtgcgtggcaagggcctgcatggcatactcgctgcaggtgggcacaaagcggcagtgatgccctaggtgcgggctgatataccgcttatacccttgcagcagcgcgatcagcgcccgggcgatcattgctgtgcggcgttttcagccggggcggtcaggtcgggcagaccggccttggcaaacagccggccgagcgttttgctcagctgggtgcttttcaggcggggggtctggccgcgcgccaccagaataatgtcatacccgccgatattctgggccagatgctccgacagggcggcgcgcatgatgcggcgggcgcggttgcgctgcaccgcatgcccgacctttttggtggcggtcagcccgatgcgggtatagctcagccggtttttggcaacatacagcacgcaatgcgggtgtacatagcttttgccccggccatatacccggttgaactgccagtttttatttaaagtgcggtaacgcataggtctccctcctaaaggcttccccctcaggggggaagctgccgcccgcaggcggctgatgaggggcgcgcctgcccctgccggccctgtaccgaacagctgcggggtacttctccctcatccgtccgcggtcggggccgcggacaccttccccaagggggaaggcattttattttttcctattcttctatattataatgaatcccgttttctgtaaagccattatttgaaaaaagggctgctgattttacaatcagcaacccttttgttcacataatctctgaaacaaatcagacagtcaggctcttgcggccctttgcacggcggcgggcgatgaccttgcggccgttcttggtagccatgcggttcaggaaaccgtggacgcggctgcgctgacgcttcttgggctggaaagtacgcttcatttttcattcctcctgttgaaatcccggtatgggctgtttgctcagggcttcgcccatacactggggcagccttgcagagttagattatacgcgataagcaccccttttgtcaagaggttttttgcagaatttttcgtctgcgcgtcaaacaatctttcgctacaaacagttatccactacattttgtactattcactgttgaaaaacacactttctgtggaaaactttccagaataccctttttgcgggaaaattttcaacatttccacgccgtaaaaaaattcctactttattataatataggtgttgttcaaaacttaattttgtggtatactgtaagcagtgtttttgcgcccttgcaaaaggcgttgatttataacaggaagtggggagtatcgagtttcatggattctatcaatgaggtaatggaagcggtcaaggcctactgcaaagaaaagacctccgacgctacctacgcattttacatcaaggacatcaaggctgtcagctttgaaaattccaagaccgtcacgctggagctgcgcagtgacttcgtgatgggcattgtttcggaccgctacacggcacttttgcaggatgcgttcaaggccattctgggctttgatgtagagatccgctatgtggtcgccccgccggaggacggcgtaaagcccggcgacagcgaaaaccagatggacgaaaaatccctgcccagcggccggtatgagttcacctttgagaatttcatcaagggcccgtccaaccagtttgcgtttgcggccgcgcaggctgttgcggcaaacccctccggcgcgtacaacccgctgttcatctacgggccgtccggtctgggcaagacccaccttttgaacgccatcaagatcgagatccagaaaaaccatccggatttcaacattgtctatgtggattgtgaaaaattcaccaacgagacgatcaccgcgatcaaaaccgccacgatggagcagttccgccagcggtaccgcaaggccgatgtgctgctgatcgatgatattcagtttctggccggcaaggagagcacgcaggaggagtttttccacaccttcaacacgctgcacaacgacggccgccagatcgtcattgcctccgaccgccccgccaaggagatcaaatcgctggaggagcgtctgcgcacccggtttgagtggggcctgaccgccgacatccagccgccggattttgagacccgcgtggccatcgtcaagcgcaaggccgagttgctgaaccttgacctgcccaacgatgtggccgagtacatcgccaaccatctgaagcagaacatccgccagctggagggcgccgtcaaaaagctgaacgcctactatatgctggagggcatcgagccctgcatcggcgtgacgaccaccgcgatcaaggatacgctgaacgacagccagccgatccccgtcacgattgaaaaaattctgaatgaggtagcccgcacctacaatgtgatgccctcggatattcgcggcaaaaaacgcaatgcgaatgtgag

SEQ ID NO: 14074 - DNA, 3187 bp, Unknown
  gut microbiota DNA sequence
ttatccgcgaggtgaccggcatgagcatggaggccatcggtcaggagttccagcgcgatcattccaccgttgtctattccatcaagacgatggaggaaaacatcaaccgcgaccagcacctcaaggagatgtgcagcgacatcatgaagaatgtccgcacctagcctactttcttgaaagaaagtaggcaaagaactttcaatgtggtgacccgtggatggaatgcgcagaaattaacgatataccagcaactattctacgggttataggattggagtttctttggttactttctttgcaaagaaagtaacttatccacaaggtttttagttttcaacagacggtattccacagcgcgtgttgaaaaacggcggtttccgggttttcaacaagaatctccacagactgttcaaaagtctgcgcggacgattttccgcatcgctatcgggcgcggcggagttttccacagaactaacagcccctactacgactactaccatagttaatagtttctgcgaacaggaacgctctgaaagagcatcttaccccggaaaatagcagtcccgatggtggaaaacccgaaacagagaaaacataaagaaaaaacagacgctttttgccccgctttgaacaagcgggcgggagaacagagtatgaaatttgaatgtgaaaagaccctgctggccaatgccatcgacggcgtttcccgcgcgatcaccaaccgcgcagccatccctgtgctggagggcatctacctgaaggccgagggctttaccctgacgctgaccggctatgatatggaaatgggcatcacgaccaccattgaatgcaacgtacttgtaccgggtgaaacggtacttgatgcgaagctgctcggttcgatggtcagccgtatgccggccggtgacatctgcatcgagctgactgatgaggggcaggccaagatcagcggcggcgtggctgagtttgagattcccgcgctgaacgccagcgattatcccagcctgccggtgaccggcgctgacaacacaatgaccgtgaaatgcggtatgctgcgcgagatgatcgaaaaaacgatctacgcagtcagtcaggacgacaaaaagcctgcccacaccggcgagttgttcgtcattgagccgggcagcctgacgatcgtggcgctggacggctaccgactggctatcatccagcgtgccgtcgagtgtacccgcgacatccgcattatcattccggccaagacgctgcaggagctgctcaaaatcatgggcggtgcggacgatgatgtcaagatcgacgcaaaccgccgctatgtcgtgttcacctccaacggttatacgatcatgagccgtttgatcgagggtgacttcctcaactatgagagcgtcatcccgaaggataaaaaaacgcgcgttgtcgtggattgcaagaccttcatcgacacgatcgagcgcgcctccctcattattaccgagcgtttgaagaacccgctgcgcatcaatttcggcgaggagcgggtgactgtgcgctgccagaccccgctgggcaaggtcgtggacgagttctcccccgtggagatgaccggcgatccggtagagatcggctttaacaaccggtatctgctcgatgcgctgcgctattccaagtgcgagcggatggtgctggaaatcaacggccccctgagcccggtcaagctgctgcccgaggacggcaaggactttatctatctggttttgccggtacgctttaagaacgagggctgagttgtaggggccgggcatgcccggccctgcagataaaaacagccgcccggttaaaggctgctgcagcaaggttgagggccggacatatccggcccctacggatgcaccgataagatagaaggatagtgtatggaaaaaattcgtattaacaccgactttattaagcttgacgctcttttgaagttcgcgggcctgtgtgagacgggcggcgaggccaaggagctgatccagggcggggccgtcaaggtcaacggcgaggtctgcacgatgcgcggcaaaaagtgccgcgccggtgatacggtcgagctggagggccagaccgtgcaggtcgcggcgggtgcgtaatgcgcctgacccaccttgcactgactgaccaccgcaaccttgcccatgccgtgctggaccctgacccgcacctgaccgtgctgtgcggccccaacgggcagggcaagacgaacctgctggaggcaatctggctgctgaccggcggcaaaagcttccgcggctccaaggatgccgagctgatccgccgcggctgtgacttttcggtcatagagggcgcgtttgagacacaggacatcgaaaaagagatacgcctgacggtgggcagtaagacgagccagcggcccggccgcaccggcaggctgaacggcgcggacatgggccgcgctgccgcgctggcggggaactttcaggccgttgtgtttgagccggacctgctggggctggtcaagggcggccccgagggacgccgccggtttctggattcggcgctgtgtcaggtatacaggccctaccttgtggcgctgcggcgctacatgcggctgacggcccagaagaacgcgctgctaaaaagctacgatattacgccaaacggcgcaatactgctggacacctacgaggagcagctggcggagtacggcgcgctgatcatgcagcaccgctgcaagtttctggaacaggctgccccgattgcggcgcagaattaccgcgatatatcccacggcgctgaggtgctggaggtgcgctaccagatgtgtaccgatgcccccaccgccgaggcgctggccgcaaagatgcacgcgatgcgcaccgcagagctgcgcgccggtttctgcctgacaggaccgcaccgggaggacttagaaatcctgctggacggccagcccgcccgggtgtttggcagtcaggggcagcagcgcagctgtgtgctggccctcaagctggccgaggccaccgtggtcggtgatctgttcggcgagcatccggtgcttttgctggacgatgtattgagcgaactggacgatgagcgccagacctatcttttgacccgcatgggggagcatcaaacgatcgtgaccacctgcgacactgccgcatttgcacgcaccaacgggaaaattgtgatggtcaagggcggaacc

SEQ ID NO: 14075 - DNA, 1890 bp, Unknown
  gut microbiota DNA sequence
cgccagcaccgcctcaatatcgcccgccccggtctcatcgtgggcgcagaggttgcgcttgttgtcggccccgaccggtgccagcgactcccagttttcctccgggtggacaaggacggggttgtccagcgccgtgtggtagtccagcacggcgggcaggacctcataccggaccttgataagcttcatcgccttatcgacgcatttttcatccttgccggccaaaatggcgacaacatcccccgcaaagcggacatggcggtcgatgacaagccggtcataggggcttggctcggggtaggtctggcccgcctgcgtgtagcggcggccctgctggtccacatccttccatgtgtagatcgcctcgatgcccggcaccagcagggcgcggctcgtgtcgatttcctgcacgatggcgttggcatggggggagcgcagcagcttgacgatcaggcagtcctgcgggatgacatcatccatgtagacgggctggccggtcacaagctgcatagcgtcctttttgcgcatgggctggttcacggttttcattgggcagcctccttcccctttttccacgctaaaaagttcaaaataccccgcagctggccctcatagccggagcagcggcagaggttgccggccagatactccttgatttcatcctcgccggggtcggggttttcccggaaaagcgccagcgcgttcataataaagcccgggttgcagaagccgcactgctccgcaccctgatcggcgatgaaagcaccgaactcggcagcctcctcctgcagcccctccagcgtggtgacgctgcggccgttgacccgcgccgccagcaccgagcaggacagcaccggcttttcatcgagaaagaccgtgcaaaggccgcagttggcggtctcgcagccgcgcttgacgctcttgcagccgaggctgcgcacaaggtccagcagcacggtgtcagccgcgatttcggcggtgacttttttatgatttaaggtaaatgtgatctgcatggtatacctccgtcaattttccagcgcggccacggcacgccggaccagcacgccggtcaggtgggtgcggtactcggcactgccgcgcaggttgctgccggtcttgacggctgcctgcacggcggcgggcatctgcgccgggtcgcagtccggcgtgacaagcacggccttcatcgggcgcgcgccgatggcaaagcggtactgcccctgcgccgtgcgggcggccgcacaggtcaggatcgggaaatcggtctgggtagcgcgcaccgactggtactgcaccttcagccccggcgtcttgcgcaggcagatgtgggtcagaatatcgcggtcatagggcatcgcggcaaactgcgccagcggcatccgacccgccctgtacagctcgacctcgcagtccagcgccaaaaacagcgtcagcacatcagaaaagccgaaccggccatagatgctgccgcccaccgtggcgcagttgcggaactgcacgccgacaatgtggcgcacagcctcccgcacagcccccgcggtgtaggcgttcagggcggcgttcgtttccagatcgcgcagcgttgccatcgcgccgatgaggatctcggtgtcagtctcctcgatcgtatccagccccaaggccgacaggtcgatggccgtgccgacattgatcttttccatcttgagccagagcataccgcccagcacgcggttgggctttttctggttcagctgccatgcctcctccagcgtggcggggcgggcatattcgcgtatcgtcatcatgggtcaatctccgttttttctgttttgggcgaaaaaatcacacttttcgtggataggtacttttattctaccataaaatctggtataataccgttgttgt

SEQ ID NO: 14076 - DNA, 12704 bp, Unknown
  gut microbiota DNA sequence
acccgacaatgggttgtaacggcaaggtccccccctcatcagtccgcttcgcggacagcttcccccgatgggggaagcctttcgttcaaaaacatcccacatatgccggaacggcaccatacccgggctgtatccggcgggaaaggaaccactatgtccgagatcattcgtgtagaaaatttgagctacatttacaatcagggtatgccggacgagaccaaagcgctggacgatgtttcgttcaccgtggaggagggcgacttcgtgggcattatcggctccacgggcagcggcaaatcgaccctgatcagccacttcaacggcctgaaccgcccgacctccggccgcgtgctggtggacggccgcgacctgtgggagcagggcgccgacctgcgcagcttccgctttcttgtcggccttgtcatgcagtaccctgagtaccagctctttgaggaaacctgtgcccgggacattgcctacggcccgcgcaacatgggtctggacgaggaggaggtgcagcgccgtgtccgcgaggctgccgcctttgtcggcctttcggacgagcttttgcagaaaagcccctttgaactgtccggcgggcagaagcgccgtgttgccatcgcaggcgtcatggcgatgcacccgcgtgtgctggtgctggacgagccggccgccggcctcgacccggagggccgcgacaccatcctgagccagatcaaggcctaccacgaaaagaccggcatcacggtcctgctggtcagccactcgatggaggatattgccaagtacgccaaccgcgtgctggtcatgcaccgcgccaagatcgccatgtacgacacggtggaaaaggtctttgcccacgcacagcagctgcttgagctggggctgtcggtgccgcaggtcacccagatctttttaaagctgcgccagatggggctggacatcccggtggatgtctacacgatcccctacgccgtcaagacgatccgcagggcgctggccgccaagcaggcaggggaggtacagtaaatgctcaaggatattacgatcggtcagcattttccgggtcattcggtgttgcaccgctgtgacccccggttaaagctggttgccaccatcgcctacatcgttgtgctgtttatcgcgccaaacccgctgggactggcgctctcaatcggccttttggcgctgctttaccgcattgcccgcatccccggcaggatgattttgaaaagcctgaagcccattgtgcccatcgtcctctttaccgccgtgctgaaccttttcttcgtcacagggcagggggagccgctggtgcatttctgggtgctgaacatctatgccgagggcatcaagtacgccgttctgctggctgtgcgcgtctgcgccctcattgcaggcaccagccttttgacctacacgaccagccccatcgtgctgaccgatgccatcgagagcctgctgcgcccgctggctaagctgcactttccggtgcatgagctggccatgatgatgacgattgccctgcggtttatcccgaccctgatcgaggagaccgaaaagatcatgaacgcccagaaggcccgcggcgccatgctggacagcggcaccttcacccagcgcatcaaggcgcttgtgccgatcctgatcccgctgttcatctcggcgttccgccgtgccgatgagctggccatggccatggagtgccgctgctaccacggcggcgagggccgcacgcggttaaaacagctgaagttcacgagtgaagatttccgctgcatggtggttattattgtggcgcttgtggtcatcgcctgcacgcggttctttgtgcctgggttggcataaaaattttgccgcgatccgcaggggcggattccatatccgcccgcccatcggctgccaccctgcgggcgcatatggaatgcgcccctacgatttcaggtgatttatgacctatttactttggatctcctacaagggtacaaactacgcaggctttcaggtgcagcccaacgcgccgacagtctgcgccgttctgcaggatgccatgcaggccgtgctgggccagcggcccgatgtaaagggctgctcccgcaccgatgcgggcgtccatgcgcggcgtttcgcgctcagcttctgctatactggcagggtaccgatgcaaaagcttgtcccggcgctcaacgcccatctgccgccggatatacgcgcggtagacatccagcctgtgccggacagctttcatgcgcggtacgccgcccacgccaagacctaccactactatctgctgaacacgcgggtggatgacccctttctgtttgacacctgccaccggatctggcctgcgctggatctggccgccatgcaggcggccgccgcacagtttgtaggtacacatgatttttcagcgctctgcgcctccggctccagcgctgccgcccatggggacacggtacgcaccattacggattgtactgttgtacaaagtggagatttatttacgatttccgtcacagccgatggttacctgtataatatggtgcgtattctggccggtacgctggttcaggccgggctgcacaagcgcacgcccgacagcatccccccactattggaaagccgcgaccgcaaacaggcagggccgaccctgcccgcaaagggcctgtttttggagaaggtggactatccggagttggatgccatttcgtagggggcggcgtccctgacaccccgcgggcgcatatggaatgcgcccctacgaattctgcatgtagggtcgggcatgccccgcccgcaattttcccgcagaatcgcgtctgccgtacagccgcgggtcgggcatgcccgacccctacggatgcgcacgaaaggagggaggcctacccatgaacaaatcggaaaaagaacgcctggcacggcggcagcggatgctggcgcgggagcaggggcaggcccccgaggcaggcatccgcggcaccagcggggacatcagcctgcgcacccccaaaccggtgcgccgcgctgcgccgccgccaaagaccgccgatcccgcagcaggggagggcggcgcgcggctcaaatccctgacgccgctctacaagcagcgccagcaccggcggcgggtctttttcggcgtgctcattgcggtgctggccgttgccatcaccgtgctgacaggcgccttgtcggcctccctcgctatgctgggggacactgtggacagcgcgatgctctatatcaaccgcacagacggcagctggcccgctgccacaggcatcagcgagccgctgcagatcgagcctcttgcgggcggctttgtcgaactgggggccgaggatgtggttgtctattcggcctacggtgccaagattctcagcctgcagccgtcctacgcacggccggtgctggccgtgggcggcacccattttgccgtgtacaaccgcgccgggaccgagctgacgatctgcagccgcacccgggcactctattcccagagctttgacgcgggcatcctgctctgtgccatgtccaacaacaattcccttgccgttgtcacggagtcgggccgctacgccgcgcaggtgcaggtctttgatccctcgctgcatttgctgtacagctgggagatgacccagtccgccggtacgccgatcgcactggatttctcccccgacagccgccggttcgccgccggtatgctcagcgcccgggaggggcagctgagctgctcggtctattttatgagcatggacgccgatgccgaaggccctgtctacaccgccgatcagggcagtatgctcctgcggcttgactggcagagtgagcggcgggtcatggcggtgttcgacacctaccttgccgtgctggaccccacgaccggagccgagaccgcccgctatgactacggcggggctgcgctgcaaagcgtggcccccggccgccgccagaccgccctgctgctgacggtgcgcggcggcaacaaccttgtcaccctgtcggagaccctgacccccatggccgagataccggcccggcaggcctttggcgtgtcggccacggataccgacatctacctgctctgccccgatgccgtggagtgctacggctatgacggtgtgcagaactgggtgtactgcgaccttgcctcccccccgctggcggttgtgaacgccgcaaagccgctgctgttcacgggcagccgggcagaggttctggagggcagctcgtagtatgggccgcgcggcgcctgccatattcccgggcagccggaagtctcctttgatttttttgagaaagaagtacctgtctatgtccttttcacctgcgcttatctatgattttctctttcttgccgtattctcatttgccgctgtcaaaagctggcagaagggcttcctcgccggtctgaccgagctggtcggcgcggtgctgggcatcggcgttgccgtctggggcagccgtacactggcccccgaggtctacacccgctttttcagcgattccgtgactgcccgtgtcaatgaggccgtggcccagtccggcggggacatcgccgctgccctgcagcagctggatttcctgcccgagtcgctgcgcaccgctgccgccaacgcgctgcagaccgccggagatcaactgcccgaaaagctcaccgccctgctggagccgctgttcctgccgcttgtgcaggtcgtgctttttgtgctgctctgcctgatcgtgcgctggatgttcgccctgctggtccggctgctgcgcggcgtcaatgcgctgccgctgctgggcggggccaaccgcctgcttgggctttgtctgggccttgtcaccggcgcgctggactgctggcttgtggcgctggccctctggtttgcggccggcatcacggcaggcaagctcgactggctgacccccgccgcgctgcagcagagcatcggctacagcttcttcggcgcgttcaacccgtttttagtccattattaaacattttttgaacaagccccgccaaaacttgcaatttggcagggtttgtttaataatagtaataaggtggtgcggggcgttgaggacgccgcccccctacaattttcagcaatccagcgtgcccatgtggcactttttatagaggtgaagtatatgctttgtgttaaatgccaaaaacgccccgccgttgtctttgtgcagcggcttgaaaacggcaagcccgttcaggagggctactgcctgacctgcgcccgcgccatgcacatccagcctgtggacgacctgatgaagcagttcggcatgtcggatcaggatctggaaaatatggaggagcggatgggcagcttcctgcaggaggctgccgactccggtatgcttgcccccatgatgggcagcgaggaggccgaaaccggcgatgacgccgccgcgcaggacgattttgtgccgggcggcagccctgtgttcccgttcggctttggtgcgcgccagagcaaggccgaggacggcaagcccaaaaacggcaaaaaagagcgtgccccccgccgcaaattcctcgagacctactgcgagaacctgacccagaaggcccgggacggcaagaccgatcgcatcatcggccgcgaccgcgagatttaccgcaccatccagatcctgtgccgccgtcagaagaacaacccctgtctgatcggcgaggccggtgtcggcaagaccgccatcgccgagggcattgcccagcgcatcgccgagggcaaggtccccgcgcggctgcaggacaaggagatctacctgctggatatgacctcccttgtggcaggcacccagttccgcggccagtttgagcagcgcgtcaagggccttatcagcgaggtcaaggccgccggaaacatcattctgtttattgacgagatccactccatcgtgggtgccggcgattcggacggctcgatgaatgccgccaacatcatgaagcccgcgctctcccgcgggcagatgcaggtcatcggcgcaaccacctttgccgagtaccgcaaatatatcgaaaaggattccgcgctcgagcgccgtttccagcccgtcaaggtcgaggaaccgtccctgctggatacgatcgaggtcatcaagggcatccgtatctattacgagaagcaccactgcgtccgtgtgccagacgccatcgtcaccagcatcgtcaagctgtcggagcgctatatcaccgaccgtttcctgcctgacaaggccatcgacctgctggacgaggcctgcgcctgctgcaacctgcgccaccccgaaatcaccgagctgctggagacacagcgcaaggtcacggagctggaatcccgcgagcatgagctggagaaccccgatccgcagaacggtcaggacgccgccatcgactacgaggcacttgccgccgtcaaaaccgatctggcgaagcagcgcgaaaagctgcctgctctgcagctgaaggccgccgagatcgaggtaacaatggacgatgtggcgcaggtcattgagctgtggaccggcgtgcccgccgtcaagatcaaggagaccgagtacggccgcctgcaggggctggaggatgccctcaaggcacacatcatcgggcaggacgaggccgtccacgccgtggccggtgccatcaagcgcgcccgcgccgacctgtccggccgccaccgccccgccagctttatctttgtcggcccgaccggtgtcggcaagaccgagctggtcaagcagctggcaaaccagctttttgacaccgtggacccgctcatctcgatcgacatgagcgaatatatggaaaaatatgcggtgtcccgtctgatcggctcgcctccgggctatgtcggctacgatgaggccgggcagctgaccgagaaggtgcgccgccacccctacagcgtcgtgctgtttgacgagatcgaaaaagcgcatcccgatgtcatgaacatcctgctgcaaattttggacgagggcaagatcaacgatgcacagggccgcacggtggacttttccaacacggtcatctgcatgacctccaacgccggctcgaccgaccagagcggcgcgacaggcttcggcaaaaaggccgaggtcgccagtgccgaccgcagcatgaaggcgctgcaggagttcctgcggcctgagtttatcggccgtgtggacgagatcatcaccttccgcccgctgagcgaggaggatcttgagcggattgccgcgctgatgctggatgagtacaagccggggcttgctgcccacggcatcacgctgcactacggccagcccgcattggcggacattgtggctgaaagctccaccaaatacggtgcgcgtgagctgcgccgcaccatccgcaaaaccatcgaggacccgatctccgatgcgctggtggacggccgcctgaacggcagcgaggtcacgcttgcgctgatcgaccgtgacggaaaagctgtactggatatataaggcattgccgcacaactcccgcgtatttccggaatgctgcggcagcgcctgaacggggtatgtcatgtataaaaagatcgcggcccttgtgctggccgcagcgctgctctgcagctgcacggcccatgtttcggtgcagcgcatccccgcggagctgccccgcgccgaggcaccctctgccacaccgacgccggagccgacgcccgcctttaccgaggagcagcagcgctacggcagcgctgcgctgctgaccgacccgaccgtgctggtcaatgtatttctcaacgatgctgcccatggctgtacttgggacgcggaggatcgcgccgacgccgtgcagcgcaccgcgatggccgtggactggatcaacgcgcaggcagccggctacggtgctgcgccgcagcttatctgcgaccgcagcgaggacggcagcgatgccgccctgacccgcagctacctgctgcagtcagccatccggggcggtgaaaactccgaggaaagcaccgactttcttgaggagatggacgccctgtgcgagtcactggctgcagacagccgtctggcgacctacggtgcgcggcagatcgcgtttttgttctacctgcccatcagcggtacctccttcacgatggcccactatgccgatgacggggcgtccttttactatgagtacagctgcctgtacaaaaccgacgcctacaccgatggcgagccggaatcccccgctacctttgcccacgagatcctgcacctcttcggcgcacccgatttttacgagggcagcagcgacccctatgtcgatgccgccctcaccgcctatgtcgaggaaacctacccggacgacatcatgctcagcacttacgaggcggacggcacaagccggttcgatgcaatcagcaagacgataagcccgctgaccgcctactgtctcggtctggcagagagctgccccgagctggaacagttcccggcgctgggcagggtggagccgggggtattccggcatgggactgcggacagcgaggaaccaacggcggatgcgtggccgggagcggtagcggtgtgataaatccttaccttcccccttggggctgcgcccgcaggcgcgtgtcggagcgcaaccgccgaaggcggctcttagcgcgtagactgaaaggtggccccgcagggccggatgaggggcgcgtgtaccgcagcagcccgtaaacgggcaatagcggcaaggccaccctcatcagtcagcggtcggagccgctgacagcttcccccaagggggaagccactcgtccaatgaaactgggaggagccccacatgctgaatgatgtttttccgctgcgggtggaggccgtccccgctgcgcgtgcctcggagtggcgcgccgatgactcctttccgccgcgccagacgcaggcatggcagctgatttatgtgcgcagcggcaccattgaggaacgctgcgatgaccgccgcgtgctgctgcgggcgggcggccttttgttccaccagcccggcgaggtgtttgccatgaccacggtgggggaggtcccgcccgaaacgctgcgcattgatttttactgtaccggcgcggcgatggatcggtttcgcggtacgatcctgcacgctgagccgaccgagcagcacgacctggactggctggccaataccgccaatacggtgtttgacgccgcccccgtgcggggcgagcctcccatcgtaaaggaggatctgcccttcggggtcatgcagcagttcatcatccatctcgaaaaccttctgatcctgctggcccgccgctgccgccgcaccaagcgtccggtggcccgtgtacggcgggagcgccgccagtatgtgctggttgaggatgcgcgcgcctactttgccgccaacctcacacgggagctgaaggtggacgaggtatgcgcagcactgggctgcacccgcacccagctgcagcaggctttccgcgcgcggctgcgccgcaccgcgatggaggaattttccgccatgcgcatcgagtatgcggcccagctgctggcgcgcggcgcctcccccggcgaggttgccgcccagatggggtactgctcgggcgcgtatttcagccagcgcttccgcgccgccacaggccacacgccgtccgcctaccgccgcatccagcaggggctgcccgctaggcggcaaaacaggcaacaaaaaggcaaaccggaatcaaaaacgcctattgcagaaagcccgcagaaagagtaaaatacaaagtaaagacagatgagccgctcatctgaaggcaacaaaatcataaatcacaaggagacgaatgttatggcaattctggtaagcggtggcgccggttacatcggcagccacacctgtgtggaacttctggccgctgggtacgacattgtcgtggccgataactactacaactcctgccccgaggctctggcccgcgtcaaacagattgcaggcagggacttccgctttgtcgaggccgacatgaccgacaagtccgccgttgagaagatcttcgccgagaacgaggacatcgactgcgtgatccagttcgccgcctacaaggccgtgggtgagagcgtttccaagcccatcgagtactactccaacaatctggcctgcacgctgaacattctggatgtcatgcgccgccacaactgccacaacatcatcttctcctcctctgccaccgtctacggtgaccccgccagcgtgcccatccgcgaggatttccccgtgggcggcaccacgaacccctacggcaccaccaaggtgttcaccgagcgcatcctgaccgactgctgcaaggctgaccccgagctgaatgttgcgctgctgcgctacttcaatcccatcggtgcccatccgtccggcctgattggcgaggaccccaacggcatccccaacaaccttgtgccctacatcgccaaggtcgctgtcggcaagctggaaaaggtccatgtctttggcaatgactatccgacccccgatggcaccggcgtgcgcgactacatccatgtcgtggatctggcccgcggccatgtggcggctgtcaagaagctggcggagaagcccggcctcttcatctgcaacctgggcaccggccacggctacagcgtgctggatgtcatccatgcgttcagcaaggcctgcggcaaggagataccctatgtcatcgacccgcgccgccccggcgacattgccgagtgctggtgcgacccctccaaggccaagcgcgagctgggctgggaggcgcagtacggcatcgaggagatgtgcgcccacagctggaactggcagagccacaacccggatggatataagaccgcgaaataaagcggtatacacaggaatgcccgatacggtgatacgccgtatcgggcatttgttttgtatgccttccccctagggggggaggtggccgaggccggatgaggggcgggtctgtcacaactgcccgtaaacgggttgcaatggcaaggccgcccctcatcagtcagcgggcgggaccgctgacagcttcccccgaggggggggaagcctctcttttacacatacatttcctgacttctcggcggcagcttggggaccgcgggcagcggggcggctgcggcgcgccacgcagcaggggagaggcccacctcccgcttgaacacccggcacaggtagtttgcccccgaaaagccggtcagccccgcaatcatctccagattgtactcatcggtcagcagcagcgacttgacggcctcgatgcggacattcgtcatgtatttgcccggcggcacaccgacctcctgcttgaacacccgcacaagatggcttttggtcacgcccagctgctcgctcagctcctcgaccccataaagagccatgtagttctgccggatggctgccacagcctcggccaccagcggcggcagggggcgcgccgtttcgtcggccctgtctatggcgcagagcagtgcataggccattgcgggcgtgcggacgccgtgcagctgggccagcagctcggccgcgccgggacaggccgcaccgtccgcccagcgcggcgcacccagctgcagcaggtacgcatcggtgcagcggcctgccagccgcacccccagcaggtggcagtccgtttggggcgtcagcgtcaggggggcaggccccagcaggatatcgccgctctgccccgggcggtcaaacccgtccagaaggcagaccccgcgcgacagcacccccacccacaggccggagccggtcagggtaagcggctccgtgccgtccagttcagcagcttcggcagcgctgcaatatatttccgggtcgaatatcaatttcagcacctctatatcaataaaatgctattttcaaaccgattataacctgttattatagtgttgtcaagagaaacagcccgctctacccgggctgaaacccactgaatatattttggaggatgagcattatggcttccattagctgccgtcacgtcaagaaagtttatcccggcaatgtcgttgctgttcccgatttcagccttgagatcgccgacaaggaatttatcgttttcgtcggtccttccggctgcggcaagtccaccaccctgcgtatgatcgctggtctggaggagatctccggcggtgagatgtacatcggcgaccgcctgatcaatgatgttcccccgaaggaccgcgacattgcgatggttttccagaactacgctctgtacccgcacatgaccgtctacaagaacatggctttcggtctggagctgcgcaagatgcccaaggacgagatcgacaagcgcgtccgcgaggctgccaagattctggagatcgagcacctgctcgaccgtaagccgaaggctctgtccggtggtcagcgtcagcgtgttgcgctgggccgcgccatggttcgtaacccggccgtcttcctgctcgacgagcctctgtccaacttggacgctaagctgcgtaccagcatgcgcaccgagatcatcaagctgcacaagaagctggctaccaccttcatctatgttacccatgaccagaccgaggccatgaccatgggcgaccgcatcgtcgtcatgaaggacggcctgatccagcaggtcgacaccccgcagaacctgtacgattatccctgcaacatcttcgtcgcaggcttcatcggcagcccccagatgaacttccttgatggcgtcctgaagaaggaaggcgatcagttcaccgttgatctggccggtgccaacattccc

SEQ ID NO: 14077 - DNA, 12489 bp, Unknown
  gut microbiota DNA sequence
aaggtcggcatccgtcccgaggacatcaaggacgacgaggagttccttgagaagcactccaccagccacctgaacgccgaggtcgaagtctccgagctgatgggcgctgagatctacctgtacctgacctatcagggccagaacctgatggctcgtgttgctcccacctccaagtcccgccgtggtgacaagatcgtggttgctatggacacccataagatccatctgttcgatcccgagagcgagaagaccctgctcaactaattcacacgcattatacagcggttccgttgcggcggaaccgcttttttgctaatggaggaaatggccatgcgcatcgccaattatctgcgaccggagtgtgtcgcactgcaccagcgggcagactcgctggagggtgcggtccagcagctggttgccctgcttgacggcaccgaggatctgacggataccgccgcatttgctgcggatgtccgcgcccggctggcgctgggcggtgtctgcgtgggcaacggccttgccatcccccatgccaaaagcgcctcggtcaagcggctgcagctggcggccctgacgctggacccgccgctggcctgcgacacaccggacggcaagccgctgcagatgctggtgatgatcgccgccccggccgaggccaatgacctgcatgtgcaggtgctggccgaattggccaccctgtttctcgatacggatttctgcacccacctgcgcgagagtacgaccccggaggccttttgccgtgccgtggccgagcgcgaggcgcaggatgaccctgcagcaccgccgccccagaccaccgatgaaccgggctaccgcctgctgggtgtgaccgcctgccccaccggcattgcccacacctatctggccgccgaggctctgcagcgggccgcccagacccgcggcttctcgatcaaggtcgagacgaacggcgcggacggggtaggggatgcgctgaccgaggaggatatccgtgccgccgactgcatcatcgtagcggcggaccgggccgtgtcgatggcacggttcgtgggcaaacggctcgtctacgcctcggccggggacgccgtgcgggacacggatgctcttttggaaaaggccgtctccggcaaggcgcccgtctaccacggcggacacgccttccggaccagtgatctgcgggagctgggccgcgaaggctacggccacctgatgaacggcgtttctcacatgatccccgttgtggtggcgggcggcgtcatcaccgcgctgtcgctgctgtcgcagcagctcggcctgcctgccagctggacgatgatgatgaaaaatgtcggctctgcggcctttgtcatgatgtaccccgtgctggctgccttcatcgcgtccagcatcggggatcgccccgcctttatgcccggcctgctgggcggttatctggcacagatgggcacgaccacgctcaccaacctcagttggatctcaagcggcttctggggggcactgatcggcggctttgccgccggtttgatcgtgctgctgctgaaccgtctgctcgaccggataccgcaggagctgagccacataaagaccgggctgctcgtccccgcatgcagtcttttgttcatcggctggctgatgcttatgatcgtcaatccgccgctgggccgcttcaaccggtggatgtcgctctgcctgtccaagatgcagggcggcagccgcctgctgctgggcgcgcttctgggcggcatgatggccaccgactacggcggaccgatcaataaagccgcctatgtcagcggtacactggcactggtcgacctgcagtatgatcttatggctgccgtcatggcgggcggcatggtcccgccgctggggctggcgctggcctgtatgctgttcccgacaagattcacagcctcggatcgccgcagcgtgccccagactgcgatcatgggactttccttcgtgacggagggtgctctgcccttcgccctgcgcgacccgctgcgtgtcggcccctcctgtattgccggaagtgcgctggcaggctttttggccatcttcctcggctgcggctgccccgccccccatggcggattgtttctgctgcccgtaatgggaaacccgctcggctttctggccgcactgctcggcggcagcctgctgacggcactgctgctcggcctgctgaaaaagccgctcaaacaataataatgtattcgacaaaagccctgttgtgcgttgcgcatggcggggctttatgctatacttggatatatatgtgattttttacgagcgaggaggaccctgcccttatggaacaggtcagaactttctgccggcgctaccgccgcttgcttttggcggcagcctatcttttgatttttgccgtgggtgtgctgtatctgcgcgttacgatcagcatcccgcccgagggcgatgacaagctgacgctgaacaaatggctgtttgatctgcaccgtatgccctacgcgcagtttcttctgcaggatctgcagggccgtctgcggtatttcaccctgcaggagccgcgctttttcccctttcactaccccaacgccgtggcgctgctgttctatggcagtctgagcagctaccggctgtatatcatcgcctttaccggtgcggcggcctttctggtcagccgcgtggtacggcggttcggcagcggtgatgcactggcactggccggctttacgctggcgctggcggcagcccccatctggaacgagggcatgtacagctactacgccgtgccgcagcgggcgttgttctgggccatggcggcatggctctgccttttcccgtgggaaacgacccgccaccgccgctgggctgtgctgggtgctgcgctgtcctttctggcctgcggcacctatgagatcggctatgtctttgccgcgctcgcactcatcgtctggtgcctgcgcagccgcagctttaaggccggtttctgccattccgcgcccgtgctgggcggtatgggcgctgcgctcgtctttcatgttttaagcggccgcaacggcggcagcggcaatccggtatcgctcgatctgcccgttgttctgcgggtgacggtacagcagatggctgcctccatcccggggctgaactcccgcctgctgcaggaggactgcggcgtgatttcaaacggcgaccgtctgtggccgctggtgctggggctggccgccgggctgctgctcttctttgccgttccgcgggacaagctgcgcgccaaaacgctcggcgctctggccgggctaggctttgcattctgggcactgccggccctgctgctggcgctttcttcccgctaccagcagcctgaggccatcacctggcagtggggctacattccggcggcggcatcctccatcgggtttgccctgctggcggccgcgctgctggcgctgctggccaacgcctgtatgcatctgccgcagttcgtctcgctcacagcccgtctggcactgactgccgcctttgccgcagccctctgcctgaacggcagctacctgcgcggcgtggtgcgaacccaccatgcggagaatctggccgcctaccagttttttgtccgctcgattgaggccggtctggccgatggcgtggcagaggatgatctgatcctctgcaatgagaatgtctgggacggcaacagcgacgccgagagcttattcttcagccgctttaccggccgcacccttcgtgcgcggttcatgaccgccggggacgagcagcccgcaggcagcacctacgcctaccagacctaccggaactacggcgggtacgaccttgcctggtgcggccgtctgcagagtgctgacagtgacctgatggacggtgtgcagatccttgtgcagggtgcgctggtgcccgacaatgcggtcatcaaatacaaggtccgcctacccgacggcaccgaggaggcccgttccatctgcctgctcgactgcacccgcaccgaccgcgatgctaacggcgactaccttgccaccgtggaggacacctccatcctgaacgccaagctcatgatctgggacggctgagaaacggggcaatgagttatgaagctttttcattttttaaagcgcaataagctgttcgctgtcctgctggcagccgaactggctgtgctctgtaccttgattgccggattgttcggcgcaccgtataagctgactctgacaccggatctgttcgagaaccgcttccccgatattgctgctgaggatgcggacggcctgaaggtctggaaccagatcgacttccgcagtgaggagcccatcactttttccagtcaggggcaggcgctgcgcgccggagcgtatgaagtcaccgtctcctatttttcctgccagactccggatgcccccaccttcaatctgctcaactctgccggcacgctggatttttccagcgaaatggtacccactgccgtttcctttgacacgctgcggctggacgactgccaccgcacgcagacctcccgtctctgggtcagcagtggcgctgcactgcaggatctgacggccaccctgacctatcgccaggggcagctttacctttatgccgtcacactgactgaacagcccatctaccggttgacccgcctgttttgctggctgttctgctttgcggcagccgatgccctgctctggctgctgtttgcccggacaggggagagaggcgctgcccaccgccgggcgctccgcctgccgctgtgtctgctgggcatcacggtcttagcctgtctgccgctgttcagcaattatctttatgtcggccacgatctggactaccatctgcagcgcatcaccgctatggcagccgagctttcctacggacagtttccggtacgcctgactaccaccaccctgaacggttacggctatgcaaaccctctttgctattgtgagctgtttctgcttctgcctgcactgctgtacaatctgtggctgccgctgcgcacctgctatcaaatatacatctttgcagtcacactcgccacctgcctgatcgcttatttcagctttggccgcattaccgagagccgccgtcttgggctgttgggggcaatgctctacacactgtcctgctatcggcttgtctgcgtctacacccgcgctgctgtgggcgagttcaccgccatggcgttcttcccgctggtgctgctcggcctgtacggcatctatacgaaggataagccccgctttgcggactggctgcctatgtcgctgggcatggccgccatggtgcaaagccatctgctctcctgcgagctgacggcactgctgctggccgtcttttgcctgctgcacctgcgggacaccctatcccccacacggctgctggcctggatcaaggcagcgctgctcgcagcagggctgagcgcatggtatcttgtaccgttttttatctctggtgcaagcatcccattcatggtcaacggatctttcatcggaaagatccagtcgcaggggctgtatataatgcagctgctcagcccgttcggcaccgggtttggcggcacaagcagcggcacaagcacggatatgacgctttccctcggccttccgctgattttgggccttgcactggtctgctattgcctgcttacccagcacagtgaaaaggaccgctatttcagcattctgtacacagcagccggcttttttgtctttacggttttcctgtcgctgcatatcttcccttgggattatgtgcaatcggcactgggacgcacggcaggcaagctggccgggatgttccagtatccgtggcgctttctttctctggccacggtactgctctgtctggcaacgctcattgccatccgtctgctggcggggcagcatcaggccctcggcagggctacagccgttgttctggcagcttctgccctgctgatgaccggcgtactgcaggcccagatactgactgagcagggcgaggttccccgcaatgtctattccgtggccgatccttccgtaacggttgccattggcgagtacctcatcgacggtaccagcgcctatgaaacgatctgggcgcagcccaagcccggcagcgatgcgctgcatcttgtccgctatgaaaagcagcgcggcgttgcctgcctgactgtacagaacgagggagccgaggctgccatctcgctgcccatctttaactacggcaactactatgccgccgatgaaaacggtcagcccttttccatcaccagcggcgagaatgaacgcattgtgctgacgattcccgctggctacaccggcacgatccgtgtctggtatcatgcgcccgattactggcgcagctttgaggcgatctccgccgccagtctgctggggcttatcggctatgccgtgcttgcccgccgcaagcgccgcgccgccgccaccgtttaaacgaggttttacctatgcccaatcgcatcaattatcagctggagatggaaaaggtcctgcgcacgctggatggcacgcggccgcgcctgctgctgcatgcctgctgcgcgccctgctcaagcgctacgcttgagcggctggctgcccatttcgacatcaccgtcctgtactacaaccccaacatctacccgccgcaggagtatcaccgccgcgaggccgagctggagcgctttgtcgagcaggcggggtatcactatcccgtcattgagctgccctacgacccgcaggagttttacaccgccgtcaaggggctggaaaatgagccggaaaagggcgcacgctgcaccgtttgttatcggctgcggcttgagcaggccgctcgctatgccgccgcgcacggctttgactggtactgcacaacgctctcgatttccccgatgaaggaccctgtgcggctcaacgacctcggcatggcgctggggcagcagtacggcgttgcctatctgccgagcgaattccgcaaaaaggacggctacaagcgaagcctgcagctgagcgccgaatacggcctttaccgtcaggattactgcggctgtgttttcagcaagcaggaacgggaagcgcaggcacacacattgtaagaggcatcaaccgccgcatgattgccggggcgatgcccggcatccccccactgacttacgcaggagattgttatgacattttatcaggttgcttttctctttttcacctactcgttcctcggctgggtaggggaggtcgtctttacggcggccgtccgccgcaagtatcaggaccgcggcgtgctgagcggcccgctctgcattctgtacggcatcggcgcgctggtcatcacctttgcgctgcgtgacatccgggacggctggttcttcctctttgtgttcagcgccgtctacgccaccgtcattgagtggatcggcggccacatccttgaatacacctcccacacccgctggtgggactacagcactcagcccttcaatctggacggttacatttgtttgggcgcatccgtcacatggggcgtgctgggcgtcatcatgctcaagtggggcaacccgctgctgctggcgctgtacagccttgtgccgcagggcgtctgggccgtggtgctgtgggcggcgctcatcctgctgggcattgacctcatcggcacgctgctggccatggccggcctgcgctaccggtggcccgctgccgaggccatcgagaaccgtcttgccaatctgaccgtccggagcggcatgtggatccttgaccgggtggagcgccgcatggccaagacccacccggcactgacctttatccgcccaaaacgggcgcagaccggcacctttgccgccgggtgcagcccgtacaagatcgtgctgctgtttttcatcggcgcgtttctcggcgacatcaccgagacgatcttctgccgcgttgtgggcggcgagtggatgagccgttccagcgttgtgtgggggcctttctccatcgtatggggccttgccatcgcactggtcacccagctgctctaccgctacaaggacaaacccgccagttggcttttcgtgaccggcacactgctgggcggtgcgtatgagtatctgtgcagcgtctttaccgaggtcgttttcggcgcggtgttctgggactacagcgccatcccgttcaatttgggcggccgtatcaatcttctctactgcttcttctggggctttgcggcggtggcgtggttcaagctgctctacccgcccatctcggccctgatcgaaaagctgccccgccgcttcggcacggtgctgacctgggcgctctgcgtgttcatggcggcggatatggtcgtcagctcggctgcgctggtgcgctacaacgaccgcctgaacggcgttcccgccgcgaacagcatcgatacttatttagacgagcactacgacaatgaccgaatgtataaggtgtacccgaaggcggtgcatacagggtaattgcaaaaatctttgtatattccgcacatatgtgttataataattttgtatctgttgtataagaatcgaggaggcgaccggctgtgaaccgcaacgagggaaatgaactgtacctgaaagcccaaaagctggcactgcgcgattaccgggagaaaatgcttgccgggcaatcgccgtttctgcctgtactggacgatatcctgcaaaatgtcccggtggaaaatcaaattcccctcggccaggtggatatcccgctgaatctgctggtgggcaccaaaacgactggccgcaccgcagcgttcgcatccaactttatgccgctgctggacctcaagaccgagtttgccagtaagtgggtcaacctctgcctgtctcatctggaagagggcatccgcgaccccatccgctgctatgagtatatgggccgattctatgtgcaggagggcaacaagcgcgtcagtgtgctgaaatactttgacgcgaccagcattctgggcaatgtcatccgcatcgtgccgcagtacagcgaggaccccgccgtccagatgtactacgagttcatgcactattatcccatcacccagacctatctgctgacctttaccaagcccggcagctatgcccgcctgcagaagatcctcggcaaggggcctgatgaaaagtggagcgatgaggaccgcgtcgagatcatgtcgctctacaactgggtcgagaaagcgtttctggcccaccgcggtgccaaactcagcgtcacggcgggtgatgtgctgctgcttttgctgcgcgtctacaccatgaaggagctggccgattccagcccgagcgagctgagcgaaaaactggatgccctgtgggacgatgtgctggccctgcagaagggtgaccccgtgcaggtcagcgacaagcccgccgagccgaagcaagctggcctgctggaccgcatcctgcccggcaagcgcaccgcccccacccacctgaaggttgcctttgtgcatgagcgtaccccggggaccagctcctggacgagccagcatgagttcggccgcacccagctggacaccgtgtttgaggggcaggttgagacggttgcctacttcaacgccgtccccggcgagaatgccgatgcactggtcgagcaggccatcaccgatggcgccgatgttgtctttaccaccagccccaagctggtgggcgcgtccttacgcgccgccgtcaagcacccgcaggtgcggattctgaactgctcgatggagatgccctacgcgagcatccgcacctactacacccgcgtatacgaggccaagttcatcaccggcgccatcgccggtgccatggcagcgggggaccgcatcggctatgtggcggactatcccagctacggcgtgcccgccaacatcaatgcctttgcgctgggggcacgcatggcgaacccccgcgcccggatcgaactgctgtggacctgcctgcccgaccagaccgacccgctgcacaccttcacccagaaggggatctccgtcatctcgggccgcgatgcgccgacacccaaccgcccccagcgggagttcggcacctttttggtcgggcccggcggcgtgctgcaggatctggccaccccgttctggcactggggccagttctatgaaaatgtcatccgcaccgttctgaacggcggctgggtgcgggataagtccggcaccgacggccgcgccgtcaactactggtggggcatgaacagcggcgtcatggatgtgctgctcagccgtgagctgccgcccgatgtcacccatctggcgcagatcctgcgcaacggcgtgacctccggcatgatcgacccgttccactgccgcatcacagcgcaggacggcagcgtcaagaacagcggccgccacggccttgaccttgagcagatcgcccacatggactatctctgcgatgccgtggacgggcacatccccgaatatgacgagctggccgaggtatcgaagccgatgtaccggatgcagggcattcaccgcgaccttctccccgttgagaaggaggccgagctgtgaagattctagctatcgccgacgaggaatgcaaagccctgtgggactatttcacaccggacaagctcgcgggcgttgatctgatcatcgcctgcggcgatctgaaccgccattatctggaatatctggcaacgatggcccccatgccggtactgtatgtccacggcaaccatgatgaaagctatgacctgcgcccgccgcagggcgtcatctgcattgatgatgatgtctatgttcacaacgggctgcgcatcgccgggctgggcggcggctgccgctaccgcaccggtgcctggcagtttaccgaggccgagatgaaaaagcgggtcaaccgcctgcgcggcaagatcgaccgccacggcgggcttgatattcttgtgacccatgcgccgatgcacggctacggagatctgaccgatttgccgcaccgcgggtttacggcgttttcggtcctgctggaccgctaccacccgcagctgatgctgcacggacatatccacctgagctacggcgcttccatcccgcgtgagcagcagtacggcacgacccgcatcgtgaactgctatgagcgcgtctatcttgatgccgagccgcccgccgtcaagccccgccatcgtctgtttgcggggctgctgggcaaatagctgtatgccatcgcagggcgtattctatctgcgcccgccaatgctcggctgccgcgcgggcggatacggagcccgtccctacattgaaatgtcgtctgataaggagacacttacctatgactaaaatcgcagtattcggtgcaggcacctggggcatcgcgctcgcgcgcctgctggccgtccatggcaaggatgtcacggtatggagcgccatccccgccgagctgaaagccctcagtaccacccaccgccaccccaacctgcccggcatggagctgcctgccacgatgcactataccgccgacattgccgaggcctgcgccggccgcgatgttctgctgtttgccgtgccgtccccctttgtgcgcgccaccgccaaaaaggctgcgccgcacattcccgatggccagctgatcgtagatgtggccaagggcgttgaggacaagaccctgatgacgatgagcgaaatcattgaggatgagcttgccaaggccggccgcaaggcgcgggtcgtggcgctgtccggccccacccatgccgaggaggttgcccgcgatatgcccaccgccatcgtggccgcctgcgctgaggaggaggccgccaagaccgtccagaaaatcttcaacacaccgaccttccgcgtctataccaacgatgaccgccgcggcactgagctgggcggcgcgatcaaaaatgtcatcgcgctggccgtgggcattgctctcggccttggctacggcgacaacgccaaggccgcacttatcacccgcggcaacgccgagctagcccgcctcggggccgccatgggctgcaagcctgagacctttgctggcctgtccggcatgggtgatctgatcgtcacctgcaccagcatgcacagccgcaacctgcatgccggtatgctcatcggccgcggcaaatccgtggagcaggccaagaccgaggtcgggcaggtggtcgagggcatcaacgcactgcccgccgcctgccaccttgccaaaaagtacaaagtcgaaatgcccatcgtgcaggcggtggaggccatccttgacggcaagcttgaggcccgcaacgccctgatggcgctgatgggccgcagcctgaagcgggagtgagaggtgctgcatggctgacatcaaggctgcctttttcgatattgacggcacgctgctgccccggctgcatcgccgtgcgatggagcccggacttctgcgatggcggcaacgcctgcgatgccgccaagcaggccgcggattatgtcacggatgatattatgaaagacggcctgtcaaaggcgttggagcattttgggctgatataaaaagagccttcccccaagggggaagccttttttattttcagcgat

SEQ ID NO: 14078 - DNA, 9352 bp, Unknown
  gut microbiota DNA sequence
caatcaccagcgcggcgtacagcacgcccgcgatggcccagataaaccagctgtactgcggctggccattgccgtccgggccgaaggtgtaccacaggaagatggcgaccaccaccagccagtaggcggcagtcagcgcgtttatgcggcttttgatggctttgtttgggcgggtgtagtcaccctcctccaacagctgatccatggcgccctgcaccgcgcccacccgcacaaaggcgtagacgccgcaggccaccagcaccagcaccaagcagatggacgccgacaccaaaaacgatgcaccagccatcatggcggcaaacatcggcaccgccgataaaacacagagcaccgtgccgatgatgttggccttatcgtactgcggcgcaaaggcatcgcggcgctccttcgccagaccggtgacgccgtactcggtctcaatggcctgctcttgcaaaaattcatacgcccgcaccgacgcactgcactgcatgaagatagccaccgccgcggcgatgatgaccagcagcgcaatgatgccgatgccacccgccaagtcatcccggatgccgaacaggccggcctctctcagcgtccccagcgccagcagcggaatggggctgatgatgcagagcgccgttgccagcgccagcttcggcgcgttggcctgcgtcttggcgaggtagtcgttcgcctgcgccagcgtcacgcggggcaggggagagacctcatcatcgggcgtgtactccggctcgccctgatcgtcttttaataggtagtcggtcgtcacgccgaacagacggctcatctgcaaaattttgtcgatgtcgggcacggactgcgcgctctcccacttggaaacggattggcgggtcacgcccagctgttcggccagctcctcctgcgaccagcccgctttcttgcgcagggtgataagtttgtctgcaaagatcatttgggtgtacctccttcaatttccttgcccttatcctaccagaatccccggttgcacaccataaatcggccccgccaatctgtcaactgtgggttgcgtttgcgggcagacgccagtcgatttccgctgcaccgttatttttcaaaaactcgtttaccttgccgaacggtgccgagccgaagaacccccggtaggccgacagcgggcttgggtgggcggattccagcaccaatacggggcggcgcgcggcggccccggtaaagatcggtgcgtatttctgcgcaggcttgccccacagcacagcggccagcgggccggtgccctgcgctgctgcatagtccagcgcggcgcgggtaaaggtctcccagccgcggcccgcatgggcaaaggccgcgccctgctccaccgtcagcacggtgttcagcagcagcacgccctgccgcgcccacggcgtcaggtcggtatgtgcagcactgccggggccgaactctgtgtccagctccttaaaaatgttgcgcagactcggcggagccttgcagccgtccggcaccgagaagctcagccccatggcctgccccggctcatggtaggggtcctgccccagaatgaccgcccgcaccgccgcagccgggcaggcgcggaacgccgcaaagatattttccggcgcggggtagacggtcctttccgccgccgcagccgtcacaaaggcgtccagctccgcaaagtacggctttgcgcactcctgcgcaaaaaacggctgccagtcggtagaggagagcttgtccagttccgtagtcaaaagcatcgtgtcatcctttctgtgtacctgcacaaggcggccagaggactggcagccctaccgggattacccttacatttttcacaagtatatcacacccccgcaggggttgcaatagcggcaaaaatgcggtataataacatttatgctgcggcgtcctgccgcgcctaaagtatatcaaaggggagaaccatttatgcgttccatcaaaaccaaattgttcagccttgccatggctgtttccatggtgctggcgctggcgggctgcgccatgtccacgccgtccaccgtcggctccatcggcggggtcgagatcccggccggtatttacctgctggcccagtataactcctacaacaccgcgtccggtctggccaagcttgcgaccggcgagacggcctccgatgtcaaggccgtgctgaaagccacctgcaccggtaccatcaacggcgaggaagtcaccgccccgggcagcgagtatgtggcccagcttaccacccgcgccattgagtactacgccgctgtcgaaaagcagtttgccgagcagaacggcgttctggatgacgccgccaccgccgaggccgccaacaccgccgacagcctgtggggtaccaacggcgacctgtacacagccaacggcatctccaaggctactgcggagacctacctgctcaacgcccagaaggccaaggccctgctgaagatgacctacggtcccgagggcacggcccccgttaccgaagccgagtacaccgattatgtgaacaacgactgctactacattgaggccgtgcagttcccgctcgtcaattacagcagctacacgatggccgatgacacccagaaggcctccatcatggctaccgccgaaagctgcatggaggagctgagccggactgccaccgcagagacggcctccggcagcgccctgtacactgcggccatgacctatgtgccgcaggcgatggccgccatgggcagtgagatggacgcctcgcaggccgtctactacgccgcaagccagctttacacccccgatgacctgagcagctacggcagcgatgaatacaacaatctgaccgacccgctggacgcggccgggctgaaccactggaccacgatcgatctgggcaccacgattctggttgcccgccggatcgacccgttcaagacctacaccgtggacgagctggacagcatgtatgacctgctgaccgatatgaagtctaccgccattcaggatgagctgtacgccgccggtgccgcgctggagcatgatctgaacagcgccgcgctgaacacctacagcgcctccaagatcaaaaagaacgcctgagcttaaaaagttcagccgggagcagcattgtttgctcccggtttttttgttaatgaaaagaggtttgtaccatgacgaaaaacaaatccctgaatttcctgctgcagacactcggctgcctgatctccgcagcaggcatctacagctttgccgttgcggccggtatccctgtcaccggtgttgcgggcatcagcgccatcctgtaccgcctgttcggcgtgccgatgggcctgagcaatgtgctgatcaacattcccatcatcctgtgtacctacaagctgctcggacgcaccttcttcctgcgcagcgtctactgcatggcgctctttgctatttccaccgactatatactgccgctgctgccggtctatcagggcgaccgcctgctggccacgatctgcgccggtgtggtcggcggcatcggcgatgcactgatctacatgaacaactccagcacaggcggcctcgacttcatcacaatggctatcaaagcccgccacccgtatctggcgttcggcaacctcacctttgcggcggcgctggccgtcatcgtcctctccggcgccgtgttccgcgatgtggacgccatcatctacggtatcatgttcaatttccttgtctccaccgtcatcaacaagatgatgttcggcttcacctcctcgatgctggccatgatcatcaccgatgacggcgcggccgcctgtgccgagatcgaccgggtagccgaccgcggctccacgatcctgcaggggcgcggcggctacggcggccacccgagggatgtcgtgctctgcgcctgctccaacaagcagctctacgagatcgagcatgccatgcaggccctcgacccgggctgcttcatcatcatgcttcaatccaacgaggtccacggcgaaggcttccgccagctggagctgggaaagaacgagaacaggaacgagtaatttcagcgaaaacgcgtttgttttagcaactctatggagcataggttgccaaaatgagcgcgttttctttataatgggcacagaacaaaaaggaggttttagacatggatgccacaaaaatcggtagattcattggagcggagcgccgcgctaagggctggacgcagcgccagctggcagataaactccagctgaccgacaaggccatcagccgttgggagacaggtaaggggttgccggatgtttctctgcttttgccgttggctaacatgctggatataaccgtaggtgagctgctggctggcgaacgccgccttcagccgcctgccatgcagacggctgaagctgaggccctcactacgcgtcagctggtagactacacgcgggagcttggcccccaactgcgccgccgccgtgcctgcacagtattggccgggttgctgctgtttgctgcggcgttcttgacgctgcaatttttgcggctggttctgacaggtggggcgggcatccatggctttggcatagaatctttgttattactcgttgctcttccgtttgcttttacaacatctgccttttggctgctgcgactgctttgcaccgatgccatgaccgaggtgcgagccttccgccgcgcatcggctatggccgtggctgggctgtggttgctcgatttgtactttgccggagcgtttgccgggtgtgttgcgttccctgtgttggatttctggcaagccccatcgtggcaggaaaatttaaatctcgtaccatttcggcaaatcgcacaatatctgctctgtcttgttccaggtcaagggcatcttaacggctccggatatgcgtttcgcgggcattttgtcttttggatgaacttttttgtgttttccttgccagttcttctgctgccacgcatctcaccccgctggcgtggggcgggtgccgccgtctggcttgctgtagttggcggttgtgtgatagaagttacacagctgttcgtgcgcaccgataccgcactgttccgttttgatgtggacgcggtaattttgcgcgtagccggggccgttgtattttggtggataggcaggatacccgctgtcaaaaaattgctggcacgtttgttttagccgtaggggagggatttttcccccgggaacgctgcgcgagcgcaagcctgcccggagcggtcaagaccgctccctacagcctgccgtttacgggttccccgtagagaggggtcttgacccctccgcggggcgtcgaggacgccgaccaccgccggtttgcagcgcggtaggggccgcacatgtgcggcccggggcatccccataaacgcccgccgacgggacaccaccgggccgggcatgcccggcccctactgcgatataaacaaaagcaccgccgctgacgattttgctcgtcagcggcggtgtggtttatttcatgctaaaatcagtagttcttggcttcttcctcgccggtcatgacgcggagggcgccctggcagagggcgagcagctcgtcctcaccggggtaggtggtgacgggagcgatccagccgaggtagtcggtcagggtctgggccgtgtacgggttgtaggcaatgccgccggtcaggatgatctggtcgaccttgccgtgcagcacggcagccatagcgccggcgtccttggcgatctggtagaagaaggcatcccacacctgcttggccagcgcatcgccggactcggccatcttgccgacctcacgggcatcgttggtgtgcaggtagccgttaaagccgccgttgccgcagatcttcttgtagacctcctgctgggtgtagttgccgctgaagcacatcttgaccagatcaccgacaggcacggtgccgctgcgctcggggctgaagcagccctcgccatcgagaatgttgttgacatccacgaccttgccgtggtcatgggcgccgaccgagacaccgccgcccatgtggatgacgatgaggttcagctcctcatagcgcttgccgttctccttggcaaagcggcgggcaacggccttctggttcagcgcatggaagatcgagcggcggggcagctccggcataccggaaatgcgcgccttatcggtcaattcatcgacaaccacagggtcaacgatgtagctgggcacgcccagcgcatcgccgatctcgcgcgcaaggatgccgcccagattggaggcatgctgcccctgaacaccggccttcaggtcagcgagcagcgcatcgctgacggcataggtgccgcccggaatgggcttgagcagaccgccgcggccgacaatgacattcagcgtcttggggtcgcagttcttttccttcaggaagtcaagaatgatctccttgcggaaatccttctgatcaataacgctggcatacttggcgatctcctcggtagggtgacgcagcgtttcttcaaacagcagggtctcatcctcaaacacaccgaccttggtggaggtggagccgggattgatgaccagagttttgatggacattgggaacgtctccttttttacattctttggtttcccccaaggggagccattttttactggttcagcccggcggcgacaacggcggccagcgcgatggagttgaccttcgtctggaaggagtcgctgcggctggtcaggatggcgggcactttggtgccggtcaggatgcagccgttcttgcagtcggcggtgtgaacaagcgtcttgtagacgaggttgcctgcctgaatgtcggggaagagcaggatgtccgcatggccggcagccgggcgatcctgcgcgcccttgtggtgggcagcctcggggtcgatggcaatgtccatggacagggggccgtccaccacacaaccggtgattttgccctcctcattcatcttgcgcagctcctcagcatccacggtgcagggcatcttggggttgacgacctcaacggcggccagcggggcaaccttggggcaggcaacgccgcaggcgtggaccacggcaacggtattctcgatgatatgtactttatcttccagcgtcgggtaggtcataaaggcaacatcggtcaggaaaagcagctgctcgatgccctttacctcaaagacagccacatgggacagggtgttgccggtgcgcaggccgacctccttgtccagcacgctcttcaggaaggtcttggtgtccagcaggcccttcatgtacatattggccacgccgtcatgcgccagcttgacagccttcagcgcggcctgcaccttgtcgggctcgttgatgatctcatagtcggaaaggtcgatgttcagctctgccgcgatcttgcggatggcagcctcgtcacccaccagaatggcatcggcaatgccctgcttatgggcggcgtcaacagcctccagaacggcgtcgtcctcagcggcggcgacagccagcttctgcttgccgcaggtttttactttcgcgatcaggtcctcaaaattcatcttacagcacctcgttttttacagtcagggcggggcagcctcaaaaaagccccgtatgttaaaataataacacttaatgtgccgtgggtcaagagggggaaggggagcggcgtgtcaaaaaatattttttctgttttgcgtgcggtgcctattaaattggtagggagccgcccgattttgcagaaagctgaccgatttttaataaatttggcattgacaaaaccttaacaggatggtaaaactatagtagcggttcgatacgcgcaccgctgcggcaccatgccgccgtacttctgacccaaaggataccgtcccaaagagccagcgtcggcgccggtgcctagctttacccctaaagttgtttaatttttaacaggtaaggcgctattccaaaccgaaaggttcacacattcatgccaaccattgccatgtatcccggcagcttcgatcccgtcaccaacgggcatctcgatattatcaagcgctccagccgtatgtttgacaaggtgatcgttgcggtactcgtcaacagtgccaagacacctctcttcacggtcgaggagcgcgttgccatgctgcgggaggcctgcaagaacatcccgaatgtcgagatcgactccttcaacggtctgactgtcagctttgccaagcagaagggtgccaccgtcatggtgcgcggcctgcgtgcggtcacagactttgagaatgagatccagcttgcccacaccaactacgccatgatgcccgagatcgagacggtctttctggcgaccgccatcaagtggagctacctgtcgtccaccatcgtgcgggaggctgcccactacgggcaggatgtttcccgctttgtaccccgcaatgttgagaaagccctcatcgccaagcgggaggcaggggagttataacgcattcacgccgtgcgccttgccggcctgaagataaaaagttactcaatagtccatccaaagagaagtatttttaggaggctacttatgaaaaagatcgtcatcgccagcgcctgccgtactgccattggcaagttcggcggcaccctcgccaatgtccccgccgctgagctgggctccatcgtcatcaaagaggcgttggatcgcgcccatgtcaagcccgagcaggtcgatcaggtctacatgggctgtgtcattcaggccggtctgggccagaatgttgcccgtcaggcttccctgaaggccggtctgcccatcgaggttcccgctgtcaccgtcaacgtggtctgcggctccggtctgaactgcgtcaacatggctgcccagatgatcgaggccggcgatgccgacatcgtagttgccggcggtatggagaacatggacatggctccgttcgccatgatgaagggccgctatggctaccgcatgggctaccccatgggcaagagcgagctggttgacacgatggtcaacgatgcgctgtgggatgccaccggctgcaacatgcacatgggcatgaccgccgagaacatctgcaccaacgagacctaccagaagaagtacggctacagccccatcgaccgtgagaagctggacgagttcgcttaccacagccaggagaaggccgccaaggctatcgccgacggtgccttcaaggacgagatcgttcccgttgtcatcaagggcaagaagggcgacaccgtgtttgataccgatgaaggcccccgcctgagcagcatggaggttctgggcaagctgaagccctgcttcaagaaggacggcatcgtcaccgctgccaactcctccgccatcaacgacggcgctgctgctctggtcatcatgagcgaggagaaggccaaggagctgggcgttg

SEQ ID NO: 14079 - DNA, 1427 bp, Unknown
  gut microbiota DNA sequence
ttttcccgtttgcggtgtaagaaacaaaaaaagagcagttcgtgaagaactgctctttttcagtgcattttggcaatgccaacgcggcgagattagtcgctgacgtagggcatcagagccatgtagcgggcacgcttgatggcaaccgtcagctcacgctgatggaaagcgcaggtaccggtcacacggcggggaatgatcttggcgcgctcgctcacgtacttgcgcaggcggggcagatccttgtaatcgatgtggtcaacgcggtcaacgcagaaggagcaaaccttcttgcggccacgatgcatcggacgagaagaacgatccatagccattgtgaaaacctccttgttagaatgatactttcgattttagaacggcaggtcgccctcatcctcgatcagtgcaaagtcatcgttgctgccggcagagtagctcggcgcaggattggcctgcacagcaggacgggcggcgggggctgccatgggtgcgccgtagccggcatcacccatcggtgcggcgtttgcggatttgggagcggcaaagttgacgttgttggccacgatctcaatcgcggtgcggttgttgccgttcttatcctgatactggcggctctgcaaacggccgtcaatagcgatcagagaacccttctggaaatacttgcagacaaactctgccgtgcgatcccaggcaacaacatccagccagtcagcctgactctggccgttggcgtcacggcgtccgcggtcgcatgcgatgcggaacgaagcaacgtttttgccggtcgtggtctggcgcagctgcgggtccgcggcaaggcggcccataatagcaacaacattcagcattggtttactccttactcctcaacagcaagagtcatgctgcgaagaacgccctcagtgatcttgaaaacgcgatccagctcagccgggaaatcgggctcgctggtgaagctgatcaccgtgtacacaccctcggtctcatcgttgatggggtaagcaagacgcttcttgccccaatcatcaacagaatcgatcgtaccattcgctgcgatcaggttcttgaacttgttgatcagagcgttggaagcctcttcgtcgaggttcgcggtggtaaccatcatggtttcgtacttagccatattctgtgcacctccttttggacattaggccttctcttttaacggaaaagacaaggataactgtgtgatttcacacagcatctaattatagcaagtttccggcggcttgtcaatgcaaaatttgccccgcagggcgcaaatttgcggacttttttggaattctttgcacaattacgcaaaatgtcctattgctttttcctgcggctttgttataatgggctttataatgcacaattcttgtctggtatcgcggcactgcaggggcgggcatggctcgcctgct

SEQ ID NO: 14080 - DNA, 9411 bp, Unknown
  gut microbiota DNA sequence
aacaacaaaagaggcatcgccggaatgcctctttgttattgtgtgctcggtacgcgcggtggtgtgagaggtcggctctctatttaagaaagcctcccactcgatttggtattatttgcccagatgccagatgtcgcggtcgtactccgcaatggtgcggtcactggagaagaagcctgccttagcaatgttgataaggcacttgcgccgccagcccatcgggtcgcaggcgtagtcgctgagcgcctgtcccttgcgcaccacataggcgttgaagtccggcagggtctggaaccaatccttgtgggtcagctcattctgcaggcgcttgaggttttcctcatgcccggcggccagcatctgcgggctggtcaggaaatccacggcgcggcggatgttggggtcgccctcataccactgggcagcaacatagtccccggcgtcgtagcggtggatgacctgatcggaggtctgaccgaatatataaatattctcctgcccgacctgctggctgatctcgacattcgcaccgtccatcgtgccaagggtcagcgcgccgttgagcatgaacttcatgttgccggtgcccgatgcctccttggaggcaaggctgatctgctcggacagatcacatgcagggatcagcttttcggctgccgtcacattgtaattctcgacaaacaccacctgcagccaaggggaaacctcggggtcctgcgcaatgaccttggagaaggtcagcagtgcatggatgatgtccttggcgatgatgtaggccggtgccgccttggcaccaaagatgctgaccagcggcacagcgggcaggtgccctgccttgatttcataatactggtggatgaggtagagcaggttcagctgctggcgcttgtactcatgcaggcgcttggactgaatatcaaagacagccttcgtgtttaccgtgacattctgggtgcgcagcagccagtctgccaactcctgcttgttggcggtctttacggcggtcagctcgttcagcacgacctcattgcctgcaaacgccagcagcttttccagctcggcggcatccttgcggaagccggagccgatgtgcttttccagcacctgtgtcaggcgcgggtcgcattccagcagccagcggcggaaggtgatgccgttggtcttgttgttgaacttctcggggtacagctcatagaagccgtgcagctcggagttcttcaaaatttcagtgtgcagggctgccacgccgttggtggagtgggtaaagtggatgtccatgtgcgccatgtgtacccgatcatccttgtcgataatggcaaggctctcgtcctcggtgcgggtgcgggccagctcgtccagcttttcaatgatcggcatcagctgcggcacaacggcatccagataagcgcgcggccacttctccagcgcctctgccagaatcgtgtggttggtgtaggcgcaggtcttggtgacgatctcaacggcttcctcaaactcgatgcccttctcgcccagcagacggatcaactcaggaatgaccatgctcggatgggtatcgttgatctggatggctgcgtaatctgccagatcgtggtaatcgcagccgcgcgcggcacactctgcaaggatcagctgcgcaccggcggaaaccatcaggtactgctggtacacacgcagacggcggcctgcctcatcggaatcatccgggtagaggaacagcgtgaggttcttgtcaatgtcggtcttgtcaaaggcaatgccgtcatgcacgatgctctcatcaatgctgtccagatcgaaaagattcagcgtgttggtgcgtgcgccgtagccggtgacagccagcttgtacaggcgggccgtgtattccttgccggccagctgcacgggataggtaatgtcggttttctctgcccagctgtgggcggtaagccacggatcgggcttctcgttctgcagaccattttcaaaggactgatggaacaggccgaaatgatagcgcagacctacgccgtcacccggcaggccgagcgttgccagcgaatcaaggaagcaggccgccagacggcccagaccaccgttgcccaaagacggctccggctcgacctcctcaatctcagaaaggctcttgcctgcagcggcgagggcagtacgggcatcatcgtagagacccagattgataaggttattggacagcagcttgccgatcagaaattcggcgctgatataatacagtttacgcccagtgacaggctgcaccttatcggcactcttgtgccggacgatctccagcagggccagatacagctcctgattcgtgcagtcagccagcggtttgccggtgtagctttgcagcatttcggtaaagttcataaacaagtcctcctttactgtgacgaccagagtttctctctgtacctaaggtataccacacaaaacaagaaaaaacttgcgcattcactgcaaaatatggtactatcctaacatcaggaggaaaaaaccatggacaatcgatcttctctgcaggaaaccaagcaccatggcgaagtgcgatttccgttcaatatctacccctgcaccataccgggggactttcggcaggtggctgtacactggcaggacagcatggagctgatctatataaagcgcggcagcggccttgtacagaccggtgcgcaggtctgtacggcacagagcggggacatctttgtgctgacgccgggcacccttcacgcgatacggcaggccgaaagctgcacgatggaatacgaaaacatcatcttcgatgttgagcttctcggcggtgcggaggatctttgtgcggaaaaatatctgctgccgctgcaaagcgggcggctcgcgctgccggagcatatcaccccggacgaagtttggtatccgcaggctgccgactgcctcaaggaggccgaggaggccaaccgctgcaagcagtttggctatgagctttgcatcaagggggcgctgctgcgctttttggcgctgctgattgcccaaagcaaggcgctgccccccgctgaaaaggcaagcacccagcggctgagggcggtactgcaatggatctcggcccattacagcgagcctgtctgcgtggcggacgccgccgcgctgtgccagtgcagccccaatcactttatgcgttggttccgccagatgaccggacagacctttattatctttttgcgggaatatcgtctcaacgcttccgccgaggcacttcgcacaacagaggacaccattttgagcatttccgagcagtgcgggtttgaaaacctctcctattttaatagagagtttaaagcgcattttgggatgacgccacgggaataccggaaataatagaaattctttctgcaatgagatactgtgattgcatcgaaacaatggataggaatctttctatctgcgtggcggtcagctttttgcctgcaccggtgaaccgtttccgcgatcacgccacaattctttggctatatttaccaaatcacaatgcaattcttcgtgtaattcaacaaagttagttgtttttgctatttttctattgatttttcattgagatttggatattattatgtcaatccgatacggaaccgtttccggaatggacacacaaatttgtttcaaaatgtttttctttagaaggaggaaaaaacatgaagacaaaaaagactttatccctgactctggcagccgctatgactgccggtctgctggttggctgcggcggtggcgccgccagctccagcagcactgccgctgcttccagtgaagccgctgcttccagtgaagctgcaagcagcgccgccgctacctctaccgccgcaggcaaggtttactacctgaacttcaagcccgagcaggatgaggcttggcagaatctggccaagaagtacaccgaggagaccggtgttcccgtaacggtcgtcaccgccgcctccggtcagtatgagaccaccctgatgagcgagatggccaagagcgatgcgcccaccctgttccaggtcaacggccccgtcggtctggccagctggaaggattactgctacgacctgtccggcactcctcttgctggtgagctgaccagtgattcctacgctctgaaggacggcgacgccaccctcggcatcggctacgttatcgagagctacggcctgatcaccaacaccaccctgctcgagaaggctggctacaaggctgaggacatcaagagctttgccgacctgaagaaggttgctgaggacatcaccgcccgcaaggacgagcttggcttcgccgctttcacctccgccggcatggacggttcctctgactggcgctacaagacccatctggccaacctgcccatctactttgagtatcaggcagacggcattgacaccaccgatgccatcaagggcacctacctcgacgattacaagaacatctttgacctgtacatcaacaactccacctgcgatcccgctgagctggccggcaagaccggtgatgacagccgcaacgagttcctgaacaacgaggccgtcttcttccagaatggttcttgggagtataacaacctcgttggcgatggcaagcccttcaccgatgaagatctgaccatgctgcccatctacattggcgtcggcgatgaagccaatcagggtctctgcaccggtactgagaacttctggtgcgtcaacaaggaagccaatgccgatgatatccaggctacgctggacttcatgtactggtgcgtcacctctgaggagggcaccgctgccatggcaaacgacatgggctttgttatccccttcaagaaggccgttgagtcccccaacctgttcgtcaaggtcgacaacgctctgactgctgccggcaagacccctgtggcctggtgcttctccaccatgccctctgagaactggaagaacggcgttggttctgctctgaccgcttacgctgccggcaccggcacttgggacgctgttgtctccgctttcgtggatggctgggctaccgaggctgctctgaacgctgctgcgtaaaaataattccttaaacaccgataagtggggcgggcgaaattcgcccaccccgctttttttatttgaaagtaaggggtgcttttccatggaaaaagcaataaagcgctattggcccgtatttgtgctgcccacccttattgcctttattatcggctttgtctggccgttcatatggggcgcagggttgtccttctgcaaattcacgaccgttaaaaatgtctcctttgtgggactcagcaactataaaatgatctggtccgatgacaccttcatgcatgcgttctggttcaccgctgcctttaccgtggtgtccaccgtgctgatcaatgtgctggccttcggtattgccctgctgctgacccgcggcatgcgcggcaccaatgcattccgtaccgtctttttcctgccgaatctggtcggcggtatcgttctgggctacatctggcagatcctgctcaatggccttctgaccgcttggggtaagccgctgctggcgctgaatgccacttacggcttctggggcctgatcgttctgatgtgctggcagcagatcggttatatgatgatcatctacattgccggtctgcagaatgtgcccaccgacctgatcgaggctgcccgcattgacggcgctacctcccgccagatcctgttcaagatcaagatccccatggttatgccgagcgttaccatctgcaccttcctgaccttgaccaactccttcaagctgttcgaccagaacctgtctctgaccgccggcgagcctgccaagcaatcgatgatgctggcgtacaatatttacgataccttctatgcccgctccggaccccagtggaagggcatcggtcaggcaaaggctgtcgtattcttcctgtttgtggtcgtgatttcgctgattcagctgcaggccactcgttctaaggaggttcagcaataatgggtgcaacaaaaaaagaccgccgtatcaatgcggtattgtccgttttgctgggtattttgtgcgtggcatggctgtacccggtattcatgatcctgatgaactccttaaagaccgagcgcgccatcaccactacccacgcctttgagctgcccaacgccgatacctttgtgggcttaaagaactatatctacggcattcaggagatggactttttgtcctctttctggtatagttttattattactgtcagctctgtcgcacttatcctgctctgctgctcgatgtgcgcgtggtacattacccgcgtgcagggtgtgctgtccaagggtatgtactatctgtgcgtgttcagcatgatcgtaccgttccagatggttatgttcacgctggccaagacggctgacaccttaaagctcaacaacccttacaatatctgcatcatctacttgggcttcggcgcaggccttgcggtgtttatgttcaccggctttgtcaagagcatgcccatcgccattgaggaggccgccatgattgacggctgcaatcccctgcagatcttctttcaggtggtctgcccgatcctcaagcccacgatgatctccaccgctattcttgaaaccatgtgggtgtggaacgactatctgctccccacgctggtgctggatatcaaaacctaccgcaccattcctatggcgatccagtatttccgcggcagctacggcaaggtagaaatggcccccatgatggcctgcatcatgatcacggtccttccggtcatcgtgctctacctcgtctgccagaagtacatcattgacggcgtggtggccggtgcagtcaagggttgatcacaaccgaaagaaggcttcaccatgacgatcaaagacattgcacgggaatccggcttcgcggtcggcacagtgtcgcgggcgctgaacaacgcccccggcatcagcgaggatacccgccggcgcataatggaggtagtcaaccgccacaattacgagcccaacgccaacgccaagcacttaaaacagcaggcaaatgacggcatcgtcctgatcgtaaagggtacccagaatatgctgttcgcaggtattctggagcagctgcaaagcgagatcgccaaccgcggttatgtacccactgtctactatatcgacgaggaagccaacgaggtcgcacaggcccggcgtatctgtgccgagcgcaagccctacggcattatgtttctgggctccaaccttgagtattttacgaccgagccggaaagcctgcgcatcccctgtgtgctgctgaccaacagtgccgccagcctgcagatctccaatctgtccagcgtgacggttgatgatatggcagctgccgaccgtatgattgagtatctgtacgatcatggccaccgccgcatcggcgtgatcggcggtgatcccaccctgtcaagacccagcttatcgcgtctggccggtgtgcagggggccatgctgcgtctggggctgcccttctctacggataagcagtatgcccatgcgcgcttttcccttgcagacggctacaaggcgatggagcatctgttggagactgccccggatatcactgctgtgttcgccatgtcggacctaatggcgctgggtgccatacgcgccctgcaggatcacggtctgcgcgtcccgcaggatatctccgtcacggggtatgacggcatcgcccttgggcagtacagcgtcccccgcctgacgaccatccgccagaataaagagcagctggccctgcgcagtgccaaaattctgctgcaaaaaatcaaggaacccggcaccgccgtgcatgaggtggttccttttgaactcatcgagggagagagcgtaacaaaactctccccgtaagaaaaagaggttttccggatgagagcaagcggcattttaatgcccatttccagcctgccctccccttacggcattggtaccatggggcagcaggcacggcaattcgtagactttttatcccaagcggggcaggcatactggcagatcttacccgtctgcccgacaagctacggtgacagcccctaccaatccttctccacctacgcaggcaacccctattttatcgaccttgacaccctcgcggcgcaggggctgctgaagcccaaagagtacaagcacatcgactggcaatgcacaccggagcagatcaactacggtgtcctgtatgagaagcgctacgccgtactgcgcactgcttgtgcgcgtctgctggcgtcacccccggccgattaccgggatttcgtcaggaaaaaccgcttctggctgccggactatgcactgttcatggcgttgaaggacgcacacggcggtgtctgctggcaggaatgggagcatcccctgcgccagcgcgagccggacgccctgaaggctgcccgcaggacctatgccaaagacattgccttttggcaggctgtgcagtacctgttctacacccaatggcaggcactgaaaacatacgccaacgacaagcatatccagatcatcggggatctgcccatctatatcgcgcttgacagtgttgatgtttggagcagcccgcaggatttccagcttgatgccgatctcaaccctaccgaggtggcaggctgcccgccggacgggttctccgccacagggcagctatggggcaatcctctctatgactgggacgctatggcgcaaaacggttatgcatggtgggtacggcgcatccggcacatgtgcagcatctatgatgtggtgcgcattgaccatttccgcgggtttgccgggtactatgccatcccctacggcaacaaaacggcggagggtgggcgctggcgcaccggccccggctatgcactgtttgccgctatcaagaaaaagctcggtgagccccgcatcattgccgaggatctcggctttttgaccgaggatgtcaatgccctgctgcgcaaatgcggttaccccggcatgaaggtgctggaattcggctttgacagccgcgacggcggcgactaccggccccatggctatccggtgaacagcattgcttatgtgggcacccatgacaatgagccggtcaacggctggatggctacggccgcccccgaagatgtggcccgcgcggtgcgttacctcaacctgaccaagcaggagggctaccactggggcatgatgcgcggcatctgggccagcgccgccgagctgagcatcgtgcaggcgcaggaccttctcggtctgggccacgaagcccgcatgaacaccccctcgaccttgggcggcaactggtgctggcgtgccaagcgcggtgcttttaatgaccgtctggccgtcaagctgcatgatttgacggagttgtacggccgcctgccggaataacaccagatcataagggcttctctcccctactcctaaggcaacaccgcac

SEQ ID NO: 14081 - DNA, 7979 bp, Unknown
  gut microbiota DNA sequence
atagactatccttccagctatccggcggtgcaaagtagaatgtgtactttgtaccttcttgcaccgtggcatcgcccgcacacagtgcaatatcactttctttggcattccctgccgtaatcgtcctatcatcagccgaatcgccttcgttcaagaaggttgcttcgtcctcgctcccggtgtaatcctcgccggtgttgtccgcatcggcggtcttacccgcagtggcattgtctgccgaggcggtattctctgaaccggtcacgccctcggcagggggcgcgtctgcggctttgtcggttgtgtcggcgctgtttgtaatcgtttccaagttcggcacagaaatttcaggctctgttttgctgccctcgtttgtcgtgtcaccgtctttttgaatcgtttccaaattcgacacagaaatatccgacccggttccatcagcaccatttcccgtattgtcatcgcacggaatcgtttccgaacttgaaacagaaaattcagtctccgtctccgctgcatataccggcagagccatgcttgccagcaggcacagggcggccagcagtgccgccgcacgatgcaggatggaatttgacttcgtcatctgccttgcctcctcttgtatccattcaatacactttattccgcagtaaactgcggaatagcaaagggtgtacaccctttgggcttatgctttccacggcgtccgcacgcaatcgctggcgtagggggcatgggaaacataatacactggatttaatttccatttcttttatgagaaaaattatagttccttggtacgagaatttcaagtacctgtgttgaatcgtttcattttcggcaatttgctatatttcaaccgcattatattgtatatcctgacggttcgtgcggtgcagctttgtaagatacagcgcgatttcttgcgcatctgcacactatatgttgaattatgtcgatacttttgcgcagatgttgcgcgccgcagggggacaagatttgttcggtcatgttggaaaaggaaaaaacgcaggggcggcgtcccctcgcggaggggctaaggggtggttggtttgcgcgggaaggtttaccgggaaagcgcggcggctggttggtggccgagcaatggccgcccctgcatgcgctgtgcggatgggtggcgtccccgatgccccgggaacgtctgcccgtctgcgggcgcatatggaatgcgcccctacggtgtggcgggcttctatcttattatatatacatacaaaaaacaccccgcccggcagcgtggggctgcgggcggggtggctctggtgcttatttacttcagatcagacccataaggctgggcagaccgagggagagcgccgggatataggtgacggccagcagggcggcaaccagtgccacaaagtaggggatcagcttggaggtcacctgctcgatggagacatggccgatgccgcagccgacaaacaagacagagccgaccggcggggtgatgttgcctaggcacatgttgaaaatcagcataacgccgaactgaatctcggtcatgccgaagctgatggcgatgggcaggaaaatcggggtgaaaatcaggatagccggggtgatgtccataaacatgccaatgaccagcagaataatattcatcagcaggaagatgatatacttgttgtcggtcaggctcatcaggccgttggagatggcggccgggatgccggagtacgccatgacgaaggacatggcagacgaagcggaaatcaggaacaggatgatgccgctcgtcttggcggagttgagcaggataccaaggaagcccttgaagtcgatgctcttatagatgatggagaggatcaggcagtacagaaccgcgatgcctgcgccctcggtggcggtaaagacaccggagacgatgccgccgatgacgatgacgatgagcagcagggacggaactgcgtcccagacggttttcagcacgctctggctgcggtcaaagccggtggccttcatgccggccttctttgcgccgatgaacgcaacgatcatgcagcacagacccatcaggatgccggggatgtagccggccatgaacagggtggagatggacacgccgcccgcgacggtggagtaaacgatgaaggcggaggtcgggggaatcagcagacccgtgggggccgaggcgatgttcgcagcggcggagtaggcggggtcgtagccgttttcctcctcaatgggggcgatgcagccgcccatggcggacgcagcggcaacagaggagccggacagtgcgccgaacagcatgttgccgaggatgttggcctgtgccatcgagccgggaatcttgccgacaaacagctgtgcaaagttgacaaggcgcttggcgataccgccgttgttcatgatgttgccggccagaataaacagcggcacagccagcagggagaacgactcaacaccggagttcatcttctgcatcgtgataaaggtgatctggtcccatgacagggtagacatggccgtcacgatggaggatgccacaatgctgatggagatgggcacgccgaggaacagcagcacgccgaacacagcgaaaaggataacggtggtcatggtgatactcatttgtctgcaccctccttggattctactttttcgccggtgatgtcctcatagatgttgatgatctgcgcaatcacgatgaacacgccggaaatcggggcgatagcgtaaaccagactgcgggggatgcccagcagcgccgagaactcgcggctggcggagacagccagcttaaagccgccgatcgtgaatacgaagatcgccatcaggaggatcaggccgtcaatggccaccagcaggccggtgtgggccttgccggtgaacttgtcgcggacgagcgtcagcgacatatgctcgcgggtggagaaggcgtaggccgcgccgatgaagccggtccagatcaggctgtagcggacaagctcctcggtaaaggctacggggctgttgagcacatagcgggagaacacctgaataagcaccagaatggtcatgaaggaaagcaaaatcgcacaggcgatgctcaggattttatccatccagaatttaatcgttgcaaaggtgtttttcatggcttactcctcccctcttgccttttcaacggtatccatcagcgtcttgacgccgggatactcttcttcgtaggcttcgatcatcggctgggtcgcctcgcggaaggcctccttatcgacatcgtagacgaactccacgcccatcgtctcctgtgcctccttgacagcctcctcgactgcggtgtcccacatgaccttgtgggcatcggtggagtcgtgggcagcctcaagaagaatctgctgatcctccgggctgatggtcttccagaccttttcgctcatgatcagcacatcgggaatcatggcgtgctggtcaaccgagtagaccttgcagacctcgccgtgcttgccggtggtcagggccgtctcgttattctcggtgccatcgatgatgccggtctgcagcgaggtatagacatcgccgtaggacatggcaacggggataccgccgaggtagctcatcatatcggtctggctcttcatatcctgcacgcggatcttcaggcccttgaggtctgccggggtgcggatggccttgtccttcgtgtagaaggagcgggcgccggaggtgtagtaggtcagcgtgacaaagccgtcctcgccggtcgagaggaagaagtcctgcatctcctgcgagtccatgacatggtagaaatcctccgtgtcattgaaaatgtaaggcaggccgaaggcgttgtaggcctcgttgtaggtggcaaggccgggggcggagaccttcgtcatggcgataacgcccgcctgcagctgctcaaggttctcgttctcgctgccaagctggccgttggggaagatcttgacctgaatgcggccatcggtcttttcgttgacctcctccgcaaactgggtcatggcgatatggacggtgtgggtctccgacaggccgtgggccagcgtaagaactagcggattctgtgcgctgtagcctgcatcggccgtggaggcggatgcgccgcagccggtcagcagaccgatccccagcacagccgcagcacccaaagctgcgatttttttgaacatagctttttctccttcggttttatagtgtgggtgcagacgggtggatggcgggcggatatagaatccgcccctacggaggtgcacccgggttgtttattgtttgtagggggcctttattacatgccaatcaaatcaaactgctcaaaggacacgagcacctcatgatcgtgcttggggttggggtacttgatctgcacgctcttgaggcgctggctgtagtaccagccgctctcggcctgctcaaacttgcggcgatgcaggaagtgcggcagctccttgccgtcaagctgcacatagaacggggacttctcgcggtgaatcatgtcaagcgctacgctctccacggcggtctcatagctgccctcgttcgtgaaggtcacgaccgttttgacgcccgccttgacagcgatcttcgtcttgaggtaagcgccgttgcgatagttgttcgtgcggccgtcatcctcgtacagcgtgaagtcggagtcgatgtccggcgccatcagaatctccagcgcggtagtcttctcggtcatgaggttatgcagggcgttgccgctcatcgggatgatggcaccgctgcgcacaaacagcgggatgctggcaatatcgaccggcacctcaacggtctggccgggggcgtattcctcgcgggtgtagaagtcatagaaccgctcgttctcgttttcggtcttgggcaggtaaaccgggcggacggtctggcccttctcgacaacattggccaccagcagagaatcgccgaacatgaaatcgacaccctcatcgtaggttgcggggtcattctggaacaccgcgaaggtgggctgccagatgggcaggccattctcatgcgcgcgctccatcaacgagtagagcgtcgggctgagcttgtagcggaagtcgatggcatccttgatgtactgctttttgtcgctgtacatccaaggctcggtgacggtgttgtccgtgttggtcgaatggatggagaagcgcggctggaagatgccgttctgcacccagcgcacaaacagctcaccctccggcgcggggccgaagaagccgccgatgtcgcagccgtggttggaaacgccgcagagcgccatgcccagaatcgtggcaatgttgtatttcagggtatcccagcaggtcaggttgtcgccggcccagacctgtgcataccgctggataccggcgtgaccggaacggcagaccgagaaggggcggcagtcggggtcgtattcctcgatggcctcgttagaaagctggcacatcaggttgctcataaccggcttcatcatgccgattgtgctgcccttaccctcaaaatagaccttggcgtccttgtcaacaagggagtcatactcgcagttgtcgttccagatggagcggcagccgtacttgagcagcgcgtccttgatgtactgcttccagtgcaggcgggtggattccttcgtgtagtctacaaagaggccggggccgccccaccatgtaccgacagccagaccatcgagacccgcgttgtcatcggaggcaggcaggaacatgcccttttccttcatctcgtccagcagcgggtggaccagcagcatgccgggcttgatgttgggcgaaaccacaatgccgcgcttttccatctgggcgaaccagtctgccgggtccttgaaccgcttgttgttccatgtaaaggtgcagcgcttgatgccctcggccgtctcgacagcgcagtagccgctggaaagctggaatccgtctgcggggatgccctcctcgcgggtggtgtcgatgaagtccagcaccgcgtcatcgctgttctcgggcagttcggggtagtacatcgagctgccgaggtagccgagcgcagccttcggcagcatgacgctcttgccggtcaggtctgtgtagcgctcgatgatctcgcggatggacgggcctgcgatcaggaacagatcaatatcgcccgcatcggtgcggtaggacgagtagcggtgccagtagttgcgcttttcgcgccccatgttaaaatcacactcggccgtattgtggtagaagtagccgaccgcctgcttcgtgccgcggttcagccggatataaaaaggaatgtgcttgtagagcgagtcggtctccttggcgttgtagcccatcgcatcaccgggggccatattcatgtacttctcggccttgttgatctcgccggacttctcaccgaagccgtagaagcagtcatcggcctcgatctggctcgcatggatgcggcggcggttgctgtcctcacggtaggcaaggtcgggaatgtcggcgtgcagcaggctgccgtccttgtcgtaaaccatgatgcggaagggtgccttctcgatcacgaccttcaggcgcccgccctgaatcacagcctgcttttcgccatcggtcaaaacggcggcggcaggctctacgcgcttgcggcagccctgcatcagggcatcggtgcgggactcccatgcggtcatcgtcaggctgtaggaggcctcatcccagtcgccgtcaaagccggcgcggatgcgcaggatgtcatcggtcaaaaaccagatgcgcagctccacagcgttggtagcaacggaatagtagctgccgcagtctttgacagcgccgccggtgtagcacactttcatagattttcccctttcttcttttgcgttggtcaagtggaaaaagcgttcgtttcggcattgtttgtgcaacactcacaaaattgcgcgcttatttttgtgataattgctactgttgccttatttcgtcattataatatcaaatatacggccaaatttctctgctttttgtagcgcaaatatcgcaaaatgtgatataatcgcctcaaggacaaaatttgtggggaggcccgtgctatgattatacaaaaagtaccgcactatgtagattcccttctcacgcaggagaaggccagctcagccctgcagggcggcgatgtcgtggtagcatggtacaccaaccagctcaacagccagtctgtcgtacactcgcacccctactatgagctgatcctgccggtatcgggcagcagtgtgcggtattccatcggcggcagcgtctacgacctgcacttgggggagctaatcctctttcccggggagatgttccactccggcaagttcaacatcacggcagacacctctgaacggcttgtcgtgcagatcgcgcccggcatctgggaccgcgcttgggcgcagagcgggctgaccgaccatctttggcagggcgagcctgtcatacttgacgccgactcggtcatccggtgggatttccgcggcctgctggagcggatggcacagaccgtccatctggatgagccgatccgcacgacagtccagtgctgtgaagtgaccgagctgattttgctcttcagccatgtgatccacggccgccgcaccgcaccgccgccctccgccacaagcctgctggttgccagggcggttgcctacctgcaggcgaactacacagacccccagctgaatgttgcgcagctggcgcgctacacctacaccagccgggagcatctgtcccgcgtgttcaaggaatacacccttgaaagcgtccacggctatctgaccaacctgcggatgcagcactgccgcaacgcccttgccgccggtatgagcgtgctggacgcctgctctgccagcggctttacgaattacagcagctttgtaaagagcttccgcgccctctacggcatcaccccgaccgaataccgcgcccagctccgcattccggcggcaaagggataagcagaacctataaaaaagcacccccggcagcttatgtttg

SEQ ID NO: 14082 - DNA, 15669 bp, Unknown
  gut microbiota DNA sequence
ttcactctatcggcaggctgatgaccgtctttgcgccctgcgggatattttgcgcaaattctgcttttccgccgtgggcgatggcgatttgctccaccacatgcaggccaaggatgtgcggggcattttcacagggcgcagggtcgtgcatggccgccagcacagcaggcgggtagccgcagccgtcatcggccaccgtcaggtaaaagcagtctcccgccgtttcggtgcgcacggtaatgctcaccggggccggattgtggcggatgctgttgttcaatagattctcaagcaatcgttccagcagtgcgcggtctgcgcaaagcactgcctgctcgctctgctccgattgctccagcgcgatctcgcactgcttttccggcgcgttctcgcaaaactgcgccaccaacgcgcggaacagcggccccgcccggaggctttttctgcgcaggggctgcgcaccgtattccagtttgctggtcaggttcagatcggcaatgagggtgcggagcttttcgcactgggtccgtatgccggtcgccttccgccgggaggccgccggcgtttctgcgtcccgctccagctgctccgcccagcccatgatcagggctagcggggtgcgcacatcgtggctgacccctgcgatccattgggtgcgggcattgtcccgccgggcgagcatctcgtttttggcctgcagctgggcgccggtccggttcagcttttccgccagttcccctgcaaagccattggtaggcagctggacgctctgcccctgtgccagcgcatccagaccgtttgctacggtctccagccgctttgccccccgccagctcagccaaaggcaaagcgccagccccagcagcagcaatcccagcgctgccgccgggaggattccggccatgttcagcacaagctccggcgagctgtacacgctgtaccgccaaaggctccccctgggcagacctataacaaacagaccgtagggttcttcccagcagaacaccgggtaatccgccagataccagcggacaaaccgggcaatttcgccggccgtataggtgtggttcagttccttcggcagctcgtagctccaccggacagcgccggcatcatccagcaccatggcccatgcatagccgtccatccattcctgcggcgtgtgcgctgcccccagcgccagcccgtctgccgtttccaccatagcatctgcaatttcgctggaggcgtattcccgctgcggcagacggcagccctcctgccagcccagccaccccagcagtgcaacgccggaaaacagcagcaaaagcacaacgcctacggcggccaacacataccgccggatcagccgtgcaaaggttttcaaggctccccctcctttgtcagcttatagccgatgccccgcaccgtgcgcaggaaccgcggcgcaccgggttcggtttcgagcttttcccgcagatgccggatgtgtacgcccagactgttctcatagccataataatccgcaccccagacagcatcgcagatggcatcataggtcacgatatgcccccggttttctgccagcttgcgcagcagggccagctcggtagccgtcagcgccaatgtttttccatcgggcaggctgacaacggcatcgttcaggtctacgctgcgcggcccaagctgcaataccgttggttttgccgctgacaattccgcccggtaagcccgctgcagaatatgctgcacccgcagcaacagctcctgcatcaaaaagggctttgtcaggtaatcgtccgcccccagccccagcccgaacagccggtctgcatccgcatcccgtgctgatagaaataacgccggcacatccgctttggcccgcagcgcacggaataaagaaaacccgtccccgtccggcaggttgatgtccaagatcatcagctccggctgcccggccgcaaaggcggcgcgtgcgcctccgcagctttgtgctgtgcggatcttcccatagcctgcgccgcgcagctgctcacacagcagtgccagcagatcggcgttgtcatccacgatcaggattttcgcatcataaatggtgttcacaaggcgtttcctccttttccctccctactataccacaatttttgcgccgcaaaagaggactcccgtaaatttaagcgcaaattaagctatccttccggcaggattaagatgacgggtgtattctggcatcattccgaaaggatcgtgaatgtgaaaggagaaccttgtatgaaacctgtaattgagacccatgccctttgcaaaagctatcacggccgtcttgtagtggatcatctggatctgtgcgtcccggagggctgcgtctatggctttttaggccccaacggggcgggaaaatccaccacaatgaagatgctgctgggccttgtgcatcccaccggcggcagcgtggcgctgctggggcagcccatgaacgagaaaagccgtattccgctgctgcggcagaccggcagcctgatcgaatcgccctccggctacctgcacctgactgcgcgggaaaatctggccatcgttgccgatctgaagggcgttgaccgcagggacacccgccgggtgctggacatcgtacacctgactaaggacgctgaccggaaggtagggcagtattcccttggcatgaagcagcggctcggcatcgccatggccctattgggcagcccaaggctgctgattctggacgaacccacaaacggtctggacccggccgggattcaggaaatgcgcagcctcattgcctcaatgccgcagaccaccggcgccaccgttttgatctccagccatctgctgggcgagatcgagcagatggtggatcaggtcggcatcctgagtcacggcaagctgctgtttgagggttcgctgcagcagctgcaaaagcacagccggggcggcaccctgctgcgggtgctggcagtccccaaggcccttgccgtgttgcagcagcagggggtgacggccgctaggctgaccgaccagccggacacgctgcagcttcccccgctgctggatgacgcactggccgcgctggtccgtacccttgccgaaagcggtgccggtgtcgttgggctgactgcacagaccaagagccttgaggacatcttcctcagcctgacccaaagcagcggggaggtggcgtaacatgacagccttttttacggagctgcaaaaggcccgccgccggcacgaccttgccctctgcctgctgattcccggcattgtcgtgctgtgggtgggcggccttgccccgacagacccggaggagcttgccaacggttacagcgccctgctttacagcctgcccgtcattgaagcgattctgatgccggtgatgatggcggtactggcctcccggctgtgggatatcgagataaagggcaatacccccaagctgctctacactttgcagagccgccgcagcctgtttgcgggcaaggcagtctttggcgtgttggaggtgctgttggtcacggtgctggagctggtctgtgtaccggtgctggggcgcgttcatggttataccgaagcctttcctgcggggcagctggcctatctgttcgtctgcacactgtccgtggattgtatgcttttcttcggcgagtttctgctgatgctgtgggtcggcaatcccctgccggcgctctgcgtaggtattgtgggggcgctggtcgggttgttctctgcctttatgcctcccattgccagttattttgtgccctttgggtactacattcccctgagcgcctacgaagtggcgaactgggacaaggccacccacaccgtcacctacggcacccgccccttcaactgggggctgctggcctttacccttgcgctgggcgcagtgctgtttgcccttgcgtggcgcaaggtgcaggacgaggaggtataaatccatgctgaaacgctgtattcttgcggagaaccgcaaactccacgcatcccccatctgggtaatgttctttgcgcttcccattctttccgccacctacggcaccttcaattatctgcagaatcttgagatcctcaccgatggctggtacagcctgtggacccagcacaccctgttttattccatgctctttttccccgccatggtagccacctatgctgcctacttgtggcggctggagcatctggggcacaactggaacctcatcatggcaagccctgtgccgccgctggacctgtttgccgcaaagtttgcggtggtagcaaagctggcattgctgacccacagctttgtatttgcgctgtttgtgttctgcggtaaggtatttgcccagctgcccggcctgccgccggtcaccttgccgctctatctgctgcgcggcctgctgggcgcactggccgtcattgcagcacagctggtgctggctatggtcatccgcagctttgcagtgcccatctttctgggcctgctgggcggcattaccggcatctttatcagctccaaaggctttggactcctgtggccctattctctgatgcaactcggtatgaactccaacaaaagtgcggatgctttagccggaggctatgcaccgttcgcctttagctgcctgttctggctggctgcgatgttcgcgctggcatggctgctgctgcgccggcaggatgtgcgcgcttaaactgcccgtctatttttattgcttttttcgatttcctattgacaagtcagtttgtttagactaatatagtctatgctaactgttagcgcttgctaactttgtgaaaggagatcggactcatggcagaccagccccggcagttggccgccccgccgcacgctgcagcgcacctgctgcaatatcacgatttgatcgagagcattgtctccgcgctggatgcccgcgatacctataccgccagccattccaaccgcgttgcagacatggtccttgtgcttgcaaccgcactggggctggacccgaacgagaccgcgcttatccatatagccgcccatctgcacgacattgggaaaatcgccgtgccggacgccgtgctgcgcaagaccgggccgctgaccgccgatgaatggcaggagatgcgccgccaccccgtcacaggctataatatactgcgcagggtcgcggattttcaggatattgccgtgctggtcctgcatcatcatgagcgttgggacggccgcggctaccccgatggcttatccgggaccgatattcctttaggctcgcgcattatcgctgtggcggactcgatcgacgccatgatgagcagccgcagctaccgcaccgcgatgaccggcgcggcatgccgctgcgagattgagaaaaacagcggcatcatgtacgatccccgcgtggcaagtgccgcgctggcgcattgggataccctgatcagccgctatgccgccgacacgccccacaccccctattttgaccggctcatgctggagcgcacccgtcagacgcacgactatctggttgcccatcaggacagccgcatcacccttgcagagctggcggctaagtttcatctctcccaaagctccctgaagctttgcttcaaggcgctctatggggtgccggtggccggttatcttcgcactgtgcggatggacacagccgcgcggctgctgcaggagagcgatctgcctgtagcggagatcgcgcaccgtgtcggctatgaggaccccagccgcttttccgctgccttccgccgccataccggccgccgccccacagagctgcgccgcgttgcctgcccgtgcgctgaataaaatccaaattgcacgattcctgtcttttttacctaccattcagatgggcaagcgttgtaaaataattagtaaaccttctgggtttatttgtaaaatccagaccgtataccgtattaggatagtaaaggggaaatgagttatgaattgggcaaagatcggtctgttcgcaggcggcgcactgttcggctccgccggtattgagattttgaccagcaaggatgcaaagaagctgtacacccagtgtaccgccgccgtgctgcgcatgaaggatcaggtcatgaagaccgccacctctctgcaggagaactgcggcgatattctggccgacgccaaggagatcaacgagcagcgcaacgccgatgacgatgccgtgatcgaggacgccgctgacgagaaggccgagtaagctatggcgactcggccgcaagtcggctgcagccgttacacctcggctttgatttgccggttactgcaaaggcttttcccactcgcggagaagcctttttattgttgggagcataattataatgaaatggaacattctgcatgagagccgcgggcgcatccgcctgcatctcaacaagccgcggctttccatggccgaggccgaccagctgcaggcttaccttgccgatctgcccggcgtgcgcgttgccgttgtgtatgagcgcacctgtgacgccgtcatcacctacacgggtgcccgcaccgatgtactgcgcggcgcagccgccttccgctttgatgtgcaggccctgaccgaggtatccgccaacagcccgcgcgccgtaaaccatgagtatcaggaaaagctcgtcaatctgacgcttttccactttgcgcgcaagctgttcctgcctgcaccgatacgctttgcctacacggcggtatgcagtgtgcgctacctttggcacggtctgcgctgcctgctgcaccgcagactggaggtcgaggtgctggacgcactgtccatcggggtatctatgctgcggggggacttttccaccgcaggctcggtcatgttcctgctgcggctgggtgagctgctcgaggaatggacccgcaaaaagtcgctgggcgatctggcccactgcatgtcgctgaatgtggaccgcgtctggcagcttaccgccgagggcgaggttcttgtcccgatttcgcagatccgcaccggggatgctattatcgtgcataccggcagcgtgatcccgctggacggcagggtactggacggtgaggccagcgtcaaccaggcctcgctgaccggcgaggccgagccggtgcgcaaggcggccggtgctgttgtctatgcaggcaccgttgtggaggagggccagatcaccctgaccgttgagcagcaggctggcagaggccgctatgaccagatcgtccggatgattgagaactccgaaaagctgaaatccgccagcgagacccgcgctgcagcgctggccgataagctggtaccctacagcctgctgggcactgccgtcacctatgcgcttacccgcaacgcaacgcgcgctatctcgattttgatggtagacttctcctgtgcgctgaagctctcgatgccgctggcggtgctgtccgccatgcgggagtgcggcagctaccacatcacggtcaagggcggcaagtatcttgaggcactggccaacgccgacaccattgtttttgacaagaccggcacgctgacccatgccaccccgaccgttgtgcagatcgtgccgttcggcacccgcacagaggacgaggtccttggcattgccgcctgcttggaggagcattatccccactcgatggcaaacgccgttgtgcaggctgcttccgcaaggggcatccgccatgatgaaatgcacagcgaggtgcagtatgtcgtagcgcacggcattgccagcaccatcggcggcgagaaggccgtcatcggcagccagcactttgtctttgaggatgagggctgctatatcccgacggcagagaccactaaatttgacgccctgccgccggagtattcccacctgtatcttgccatcggcggggtgctggccggcgtcatctgcattgccgaccccctgcgcgcggaggccgccgaggtgcttcgccagctgcgcggccttggcatacaaaaggcggtcatgatgaccggcgacaacgaccgcacggcctccgtcatcgcaaagcaggtcggtgtggatgcctactatgccgaggtcctgccagaggataaggcccgctttgtcgatgctgaaaaggccgccggccgcaccgtcatcatgctgggggacggcatcaacgactccccggccctgtctgccgctgatgtcggcattgcgatcagtgacggcgccgccattgcgcgcgagatcgcggacatcacgattgccgccgacagcctgcgggagctggtgacactgaaagccatcgccaacggcctgcagcaccgcacccgcgccaactaccgctttatcatgagcttcaacagcatgctgatcgtgctgggcgccatgggcattctgccgcctgcgacctccgcgctgctgcacaatgtctccaccttgggcgtcagcctgaagagcatgacaaacctgctcacttaacgaataaccggctgcatcccggctgcccagcagccgggatgtttcttttccgccttaccccatgtaaaaaactggtataagcgccacaaaaatccttgcaatcaatgtgtctaagtgataaacttataacattctttcataataatcgaaggaaagcgatacaaaaagctgaaggggaaaattcagatgatgaacaaccatttccggtgcatggcgcttcgggggctgagccttttcaccgcagcggccctgcttaccgcctgtgctgccagtcaagccgctgcacctgccgccagtgagtccacggcagatgaggctgtcacctttatggcaccatacctgaatgtcgaggcctttatcgacaaggtccacagcatctacccggaagtgaatatcgagatcgttccctacagcggtgacaacacgacctcctgcatccaaaatatgatcgaggcccatgacctgccggacatctgcaccgtcacggtctataacccgatgaccgatgacatgagcgaccagctcatcgaccttgcgggctatgatttcaccgacaattacattgaatcccgcctgcaggaggtcacggacaacggtgccatttatctgctgccctcggtctacaactgctacggcatcacctacaacaagacactgctgcagcaaaacggctggacagtacccaccagctttgccgagctggagcagcttgccgaaaaggctgaggctgcaggtgtggcgctctgcctgccgcagagccagtaccccggctatgggttccaatatatgtgcaacattgccgatgcagactttctcggcacgctggacggcaaacgctggcagaaggattacctgtccggcaaggccaatgtcagcggcacgccgggtatgatgcaggcgatggcgtatatccagaaatggcgggacatcggtatgctgaacggtgacggcgaccccaccagcgacgaggtgacccgccagcgaatgatcaacggcgacgccctgtttttgctgggcagcaccaacggcattgtggaggcagacggcacccgcgacaagtttggcctgatgccctacctttccgaggacggcagccagaatgtctttgtgctgagcgtgaaccgctatttcggcctgaacaagcggctggagcagaacccccaaaagctggaggatgctttaaaggtcatgcgtgtgctttccaccgtggagggcaccactgcactgtaccccgaaaccaaagtcaaaagcagcctgatgccttttaagaacgccaaagcgaacgacacctattacaccgacattgccgatgcgctgaacttcggcagcacagcaccctttatctactccgggtgggagaacaccattgtgaccaccggcaacaagatgctggactttatgcgcggcgatgccacgatcgacgaagtcatcgcccagcaggacgctgatcaggataaggtcgtaaacaacacgcccgatcttatcaccaccgcggctgaggacatcccgcaggaggattgcgcccggcttgtgggacgctgctttgccgaggccaccggcagcgatctggccctcgtctcgctggggacatggatttccggcaaccccactgaacagaaccactatggcgtcagcggcaagctgtacgccaaggggctgactgactacgatttgtcggtcattttgcccacaggctggaatcgcaccatacagaccgtgacgctgaccggcagccagatcaacgacctgctcaccgagggctacgatgcctacggcaacggaaaatgctatccctatgtgctggtaagccccgccgccgtgcaggaggataagacctatcaggtcgccatctgcggtgtcagtgacaagctggcggccgaggctgaggttgcggattccggcgtagtgggcatggacgctgccaaggcgtttttcggctcctttgagacgctgagccgtgcaaacgccgcatgggacgaaacggagccgcaaaatgtggaaggataaaaaataccgccgcatcctgctggcctgcatcttcgccagccttgcggcagtcgcgggcttctttgtcctgagccggacctatatcaaaaatcttgtctataaagaacgcctgaaccagatggaggagatcacccaccagatgttccgcaatctggaggatgttattggcaaccgttgggcagatgtcgatgtgcagtgcaactacctgattggcaccgacctgcagaccgacaccgacctgtatgcgtatctgcagcgggtatccgccctttccaatctggaagaaaagcagatcaccctgctggccgttgattccgccgggcggtattacacccagcagggcagccgaggtcttttgcgggagatgcactaccttgaggacgacccggaatgggtcaactgtgttaccaactcgctgacggaaagcgattcccgcatggtattcttaaagcggttggatactcccatcacactgcaagccggcacagcgcaaatcagcctgcgctactacggcattgcgcagagcatggagcagctgaatacatacttccgctgtgatgcctacgatgaccacaacagcgtgtatgtgctggaaaacaacggcctcaagctgttcaacagcaataacaccgagctgctgaagggtcagaatgtctacactgtgctttcgcagatgtcctacctgcacggctcgtcctttcagcaggcaaaggcagagctgcaagaaaacggcgtctgctactccaacgccgttctggacggcaccgagtatttttactccctcaagcagatgaaaaacgctgcatggacgctggcgtttctggttccggcagatgatgtcgccaccaacacgcaaaagctggtagatttggtgaccgccatcattataggctttgccactgtcttttcactttccaccattctgattctttggaaactgcaaagggatatgcagcgcgatgccctgcaggccgagcaggagacaaatctgcgtttggaaaactacaaccagcagcttaccgcgcgcaatgccgagctgaagcgcgcgcaggaggttgctgtggatgccctgcagggtgccgagcgcgccagcaaggccaagacagatttcctgtccaacatgagccacgatatccgcacaccgatgaatgccatcatcggcatcaccaccctgatgaaaaacgagctgcacgagccggacaagctggctgagcatcttgaaaagctggaaagctccgggcggctgctgctcggcatcatcaacgacattctggatatgagccgcatcgagagcggcaagaccaccctgaacatcgagcagatggaccttctgcagcagatcgagcaggtcgagagcgttatcagcgagcaggcccaccagcgcaatcaggaatttcgcgtggtcacgacctcggtacagcatgagcatgtgctggccgaccccaaccgcctgaaccagatcttgatgaatatcctctccaactcggtcaagtacacgcccgcaggcgggcatatccggcttgaggtcgaggagcttccccgcgatgcgcattacgccaagtacaaattcatcgtgcaggatgacggcatcggcatgagtgatgcctaccagaaaaccattttcgaccccttcacgcgggaggaaaaatccggcaccaaccatgtgcagggtacgggactgggtatggccattaccaagagcgttgtggacctgatgggcggtgtcatcagcgtggaaagcgcccccggccaaggctcccgctttgaggtcgtgctggaatttcccattgataccgaggctgcccttgtgcagaagccggagaccgatgatgcaccggcggacaattccctgctgtgcggcatgaagttcctctgcgccgaggacaacgagatcaactcggagattctgcagatgctgctggaatccaagggcgcgacctgcaggatctaccccgatggtcagcagatcgtagatgccttcgccaaggtaaagccgggcgactacgatatgatcctgatggatgtgcagatgcccgtcatggatggtctggaggccacccgccgcatccgcagcagcgaaaatccgctgggcaaaacgattcccatcctggccatgacggccaacgccttcctggaggatatgcaaaagagcaaggaggccggcatggacgagcatctctcgaagcccgtggacattgccatgcttgagcaggtggtgcggcgcttccgcattacccccccccgccgataaatagcggccgggcgcgctttatgcgcagcgctcccccgccctcgccatttgccgccaaaacaggcgcactgtaaaaagaaagccgagcagaaaccgcccttccgggtgacttctgctcggttatttttatcgcttacggtgccatgcggcaggggcgcatggctctgctcaggtgcgcagcagggtgccgcgcagactttccagcgcggcaaggcgtgcgctgatggcaaacaggctcgcggcatgggtcaactgctcggactttgcatcaaacggaatgatgcgcgccagcaccgtgctgtggtccacagcatcaaaaaggacgcccgccctgcggcaaagctcgactgtgcggttggcgcagcccggcatcgtgcataatgcagccacggcatcctccgcaggcgtggggcgtgccgcgccggtatcgctaagctccttacccagcaccgtgccgaaatgctttgcagcccgccggttctcgcaccgtcccagcagggggtcctcggcacgcatgtcaagctccatcggttcgcgcatgtagctgctataccgctgggtcaggcgggtgtattcccgctgcaattccttccgggtcagttctgtatactgcatacttttccactcctctacctcatctgcatcgcctattatacgcagaaaagggctctgtgtaaaaagtattttgtatatatcagacatgtatagttcacatatcaggccgtaagcgccacgggctttccgcgatcgggattccctctactgccagcaggcgggcctttgtatccagcccgcccgcatacccggtcaggctgccgtctgcccccacaacacggtggcagggtatgatgattgagatcgggttgtgcccgacagcaccgcccaccgcctgcgcggacatcctgcgctggccgtgcttttcggccagccgggcggcaagtgcgccgtaggtcgtggttttgccgtaggggatctgcagcagcagcgcccacacctcctgccggaaatcagacccgaccggatggagcggcggcgtaaagtccggtacactgccgctgaaatagggatccagccagcgtctggtctgcgccagaatcggcgtttctgcgtcctgatgcaccgggtcaagtccctgcgcaaagcggcgctggccctcaaaccagagtccggtcagcccaatttcgtcagccgccaaaagcaacctgcccagcggcgattgataatagcctgtgtacagcatagcagctcccccctactgctcagacagttttcgcctttttaccgcccggtctggcgggtgcatagtcccgcatacccggaatcgcaccgcccgcaatggcccatagatacaggctggccacactgccataggggctgtagcgacgccggtatttttcaaacagcctgcggtcgattttgcggtgatgatagagcatccgcagcccgcgctgtatcgcaaggtcatcgtagctcagaacatcaggccgctgcatacaaaacagcaggatcatctctgccgtccagacgccgatgcccttcagactgctcagcacccggatgacctcctcgtccggcatctgccagatctcctcgatgcggcactccccggtctgcaccctccgggcaaagtctgtgatatactccgccttgcggtaggtaatgcccagcttttgcagctggggcacccccgccgcaaggatatgcccggcgtcaacggtgccaagggtctgctgcatccgctgccagatcgtttcctgcgccttggtggaaatctgctgcccgacgatctgatgcactgccgatgaaaacagatcgccgtccaccgcgcggtcaatatggccgatctgctcgattgccacaccaagccgcttgtccttccgggcaaggtattcggtttcctgcgcgccgtattcaaagtacatcacagtacctccctgctgccggccaatcgctcaccaatttgccgggtgccttttataagcgccgcttacacccgcaccagctcgtattcctgcgtaccaaggccgagggcttcggccacatcgatcgtgtgggtgccgtggcggctgttgacgcgctccataaaatgctcgcggccggggtcgttgctgttgcgcaccagatcaatgcaggcgcggtccagcgcgaccgggtcaagactggacaggatacccacatcgttcatgcaggggtcctccgccactgcacagcagtcgcaatcgaccgaaaggttcttcatgaccgccacataggcgatcctacctgcaaagtgctttgccacggtggaggcggcatcggccatagcctcaaggaaggtgtcctgctcggccgtgttctcccacagaatattctggtcggtgaccttaccgccggagtggatataggccttgcccgcgctggatgcgcagccgatggacagctgcttcagcgcgccgccgtagccgcccatcgggtggcccttgaagtggaccagcaccagcatactgtcgtagttttcaatattcttacccagatagttgaccttgagcaccttgccgttctcaaccggccactgcacatcggggccctcggcatccataatatcgacatcaaacaggtcgctccaatgatgctttttcatcagctcaatatgcttgggcgtttcgttgcgggcgccgccgtaggcagtgttgcactcgaccaccgtgccgttcacggcatcaatgaccggcttcataaactcggggcgcaggtagttctggttgccatcctcaccgctgtggaccttaacggccaccttgccgggcagagcaacacccagctggcggtacatcttcacgactgcctctggggtaagctcattggtaaaatacacggttgctttttccatagaaggtttcctccctgtagtagcccctgcaagaaaaggcgcaccgcctttgcggcacacccaaagcacatattctgttacttattatagcacttctcttgcgctgtggaaagccagttgttgctttattttgccttccaaggtatagtcgcgagaaagcctt

SEQ ID NO: 14083 - DNA, 761 bp, Unknown
  gut microbiota DNA sequence
gtttatactactaaatccttttactttaagtatccacctcacgccccggagcctgaacgccccggggcgtttttgcatagcataaagaggggtggtggtatgcggcgttgtacagcagcagggcggtgcagggcaaagcggcgcagccttgtgtggctggctgcagcagtactgctggcgggagccctgcatataaaccgctatgtcaacaccgtcatcaagcccaccctgcacgagctggccgaatacgaagcccgcgccgccaccgtacaggctgtcaaccgtgccgttgctgcagagctttcacggcggcctgcactctgcagcacactttttgccgacaacggcggcatcctctatctggatgccgcgcgtgccggcgctgcgcaggcatcgctcatcggcgccgtacagtctgagatggacgccttgccggagatttcctaccgtgtacccttcggcagtctgaccaacaattccctgctgagcgggcttggccccggctggccggtacagctgcagccgcagggctatgtgcagggagaaatccggcagactgcagagtcactctcaatcaacacaacccgctactgtgcggttttacatctgtccgtcaccgtaaatatgattttggacggcagcaccgctaccctgaccgtggagcagacctgcccgctcgtcagcctgcttgccggcggcgagattcccgatgtgtatgcgcccgggcaggattgaatttgcactcgaaaatgtggtatact

SEQ ID NO: 14084 - DNA, 18824 bp, Unknown
  gut microbiota DNA sequence
aaacgcgcggaggaactgcgcgtcatcatagaaaaaaacaaccgcttatactacgatcaggacgcccccgagctggaggatttcgagtacgatgccctgaaccgcgagctgaaacagcttgaggctgaatatcccgcgcttgtcacggcggcatccccgacccagcatgtgggcggcacggccagcagcaaatttaccaaggtaacccacaccgtcaagatggaaagcctgcaggacgccttctcctttgatgagctgcgcgagtttgatgcccgcgtgcgggacgccggtgtaaagcccgagtatgtggtcgaggcgaaaattgacggtctctctgtcagccttgagtaccgcatgggccagctggtgcgcggctccacccgcggtgacggcgtagtgggtgaggatgtgaccgagaacattctgaccatacgggatattccccatgagctgcccgatgcgccggattttctcgaggtgcgcggcgaggtctatatgccgcactccgccttcttcaagctgaaggagcagcaggaacttgaggacaaaacgccttttaaaaacccccgcaatgcggcggccggctcgctgcgccagaaggatgccaaaatcaccgccgggcgcgggctgtctatctttgtattcaacctgcagcagtgcgaggggcgcagcttcaagacgcaccacgaaacactggattacatcaagtcgctgggattcccggtctcgccgcgctacagcgtgtttgagaatatcgaagatgcgatccgggagatcgaggccatcggcgaagcgcgcggcacgctggaatacgatattgacggtgccgtcatcaaggtcaatgatctggctgcccgccgcacaatgggcagcacaaacaagtttccacggtgggccattgcgttcaaatatccgccggaggtcaaggagagcgttgtgcgcgacatcgaagtcacggtcggccgcaccggcgtgctgaccccgactgccgtgtttgaccctatctttttagcgggcaccagtgtgtcccgcgccagcctgcacaacggcgatattatcgccagtctgggtgtcggcattggtgacaccatcaaggtccgcaaggccggtgatattataccggaggtcatcggcgtgtcggcccgcctgccgggcagccgcccctttgccatgcccacaacctgccccagctgcggcgcacctgtcgtgcatctgcaggatgagaccgccctgcgctgcgtcaaccccgagtgcccggcccaaagtctgcgcaatctgatccactttgcctcccgcaatgccatggccatcgacggtctgggcgaggccgtggctgtgcagcttatcgaaaaagggcttgtcaccaccgtggcagacctgtacaccctgagcgaggagcagctgctcacgcttgacaaattcaaaaagaagagtgcccagaacctgctgaatgcaatcgagcactccaagcgcaacaatctggataagctgatcttcggcctcggcatccgcaacatcggtgacaaggccgccgccctgctgggcgagcatttcggcagcatggacgcgctgcgccgcgccactgctgagcagatgtgcgaaattgacggcttcggcgaggtcatggcacagagtgtgctggagtttttcgccaaggacggcaccaccgaccttttgcagcgtctggagcgcgacggcgtgaacatgcagtggaccggcaagaagaagggtactgcactggcaggcatgacgctggtcgtcaccggtacgctgcccaccctgtcccggcaggaggcagaggcgctgatcgtccaaaacggcggcaaggctgccggctccgtcagcaagaaaaccagctatgtcgtagccggtgaggcagccggctccaagctgaccaaggcgcagacgcttggcgttccggtgctggacgaggccggtctctacgcactgatccgggaaaaatccgaataaccgttttcattctatacgctgttcctttgcagggcatcccgatgtgggatgtcctgttttttatgcggtgccgtcccggttctatccgcccgcagacgggcatacagtggcagtgtgaggtgaagaaacgatggacgagtattaccgcatccttgaaagccttccgcctgcgctgcgcacaccacttggcaggctggatgcccgctgcgcaccgcatatacaggagatccgcctgcggttggggcagccgatacagtttacgatccgtgggcggctgtgccccgccgcaaaattcctgccgggtgcggggttacccgctgcaatgggggcggacctgctgcaggactgctttctgcagctttgccgccgttcggtctacgcatacgaggacgagctgcagcagggctatttcaccgtgcagggcggctgccgcatcggggtagcaggctgccgggggccgggcggcttttctgccgtcacctcgctgaatctgcgcatcgcacgctgggtgacctgcccgctgccgcccgctctggaggaggccgtggccgcccggaccgggggactgctgctggccggcccgccgggcagcggcaaaacaacgctgctgcggtcgatcgtacagcggctttgtgagagtgacgccctcgtcagcgtcattgacgagcgcggcgagctgatggcctgtgagaccggcagcctgccccgtgccgcacaaatccgctgcgatgtctacgcccgctgcaccaagccggagggcattgccatggcgctgcgctgcatgaacccgcagatcctcgtctgtgatgagctgggcacggcggaggacgcacaggctgtggcgcagggggttgcctccggtgttgtgttttttgccaccgtacactgcgataccccggcgggtctacataaaaagccccctctggccgcactgctggccacaggtgcctttgcaagggccgcttttttgtctgggcgtgcccaccccggcaccgtggcacagtgggtcacgctgtgacagcgctgctgcacgctgcgggcggcattcttctgctctgcgcaggcacgggctttggctttacggcggcagcccgtatccgggactgccagcggcagctgcacagcctgtcccggctgttcggctatctggcagagctgctcaacgcgcaggcgcttgcagggccggagcttttgcaccgcgcagcgcgccgcccggaatttgcagatttctgcccggcgggtgctgcagctctggcagacttgcagtttccgtcctgcctgcccgagaccctgcggtgcgaagccctgcagacgcttcgcagcgctgaggaatccccgcgcctgaccgcctgtgcggcgctgcacaggctggccgcactctgcgaggaggaggcctgcagccgggcagagcagtaccgcgccgcccggctgctttggccccggctgggggcctgtctgggcgtactgaccgccattttgctgtggtaaggagtggcctcatggacattgaccttgtttttaagattgcggccaccggcatcattgtggccgtattgaatcagctgctcatccgctccggccgggaggatcaggccatgatgacgacgctggccgggctgatcgtagtgctgacaatgctggtgcggcagatcagcgacctgtttgttttgatcaaagcattgtttgaactatgacctatgatcttattatgcaagctggccgctgccgtgcttgtggcggccgtgttgacgctcctcttaaaaaaggaccagcctgcctttgcgcttttggtctcggtatgcaccgccgccgggctgctcgctgtggcaatgcgccagatcgagccgctgctcgattggctgcacacgctggagatctactttcaggggcagagcccggccgtgctgctgcgcgccctcggcattgcgctggtcgcgcagtttgccgccgacacctgccgcgaggccggtctttgcgcggcctccaccgccatcgagctctgcggccgtgtgctggttcttttgcaggctctgccgctgctgcggtcgctgctcggctcctttgcggactatttgcaataattttcctgttggcggttccgccccctgcctatgcggacgagcttccgcaggaggtgcaggacattctgcaggacagccccgcggacatcaccgatgccgccggatggactcttgccgacattgcagcgctgctgggggactggatcgtcagcggctttcagcccacactgcactttgcggcgcagtctgccgggtatcttttgctggcagggctgctggggctgctggtcggcaggcccgccggcgcttatgttgagatccttgccgtgctgggctttggctcgctgagtctttccaccgcgatacagctgactgcgcttgtcggctcgaccgcacaggattgcagcacctatctgaccgcctttgtgccggtattcggcggtgtggctgccgcaggcgggcagacctccggggcgctggtctacagcgggatgttctttgccatgtcaggctttctgtgtgcggtcatccggaagctgctgctgcccgtcatgcagatatacttttgtttttcggtctgtgcctgtctttggggcaaccggggcatcaccgatgccgctgcgctgtttgcccgctgcatgcactggctgctcaaggtctgcggggcactgttcagccttgtgctggggctgcagaatacgctggccgccacggtggacaatgccgctctgcggaccggcaagggccttttacagggcgcgatcccggttgtgggggatgccgctgccgccgcactgaccggagcggcagcggcgctgcagctgctcaaagggtcccttgcactggctgggctgctggcgctggcggcgctctttgcgccggtctttctgcaaagcatcgcctatacgctcgtctttgcggcagccggtgtcattgccggggctaccgggcaaaagccctgcgcccagctttgccgactgtactttgagggggcacgcctctgcggatcggtgctggtgctttatttttttatgatctttctgtccacggcgctgttgctgctggcagggaacgggggatagcatggaatcattccgccatctggcactgggctgctgcgtgctgtcggcactggcgggcatgctgcggcttttctggccggacaacggcttcaaatccgtcataaatgccgtgctggtgctgtatattttaacagcgggtatccagatgctcggcggtattgactgggacagcattgtgctgacgctccgcagcctgccttccgggcagagccgcccctccgctgatttctcggcctacagccgcgagcttggcctgactgcctctgtggaggctgtacgggaagtcctgcagggtgcgggcatccgcgccgccgtcagctggcaggacggcagatgcgtcattacaccggtagacatccgcgaccgcgccgcgatagaaaccctgctggccgtcaacgccggtgacctgccctggtgcatagcggagggcacaccatgaccgcccgggagtatatcgccccgctggccgcaaggctgcgcaccgcgctggctgatgaaaagcagcgcgtcaatctgctggcctttatggggctggcgggtcttgtgctgttggcggtttccgcctggctaccggcagacgatgcggcgcagcccgcccccgccgctgtgcaggagacggccgccgactacgccgcccagctggaaagccgcctgaccgcactgatccgccgtgtggacggcgcaggcgataccgccgtcatggtcacgctggaatcaggcagtgagagcgtctatgcaacggacacggaccgtgatggcggctccacccatgtgcttttgggcagcggcggcgcggacggacttgtggagaccgtgcagacaccccgcgtgctgggcgtagccgttgtctgtgagggcggcggcacggcagcggtacagaaccgcgtgaccgcgctggtggaggcactgaccggcgtaggcgccaaccatatcaccgtagcaaagatggcatcaaccaacaaagaggagggcaaaccatgaagcaacttacagccaagctgaaaagccgcggcaccacagccgctgtcctgacactggcgctgggggccgccgtatatctgaactggtccttctcccgcggggcaccgcccagcctgcttgtatccaataccactgccgatgcggtggagactgccgctgccgcccctgtcaccgacccgttggccgtagaagcctctgcgggcgctgcggacgcagaggtttccgccgttgatgacgccgacaagaactacggcgaagcacagcttgtcagcgtaaatcaggattccggcacagagttttttgagtctgccagactgacccgcagcaaggcccgtgacgaagcgctggacaccttgaagaagtccctcaaggatgccggcctgaccaaggaggaaaaggacgccctgaccgccgagctgagcgcacgcatcagtaacatcacactggagacaaagctggagaccctcatcaagtcaaagggctttcccgactgcgtggtcaatctggagggcagcaaggccaatgtgaccgtcatgactgaaaatgatgcgctgacagccgaggaggtcacccgtgtccgggatgcgctgctgagccagtgcaagggcctgaccgcacaggacatcaccattgtggaagtaaaatagcgccaatattttgttgcaaacagccccgttttgtggtacactgatttatattagtagaactatggccaaatggccgtttgcaacgggagggtacacactatggatgtacacaataccatcggcggcagcttacagatctcgactgaggttatcgcaaaaattgcgcgtctggccgcgctggaggttgacggcgttgccgatgtagccaccggcaccagccagaatgtccgctcgcttctgggccgcaccggtctgcagaagccggtcaccgtcgtcatggaggacggcattgccaccgtgacggtgcatatcaccgttgtgtacggcaacaaggtcatgccgctgtgcgaaaaagtgcaggagaatgtcaagcaggcgatccagaacatgacgggcattaccgtggcccgtgtggatgtgctggtcgtgggcctgacagagacccccgccgagaaagaataagacaagataaggaaagacaggaactttgagtatggagaaaaagctgacccgccgcgaatcccgcgagacggcctttctgacggccttcgccgctacctttgagcccgaggagcccaccctccctgcggaggagcaccccgcgcccgatgcctttgcaaaccagctgctggctgccatgaacgaccatgccgccgagctggatgagatcatcaccgcccatctgaagggctggacgctgccccgcgtaccccgtgtgagcttggttgccctgcgccttgcgctggccgagatgctctacggcgaggagcagaagcccggtgttgccatcaatgaggccgtggagctggtcaaaaaatacggtgccgaggatgactaccagttcgtcaacggccttttgggtgccgttgcgcgtgagcgcggcgagaccgatgaacccaaatgctgacgctgggcattgacaccagcaattacgcaacctctctggcagtgtttgacacagacgccggagaggttgtttgcgattgcaaaaagtttttgcccgtgaaagagggccagctgggcctgcgccagagtgacgcccttttccaccacacggcggccctgccggagatgctggcagagctttccggcaaggctgatttgaccaaggttgccgccgtcggcgtttccgccaagccccgcccggtcgagggctcgtatatgccgtgctttctggccggtgtcagtgccgccacggcgtttgcgctttcccgcgcgctgccgcttgtgcagctgacacatcagcaggggcatattgcggcggcgctgtacgccacgggtcagccggagctgttcaatcaggaaacactggtgttccatgtttccggcggcacgaccgaccttttgctctgccatggggctgagcgcatcacgccgctgggcaccagcagcgacctctatgcagggcaggccgtggaccggctgggcgtaaagctcggctatccgttcccggcgggtgtctatgtcagtgagcaggctgccctctgcaccgaaaaagtccgccccagagtcagcgtacacggcctcacctgcagcctgtccgggctggagaaccagtgtacccgactgctggccgagggacgcgatgccgcgtatgtctgcaaatactgcctgctttgtgtgggcgaaacacttgtgcgcatggccaacaacgcgctggccgagcatccgggcctgcctgttgtctttgcaggcggcgtcatgagcagcgatctgatccgcacctatgtgacaaaccgcataccgggggcgcattttgtgccgggccggtttgccagcgacaacgccattgggatctcgattctggcggcaagggagtgtggcgcatggccgactacatcaatgtaaccagcctgaaccgactggccagacaggtattagcccagtgcgaccccctcaatgatctgatcgtctgcggggaaatttccggctttacccgccattacaagagcgggcatctgtatttcaccctgaaggacgaaaacgccagcatcaagactgtgatgttccgctcacaggcgcagcttttgaactttgaaccgcagaacggcatgcaagtgctggtctacggccgtgccacgatttatgagcgggatggtgcgttccagctgtatgccgattatatgaagccgttcggcgcaggggctgcccagatggcttttgacgccttgtacaaaaagctggaggccgagggactgtttgcccccgagcgcaagcgcccgctgcccgccgtgccgcggtgcatcggggtcgtgaccagcaagaccggtgctgcctggcaggatgtgcagaatgtcatccgccgccgctggccgatggtaaagctgctgcttgcccctgtcagcgtacagggcattgaggccgagaaaagcattaccgatgggattcggcggcttgaccgcgacccgcggcccgatttgatccttgtgacccgcggcggcggcagcaaggaggatctgtgggtctttaatgcggagcgtattgcccgtgccgccgctgcctgccgcaagccggtggtctccgctgtcggccatgagattgacacctcgatccttgactatgtggccgatttgcgcgcaccgaccccctctgccgcagcagagctgtgcgtgcctgaccagagcgatgtccggcagaaaatattcattttacagcaaaatattcaaaaaaatatacagaatcgctgcaaactatgctataatagatttgatcagcttgccaccgcccagctcctgcagcgccagcaccagcagcttgcccgccgggaacgggagcttgccggcctgcaggccgctgtacagcaggctgcgcagcaccgcatgcaggacgcacagcgcagcctgcagcacgcggcatccgtggcgcaatcgctgagtccctacgccgtgctggcccgcggctatacgctgaccgagcgcaacggcgtaccctgcagtgtagaggcactgcaccccggcgaggccgtcaccctgcgcggtgcaaaggccgccgccgaatgccgcatagaagcggtgcataatttggaaaaacagacaggggagtgatgcccgatgaagcagccaaaatcctttgaggagggcatggagcgcctgcagagccttttagggcagctgcaggacgagtccacgccgctggcggattccgtcaagctgtatgcggaggccgccgggctgatccactactgcaatacagcgctggacaaggccagactgcaggtcgaggaaattgatgcaagcctgaccccgaacgcggaggtatcccatgaagcatgaggaatacaaggaacagttttatgcttggacgcagctgaccgagcagcgcctgacggaattgtgtgacgcctatctgccgcagcaatccgagttgggccgggctgcacgctacagcctgctgggcggcggcaaacgcatccgcgccgtgctgacgctggccgcctgccagctgtgcggtgccgatgccgccgatgcgctcgactatgcctgtgcgcttgagatgctgcactgctactcgctcattcacgatgacatgccctgcatggacaacgatgatttccgccggggacgccccagctgccataagcagtttggcgaggcaaccgccctgctggccggtgacgcccttgtcacagcagcatttgaggtgcttgccaacaccggtttgtctgccgaaagccgcattgaggcagtccgccttctctcccggggcggcggtgaccgcggcatgctctacggtcaggagctggacaagcattttgagacggtgcgcgcaagcgaacaggagctgatggccctgcacgcccacaagaccggtgcgctcatcacgaccgcagtgcatctgggctgtgccgctgccggcgttgctgccgataccgatgtgcgcggcgcgctggcccgctatgcggcggagatcgggcttgttttccagatcattgacgatattctggatgtcacctctacgacggaagaattaggcaagcccgtcggcagcgatgctgacaatgacaagaccacctttatcacgctgtacggcctgcagggcgcccacgaaaaagcggagcgccacaacgccgcagcgctggccgcgctggatgcgcttggccccaaagcagactttctgcgcctgctggctgcggagctgctggaacgtaagaaataaggatgtgattcctatgccactgctgcgcgctgcgctgagttggaattttgtgctggtaacagcggtctgtgcatcgctgctggcacagcttatcaaagtgctgttgaatctttttatcttccaccgcttcatcgccgagcgtatgtggggggcgggcggtatgcccagctcccactcggccaccgtctgcgccatggttgttgccaccgggcggtactgcggtgtaagctcgcccacctttgccatttcggctgtgctgtccatcatcgttatgtacgatgccatgggtgtgcgctatgagaccggcgagcaggcaaaggttctgaaccgtctttttaccgaatggatggaccaggggatcgagcagtttcagtttccccatggcaaaaagctcaaggaaatggtcggtcatacaccgatcgaagttctgaccggcgcggcgctcggcattgtgctgggctttgtcatgccgatggtataaaaacgaggtgcgtatatgagctatcccttgctggagcgtatcaatgcgcccggagaaattaaaaatctgcccgcagacgagatgcccgccctgtgcgaggaaatccggcagttcctgatcaaaagtgtttccgagacaggcggccacctgtcctccaatctgggtgttgtggaattgacggtcgctttgcaccgtgtgctggattttccgcaggacaagctgctgtttgatgtaggccaccaatgctacacccacaagctgctgaccggccgccgggccggttttgcgcagctgcgccgcaaaaacggtatctcgggctttcccagcccggaggagagcagctgtgacgctttcatcgcaggtcacggcagtgctgcgctctccacggccatcggcattgcccgggccaaaaagctcaaaaacgagccgggcaaggtcgtggtcattgtgggcgatggcgcctttacgggcggcatggtctatgagggcatgaataatgtcagcaagctgaacaatctgatcgtcattttgaacgacaacaagatgtcgatctccaaaaatgtcggccaggtggccaactatctgaccaagctgcgcaccgacccgaaatactcccacgtcaaggcgcatatggaaacggtgcttgagcgcatcccggtcgccggcgatgccatggtcaaggtgctgcagggtggcaagcagctgatccgccgcggcatctacaaatccacgatgtttgaggagatgggcttccagtacatcgggccggtgaacggccatgatgtcgatatgctgacccacaccctgaccaacctgcgcgagcagtatgcccccatattcctgcatatcgtcacccagaagggcaagggcctgaagcctgccgaggaaaatcccggagaatttcacgccgtatcgtccattgatctcaaccatctgaccaaccccgagctttcgccgaaggactccttttcctcgaccttcggctgtgcgctggccgatctgggcgatgacgagccgcgtctgtgcggcatcaccgccgccatgaagtacggcaccggcctcaacttcttcaagcaccgccatcccggccgcttctttgatgtcggtatggcggaggagcatgccgtcagctttgcggcaggtcttgccagtcagggcctgctgccggtcgttgcgatctattcgaccttcttccagcgcgcctatgatcagatcatccacgatgtaaatctgatgcagcttgatgttctttttgccgtggatcgcgcggggcttgtgcccggtgacggtgccacccatcagggtatttacgatgtggcgttcttctccaatgtaaatatccctgtgtttgccccggccaactatgctgagctgcgctactggctgacttatcttgtgcgggaggcccgcggcccccgcacgatccgttatgcccgcggggaggagaaccccgcgctggctgcgctgccctgcacaggcaagcgctttgacctgttggagcctgccgccggtgcgcgcatcgcactggtcagctacggtgccgagacggaggagatcattgccgcccgcgatctgctggcccagaacgggcagcaggcagactgtgtaaagctgacccagatttacccgctgcccgatgggctgtgcgatgcacttaagccctacgacacgatcctctttgccgaggattccgtgcggaccggcagcattggtgagcagctgggctttgccttgcagcaatgcggctggcagggccgctatctgctgcatgcggtggataacacccatctgctgcacgccaatgtgcccgagctgcgcaaggatcagcagctcgatgcagccgcgctctgcacggatatactgaaccatttaaaggagaagcaggcatgagcaagattcgcctggatcaatacctgtgccagaacggtctggtgcagagccgtgagcgcgccaaggcgcttatcatgtccggcattgtctttgtcaatgagcaaaaggcggacaaagccggggagatgatcgcacccgatgccaaggtcgaggtacgcggccacgatatcggctatgtcagccgcggcggcctcaagctggagaaggcgatgcaggtctttcccatgcggccggacggcaaggtctgcatggacatcggtgcctccaccggcggctttacggattgtatgctgcaaaacggcgcggtcaaggtctatgccgttgatgtcggctacggccaactggcatggagtctgcgcacggacgagcgtgtcgtcaacatggagcgcaccaacatccgcaatgtaaagctcgaggacttgtcagagccggtagcctttttcagcgtcgatgtttcgttcatctctctcaagcatattttcccggtcgcagatacgatctgcacgccggaggctgtcggcgtatgcctcgtcaagccgcagtttgaggccggccgcgaaaaggtcggtaaaaagggcgttgtccgtgacccagccacccaccgtgaggtgctgaagatggccgaggggtacgccatggcaaaccactttaccccggcaggtctggatttttctcccatcaagggacccgagggcaacattgaatatctgctgtatgtccagcactgtgagaccccgcagccgctgccggacggcctgattgaaaagatcgtggcagcctcccacgagacgctggataaaacgcccaaccaccactgagaaaggaacctgacgttatgtcggttttactgattcccaacccgaccaaggacaccgggcttgccgttacacggcaggccgctgctgtgctggccgggcggggcatcccggttctgatgccgcaggcctttgcggcggccgatgggctggatggcgtgcgcttcctgccggaggagcaggcctaccgcgccgccgagcaggtcgtgaccatcggcggtgacggtaccttgctgcgcgccgggctggactgtctggcgcacggcaagcccgttctgggcgtaaatcttggccgcacaggctttcttgccacctgtgaagtaggagagcttgccaccaagctaaaccgactggcggcaggggatttcacccttgtggagcgcggactgctgcatgcccgcgtgcccgcccacgactgggcggccgatgccatcaacgacattgtgctttttggcaacacccgcctgcatccgatggattataaagtgtactgcgatggcgcctttgtaggcggctaccgcagcgacggcatgatactggccacaccgaccggctccactgcgtattccttctcggcaggcggccctattttggacgctgccgccgatgtcatggttctgacgccggtctgtgcccacaacgcccatgtagccccgctggtgtttgccgccagccgaaagctggagatcattgccgatgccgaaaaccgcgacggcagctttgcctgtgccgacagcagcaaccagtgcggcctgctgcccggggaaagcctgctggtgaccggcggcgggcagcatctgcagctgattacatttgatgacgccgaacagtttcatgccatagaaaacaaattgatgaggagatgatccctgtgaaaagtgcacgccatcaggcgattttggacctgatcgaacagcatcctatcgaccggcaggaggatctgctggcacatctgcggaaggaaggctttgatgtaacgcaggccaccgtatcccgcgacatccgtgagctgcagctggtcaagacggctaccgctgacggacgctaccgctatgtaccggcctctgcctccggcaaggtgacacactcgcccagccggtttgagatgattttccgggagtccgtcctcaaggtggactacgccgggcatatggtgctggtcaagtgcttctccggcatggccaacgccgcctgcgaggtgtttgacgccaagcagtgggacaatgtagtcggcaccctttccggtgatgacaccttctttatcctgatgcgcaatgaagaggatgccgccgtcatctgcaagcagctgcagcagtatacccgccgcgggtaattttaacgacagggaggagccgccccatgctggcaaacctgaaaattgaaaatgttgcggttattgaaaaggccgaggtcaacttcacccatggctttacggtgctgacaggtgagacgggtgccggtaagtccatcctgatcgactccatcaatgctattcttggtaaccgtacctcccgcgagcttgtgcgcagcggtgctcagaaggcgtgtatctgggccacctttgaggctataccggcgtccgtcaaaaagcagcttgagaagtgcggctacgaggccagcgatgacctgcttttgtaccgcgagatcaacgccgagggcaagggcagctgccgtatcaacggtatgcctgccaccgctgccgtcgtgcgggatatttccgccggactgctgtccatccacggccagcacgacagccagagcctgacaaacccggccttgcatctggatctgctggatcagtatgcccagaaccgcgcgctgtttgccgagtattaccgccgctaccgcgagctggtcacggtaaagcgccagctggataccgcaaacgccagcgaggccgacaagcagcgccgcatagaggccctgaccgccgagattgatgccattgacgccgccgcgctgcagcccggcgaggaaaagaccctgcaggagcgcaagacggtcatcacccatgctcagagcattctggagggcatcaccgccgcccaccttgcactggccggggatgaggacggcgagcaggcgggtgcagcggacctattgggcggtgccgtggacggactgcagaacagtgcccggctcgacgaatcgcttgctgccatgtccgagcggctgaacgagttgtactacagtgcccgggatcttgccaccgatctggctgaccggttggatgcctatggctttgacgccggggaactggatcagatcgaatcccgccttgatacgatctaccgcatcaagcaaaagtttggcatggaggtggaggagcttctggcacggcgcgacgcagccgccgccgagttggagggtttccagtcctccggccagcggattgccgagctgaaggcccggatgcagacgctgtatgccgccgccaaggaagccgccgaggcgctgacccaaagccgcctgaagggctttgccgccatgaacaagcagatgaaggccgcgctggaatttctgaacatgccgggtattcgttttgcgctcaagcatgcgcgggggccgttgtcctcccacgggcaggatactgtggagtttttgatctccaccaaccccggtgaggagcccaagccgctggcaaagattgcatccggcggcgagctttcccgcattatgctggccttcaagagcgctttggccgaccgtgatgccctgcctaccgttatttatgatgagatagacacaggcgtatcgggtctggcggctgggcgtatcggccagcttttgcaccagacagccaaggggcatcaggtgctgtgcatcacccatacaccgcaggttgccgcctttgcggacaaccagcttttgattcagaaaaatgtccgcaacgaccgtacctttaccgagatccacacccttgatatggacggccgcgtggaggtgctggcgcggatgatctccggtgacaaggtcagtgagctgagccttgccagtgcgcgggagcttatcgaaaagtccaaataacccccctacaaattcacgcataataaaactcgcggcctatgcttgacaacccgcgcggaatatgatagagtaatttttgttaaatgcagtgatgggacccagtacccgtctgccatgctacagagaagccccggtcggtgcaaggggtcagcagaggcggacggcgaatacagcccggagcagcaggctgaacgcgcaagctagtaggctgtgccgtgtgcgcacgttacagcgtttgggtgtcgcaggcttaccctttggccgccgcacccgcgaaggcccgccgccgtgaggcacgagcaaacagaggtggtaccgcgaattttcgccctctgccaaattcacatttggcaggggctttttcttttgcccttgccgcaacaaacggaggtaaaaccctatgacaatttatgacgagctgaaggcccgcggcctgattgcacaggtgacggacgaggaggaaatcaaagagctgattaacaacggcaaggccaccttctacattggctttgactgcacagctgacagcctgactgccggccactttatggctcttacgctgatgaagcgcctgcagcaggccggcaaccgccccattgccctgattggcggtggcacaacgatgattggcgacccctccggccgtaccgatatgcgcaagatgctgaccaaagaggacattgaccacaacgccgagtgcttcaagcgccagatggagcgcttcatcgagttcggcgagggcaaggccatgatgctgaacaacgccgactggctgctgaacctgaactacattgagctgctgcgcgaggtcggcccctgcttcagcgtgaacaatatgctgcgcgccgagtgctacaagcagcgtatggaaaagggcctgtccttccttgagttcaactacatgattatgcagagctatgacttctaccatatgttccaggagtacggctgcaacatggagttcggcggcgatgaccagtggagcaatatgctgggcggcaccgagctgatccgccgcaagctgggcaaggatgcctacgccatgaccatcacgctgctaaccgactctcagggcaaaaaaatgggcaagactgccggcaacgctgtctggcttgaccccaacaaaaccagcccgtttgagttctaccagtactggcgcaatgtcggcgatgctgatgtccttaagtgcatccgtatgctgaccttcctgccgctggagcagattgacgagatggaccactgggagggtgagcagctgaacaaggccaaggaaattctggcctacgagctgacgaagatggtgcacggcgaagaggaagccgagaaggcacaggctaccgcacgcggcctgttcagcggcgccgccgatcatgagcacatgcccagcacggcgctggatgcagcgcttgtcaaggacggtgctgtcggcctgctggctgccatggtggccgccggtctgtgcggctccaaccgtgaggcccgccagctggtccagcagggcggcgtccttgttgacggtgagaaggtcaccgacccgaaggcagttctgaccgttgacgcgctgaacaatggcgttgtcatcaagaagggcaagaaagtttatcacaaggtcacactgtaaagcagaattgcttcacagttgttttcggcacataccataatcgaaagccccctgtccgcacggcaaacggtgctggacagggggcttttgggtgtagtataatggagcaaatcgggattcgaggtggaaatat

SEQ ID NO: 14085 - DNA, 8210 bp, Unknown
  gut microbiota DNA sequence
ttttctgttatttatatagacgcaaaaaagaggaaaaggtttcattattcataaatatcatagcacaagagtatgaacaaatccatatcaattcagcctgtcggcggcattgttctctctggcatactgacgcgccttttcccggcgttcctcactgtatggggcggtcagacggaaagagaaacgcccctttgcaatatcaaactccatgcagtccgtttcggggtctgcgtcggtctggcggcactggtcggggtgctgtccggagtaggcggcaagccgcttctttaagtcggtgttgtgggtgcggatatggataagggggtctttctcgtcaaaccaaatatcggtggtcttttcccgcttcgtaagccctgttctcatatattatcgaaaaacacaaagagttataaagcgatagctttgtcttttatgctttttgccggcttaactatgacatgacataaacaagaacaagctccaacactcgatatcctttgcaaaaaattacaagcccgcccttttttgcaggggcagccagcccttgcatttattgtcgatatcttgactgtaatggaagaactgtgatacagttagagagaaaagggagtgctttatggatgtttttccatgctgcgaacaactgcacgcactctacccggtgccgttggatttctgcaaccgcgtggtggataccaaaaaggcggcgcacagaaaaggtggcgcacagagagccgtcatcaaaaactgcctgcaatatatttccacccatctgcgcgaggatctgcgtttagaggaactggcgcacgaatgcgggctgtgcagccgcagcctgtcgctgaaattcaaggcggaggtcggctgcggcataccggagtacatccaccgcgataacccacacggcgtataatgaacgcaggaaggaggggaacaccatggtctgcgacggggatttttaccgccagtatctgaacggcgatgacgcggggctggaggctctgatggaaaaatacggcgatcccctgaccctgtacctcgacggctacctgcacgatatacacgaggcagaggagctgatgctggatgtgttcgcctatctgttcacgaaaaagccccgcatccgcgacggcggtttcaaggcgtatctgtataaggcggcgcggcacatggcgctgcgccataaaagcaaacgaaggctgatgttcagcctggatgcgctgaccgacgaaccggacgctcaactgctggcggaggaggtcatcggcacagcagagcgcaaccgcatcctgcacggctgtatgggcgaaatgaacccggactatcgggaggttttgtatctgacctactttgaggggatgagctacgagcaggcggcagaggttatgggaaaaaccgtgaagcagatcaccaatctggtgtatcgcggaaaagagagcctgcgtaaattactggaacgggagggaatcacaaatgcggagccatgaagaacgctttgcggaaacaaagcggcgcatcgccgcaagacagcgcaaggaacagcgacgacgcggtacaatcgccatgttttctgctactgcggcgtgccttgtgctgattgtgggtgtgtcctttgccatgcccggtgtggttgcgggaatccgacccggcgactacgcgggctatgaaaccgccgccagtatgtatggcgggggtgcggcactcgggtacattgtcatagggctattgtcctttcttttgggcgtgtgcgtgacggttctgtgcttccgacttaggcagatgagccgggaggatagttcggacaggaaagacgaggggcggcatggagctgattgagaacctgttgcaattattgaccaccttcctcggcgcgctgctttcgggtattgcatggcaaaaaagccgcagacaggcgtattttttgctgctctgcttctacggctgctttgccttggggtcgctttactggacactgtacctgctgctgttccacaccacgccgcgggtcttttatgtgtcggagtttggctgggtcgccagcgtgatttttctgcgaattttgcaggtcacgctgactgattcggaggaacgcagcttttgctgccgaaaagcgtggctctcccccttggtcggcgtgccgctgctggtgttctactgcacctatggggatatcctatccaacctgatttggtgcggcttgatgatttggctgtccttctgcgcggcacgggggcttttttatgcgaatacccggacaggcgaagcgcggaataggcggtatttccacgtcggcgtgctctgctatgtcggttcggaatatctgctctggacggtggggtgtttctggtcggctacctctcccgcaagccctgccttctggtgcgatctgctcctgactctcgccctgttgggactgctgcccgcggtaaaaaaggcggtggaagtatgacctacattgaaaatatcttcctctgtatggtgtccccgctgctggtggccgccttgtgcatgggcaggcggcagctccgcttttttctgttctgtattgccggaatgggagtatgtctgctttccgcctacatcaacacctttcttgctgcggtctatcacgcagacgcccttgccgccacggcggagattgcgccggtggtggaggaaatcatgaagctgctgccgctggcattctacctgctggtatttgagccggagggtgaaaaaatcaagcccactgccatcacagtcgcgctcgcctttgccacctttgaaaatgtgtgttatctcatccagaacggtgccgaccgattctcgttcatctttttccggggcttcggcacgggtgctatgcacgttttgtgcggcatcattgtgggcgccgggctttcctacacatggcagcgcacatggctgaagattgccggaacctgcgggctgctgggcgcggcgattaccctgcacgccacctacaacctgctgattgcctacggcggcgcagcgcagtacatcgcctattccctgccggtgctgctggtggcggcgggaaagctgtctgcacttcgtatggtacgaaaagaataaccgaatatccgattcttgggagctgcttttgggcggctccctcatttttttgtaaatttttgcattttgggtgagagttttcccgaatttttgtacctatataggtgaaaggacttttcacccaagacttcagcaaaccggagaggaggcttccaccgatatgtatgataccacaaggcgggtcgagcttgtcaaaaggcagatacgaaaaaatacccgacgaaggcagaaacgcggcatcggcagactgagcgctgtgtgtatgctgttgtttgcggcactgatgcagacagcggacagggttgtcgggcaagggcagaccgctgcctggggcggctttggtgcgatgctgctgcgggaggacgcgggcggctatgtgctggtgggcgttgcggcgttcacagcggccgttgtgctgacggtcgtttgtatgcggctgcatgaacgggaaaagcaaaaaagaaaacacgaggaggacgcaacatgaaaaaatttctatccctgcttttgagcctttgcctgttgctgggcgcgctgcccttgcaggtatcggcttttgcgggggacatttttccgtccgaaagtacggtaaaaaccgtcacactgaacgacggctcgctttccctgcaaaacgagtacatctatatgacgtttcgcaaattatggggtacttatgcctacctcacggttgtgcccgctgcaaagtccgatgaggaaagcatactgatcgggcaggcgccgcgctgcaccttcatcacctatgagcaaggccaggaaaagacagagggcgtggtgactgagccgataaaagcagaatttgtgaccaaaacgccgaacggcagcacaaatgccatcaaggtggaatattctctgctgacctcccttagcctgatcaaagcaaaggcgacggtctactatgagcttgtccaactcaaggagaacggggcatcctccgacacatggggtgtgctggcgtcggtcggtacgatttacatcgacaaagacagtatgccacaagattggaatcgtgactacggttttcaatgggggtattcgttcaactgctttaccgccacgggacatacctccacgctggaaaagccgggcggtcctgccattaaaatgagccgcaccaccgtgccggagggggagaacccgcaaattaccaccgaaaactcggtattcaccgcgcccgtggaagatctgcgcacaaaaaccgttcccaaagggtattccagctggggcgataaggacggcatttacatcaccgaagtctatacggatggctacccttgggcaaatccctttgtgggactgtcagattactatgaacaagagatcacctccgtcagcggcaagccgattcgcgttgccttggcgcagaccgtcagtgtaacaccgggcgataagccgctggatacctgggtgcagtgtgacagcgctgcctatgccacacagggagaagacggcagttcggaacaggaagaaggcggcggttcggaatattactcccacttcctttggggcttccatgatctgatcaaggcgggcgcggagaatgtcccctcccagccggatgcggtggatgctgccatttctgccaagcggcttgccgcgttcgccgtaaacggcggcgtgacggtggagtatgtggcggacgatgccgcactgcaagcgctgaaaaagcagtacggagaacccgtggcgctgatcagcggcgattatgagagcaagaacggcacggaattcacctttaccggcggcgcggcgatgctctcgccctccgtcaccgcgacatggaataagagcagcggaaagctggtcatcaaaaaggacggcacgatcgaacacagcggcgtaagcctgaacgcgccgagcttcaagttctatcagccgaaaaacggcgcagaaaatgacctgcaaatttcgctcacaaaagacggctttgcgttccaaatcaatcccgacaagaacgacgccatcgtctttgtggacattccctatgccacggtgaagctggaaaacgcaaaagccgacgcggcagggaaccttgtgttcagcggcgacatcggtttccggaccatcttcaatggtgccgagttttcgatggaaaagctgggctacggcttgaatggcaaaaaagagttcaaggtcaacggcgtaaaggcaacaggcagctttgacaccgaaaagctgatgacgctggaacttgccaaaatccaaggcgaggtcaacaccttcaagggcgaggaacgctatgcctttgaactggaactgaacgccttcgacctgtttgaaacggaagcatctctggcgctggaacgcagcaaaaaggatggctcgctgattcccgatgagttgtggttctttgtcaagtcaagccccggcatcccccttatcccgcccgttcctgtcgggcagcttaacggcggcggcgcaggctttaaggatctggcaaaaaccgcgaacggcgactacttcgccatcccgcccatcaagctgcggggcgcgctggcgggtacctatatgcatctgattgagggtagaggcgatgtcgttctgggacccagtgaaatttccctcaaggcaacggatgtcggcatcgtcgggctgggagacaaagcgcagattattaacagcttcggctattctctgcagctcaacgggcaggagcgtacttataaaggagatacctacaagggcatctacttcggcggttcggaggaacttgccctcaatctgccgagcaatacactggacatctttgccataaatgctgcaatcaggctgggcgcattcggcggtgcaaaccaaaacaaggacaccgtgtatctcggcatcggcgccaacagcattgttaagggtcagctgcagattccgagcagccttggcatcccgtttctcagcggtattaaacttgccggcacggacatcgatctgatcgtgggcgggcagacgaccttccccgtcagaaacgccaatgtcagcgagagcatggagcaggcgtttaagaatgtagatgtctacctcggcgcgatggcgggcgtagacataaaaattattgacgcccgcgtgtgggtgcttgtgccgcacattgtgcagaccgatttccgcatgggcggcggctgggacatcgaaaccaagtggctcggcaagctgcccgaatgggactggtcgtccaagggcgttgagccgctggtgcagggcgtatcgctggaaaacagcggggaagagcctgccatgctgatggagctggaaacagcgccgcctgcaaacggcagtacggcaaatatcacggtttctgccgcttcgggcgaaacgccgtacatcgtgctggcgtttgacaacagtgttgccgacgcggaaatccaaagcaatttgacagttgccaaggatggctcgcccatgtccatcaactggattgccaacgacggcgatattgaccccaatgcggacatcaatgcgaccattctggcggacatgaaaaagtcggcagatgacggcaagcaataccgtatggcagttttacgcctgaaagagggcggcaactataccgtcaatgcggacgcgctgagcttttccgacgaaaagggctttgcagtcgcaccgtttgaaaagctggatctgacgcagaacggcactacgctcaccggcgggatgaagtaccccgcagagaacacgacctacaccctgcgtacctatctgggtagcaaacccggcgaggcaacctaccttgtggacgaacaggtcgtggataccacccaagtcaatacggtcaacattcccacagaaggtacgctgatgccgacgggcgaatactatgtatcctccttcctgatgacggaaaagaccactgaggtcagcgaggaagacggaagtaccaaaaatgtgaccgtcctggccgccatcgacagccagcagtttgccaccccggttagctacaccaacaacaatccctatcagccgagcgcccccgctagtgccacgctgatattcaccggcaacgaggtcatgcgcgccgaatggcagcctgtggaaaatgccgacggctaccgcgtgacgatttatcaggagcaaaacggcggttgggtcgataccggctttggctatgaccttgacaagggcaccaccgccattgatatggcactgaccgtgggcggcgaagaaacggcagaatccaaaaatctgacggcaaacgcaacctacaaagtcggcgtaagcgcctacacggagccggaggacggcgcaaagtattacagcgcagaaactaaatcctccgacgttttcctgccggaatacacgccgctgaaccttgccctttccgtgaacggtgaggaatgcacgccggacgaaaacggcgtgtaccatgcctatgtgggcggcggcagcaacaagcttgccgtgacctgcgagggtgccgacagcattacggtcacacgcatggataccgaaacgaacctcacatcggacgggtcgaacacctttgccatccccgcttttaccggcacgctgatgctccgcgtaaacggcgtgaaggacaaggatgttaccagcgtgttcctgctggtaagcagggacaccaccgccccggtgctgaccctttctgcagcgatcttctatgcggacagggctgcgggtacctatcaaatcaccggcacagcggatgccggcagcgaaatcctttacggggaaaacaacgaaagcgtttatgccgcaggggacggcagctttgcaatccaaggaacgctgaaggaacagcaaaccagcgatgccctgtatatccgcgcgcaggacagcgccggaaacctctctgcacggcagcttgccttggtgacgcggcaggcgcaaatgtatgctgtcaccgtaacaacggacggcaacggcaccgcctcggcagacctcaccaccgcggcggcaggtgcggaaatcgccttgagcgccgcaccgaatgcgggctatcactttaaagagtggcaggtcgtcagcggcggtgtgaccatcgagaacgacagattcaccatgccggacggcgacgtggaggtcaaggcaatttttgaaaaggacgcagcgtctgcgacccccgcacccactgctactgcaaagccgaacagcagcccgaccaccgcacctgctgccac

SEQ ID NO: 14086 - DNA, 12668 bp, Unknown
  gut microbiota DNA sequence
ttttcaaagtaggccagcggcaggcggttgatctttttgttgatctggtcgcggaagtcatagcagaccttctgggacaggccggtcatcagccagccctgcagaaagctgaacgcggcggagaacagatacatccccgcaaggaagagcagcacccgcccgatgtaggcaaagtcgatgctgccgaccccgcgcagcttggcgatccagccggtggccagcgcggtggtggctttggccagaatcttggggcctgcaatgttgaaaatcgtcgaaagaattgcaaatacaacgaccacgatgagcgacagcttatacctgctcatggcggccagcagctggcgcagcgtgcccttgaaatccttggcgcgctccgtcgtcgggcgtccgggtcttggcatatcacgcatcctccttctgtaaattcagttccttctggctcagctggctgcgtgcgatctcccggtattcggggcagctctccatcagctgggcgtgggtgcccttgccgacgatgcgcccctcatccagcacgatgatctggtttgcatgcagcacggtcgagatgcgctgcgctacgataatgacggtggcgctgccggtctcggccttgagcgcgcggcgcagggccacatcggtcttgtagtccagcgccgagaagctgtcatcaaacagatagatctgcgggtgcttggcaatggcgcgcgcaatcgaaaggcgctgcttctgcccgcccgagacattgctgccgccctgtgcgatggggctggcaaagccctccggcttagcggagatgaaatcggcggcctgtgcgatctcagcggccttctgcacatcggcatcggtgatgtggtcgccgccgaacttgaggttggagtcgatcgtgccgctgaacagcacccccttttggggcacatagccaaggcagtcgtgcagctgcgcctgcgtcagctcgcgtacatccacaccgccgatggtcacgctgcccgccgttgcatcgtaaaagcgcgggatcaggttgagcagcgttgacttgccgcagccggtcgaaccgatgatggcagtcgtttcgccggggcgggccgtaaagctgatatgctcaagtgcgtcctcctcggagccgggatagcggaagctgacatcgttaaacgccaccacgccctcggtgccgttctccggcagggacttgggggcggcggggtcgtggatggtggcgggggtcgtgacgacctcgtcaatgcggtcggcggccacaccggcgcgcggcagcataacggccaccatcgacagcatcaggaaggacatgacgatctgcatcgtgtaggtgatgaaggcgatcatctcgccgacctgcatcgtgcccatatccatggccttgccgccgaaccagacgataagcaggcttgtgccgttcatgatcagcgtcataaagggcatcatggcgaccattgtgcggttggtgaaaagctgggtgcgcatcaggtcggtgttggcacggtcgaaccgcttttcctcaaaggcctcgcggctgaaggcgcggatcggcatgatgccggtcagaatctcgcggctgacaaggttcagccgatccacaagggtctgcatctgcttgaacttgggcatggcgacattcatcagcacagcgatgagcagcagcagcgctgccaccgcgacaaagatgatccatgtcagccccgtgttgccgttggccacatgcaggatgccgccgatgccaaggatcggcgcataggccaccatgcgcagcaggataacgcagacgaactgcacctgctgaatgtcgttggtcgtgcgggtgatgagcgatgcagtggaaaacttctcgatctcggcgttggaatagccgacaacggtgcggaacacatcgcgccgcaggtcgcggccaatgccagccgacacgcgggaggcgataaagccgacagcgattgccacagcgaccatcagcagcgtcagggccagcattcggccgccggtgcgcagcagatagcccatctgcacatcgtgtgcgatgccctgtgcctcatattccagcgcgaccagcagcatggcctggctcgacaggctgcccgctaccgaatcatcgagagaggcaaaggcggcggccagctggctttgcagcatttcccgtgcgccgggggcctgagacatcgcggcaaactgggtcgcaacggcatcgaggtcgtaggcggtgggggttactgcatcggccgtgccggcggcggtggcggcgtttttggcggccgccatgtacagcacaatgtcaggcgtggcaaacgtgttttccagttccgacatggcagcggtggcatcgtgagagagggtacgcacaccgtcggcatcgggggcactgtaccactgttcggccagtgcggcgtcctgctcggacataagcaactccagtgcctgcagggtcgtgtcgcggacagtctcgggcacagggctttcaatgccgccctgctggatgccgatgtccacgatcttgctggtgtagtcgggcaggctcaggtcgcagtaggcctgtacaaacagcagcgccaccacggcgatgcaggccgcccagtgacgccccagctgcttaaatatcttgatcatgcgcggggtctcctttcctgtttgcaaggtcttgctccaaggcatcgttctcggccacgatggcggcgaggaaggcgtccttcagggccaccatctgggccagctcctccggggtcagccgcgccataacgcgggagaaatagccgctgatggcctgttcccccgcaaggcgggcctgctccccttccggggtgatgcgcacgagcgttttgcggcggtcattggggtcggtctcgcgcaggatatggccgtcctgctcaagcaggcgcagcccgcgtgagacggcgggcatcggctggcgcattgcgcgggccagctcagatacatagatgctgccgtcctgcccggactgctcgatctggaaatgcagatgctccagcataccaaggcggcagcgcggctggctggccagcgctgcgcgcatcccgcgcttgcccagtgtgttgacacggccgaggaactggatcagccagccaaggtcggtgttttcgatgtcaggcattgcacacctcctgttaatagttgtcatatgttaataattgaagcgagataataatacacccccctgcacagcgatgcaagggggtgcggtgtgtttttaaaaattgtttacaaatgcgggtgtcagggctccgcgcagctgatattgctcagtgtgatgccgcggcagaggctaagcggcagggtcacggacggcttttggatcgtgatgtccttaaagacgatatcctccaccgcatagccgggcgtgtcaaagccggcaatctccagcggggcggcatcgtgctggctgcggtcatggtccagcacctcaccggtcagggtcagccgctcaaagaagcaatggctgagcttcggcggcgtttcggcgggggtgccgtcatcgttgtaggcaacactgtgcagcatgacacggggcgcaatgcagtcctgcacggttacgccgcgcacatagccgccgcgcttgggggtggccttgatctcgatgccagacagcgagtttgcaaggtcgcagtcccagatctgcacatcctccacgccgccgctcatctcgctgccgatgcagatgccgtggccgcagtcgctgcggcagtcaaacacccggatgtgggcgcaggggcggccgatctcattgccctcggggttcttgccgctcttgatggccacggcatcgtcccccgtaaagaactcgctggcaaacagtgtgcagttcgtcgaggagtcggggtcccagccgtcaccgttccagacgccctccgatacaaaggtgcagtggtcggtctggatattgttgcagtagatcatgtggacattccacgacgggccgtttttgagggtgacgccgctgatccagacattttcacagttgctcaggttgataaggcggggacgcacacgaccggggatcgtgtcgctgttctcgcagctttcgaccagctccttgttgtcatcgaggaagctcttgatgcgcgcacgctcatcctcgatgatcttgcgggccagcgtctggccgccgccgcagatcgtgcccttgccgcggatgatgatgttgcggcagttcggcccggttttgtggttcagctcaccggcgttgagcaggctggaatagcagcgcatctcgattccctcaaaccggctggggatgcgcggggcgtagtcatggatgttggcggtgccctgcagcacagcgcccttggcaaggtagatctcaagatcgctgtgcagccgcagcgcaccggtcagaaaatcacccgccgggatatagagaatatcgtccgggccgcagtcgttgatggcgcgctgcagattgtcggtgttcagcagctggccgtcaccgcggcagaagtagggcgcagcggtaatgtcgatgcggtgcttttcctgcccgaactgcagcgtggcggagccgacgcaatagctgccgctgaccacatccacacggaaggtgctgccgtaggacagaccctcgatcgtaaaatgggtcttgtcggtgcggccgatggcctcgccgttgagggagaccgtgtactccgccccgcgcggcgcagcggcgggcttatcccagtacagcaccgcgtaatcctcggtgcagcgtatatttaaacggttctgtttcatgtatgacatcctttggtaaagggagaaattcattagtacacatattgtaccacagcccgcaggtttatccaataccttggtatgccaaaataccgcggtcaaaaaccggcaggttttgacagtttgcaaccttgacaaattcggggcccggcacaccgggcaggttttgcttttgcgggtaaaatgtggtagaataagtcgattgacaggggcgcgggctgcccgccccgctaacacccaacgccgcagaaaggaggccgccatggagaaaaccgcgtttgagaccgcccacatggcggcgctgaatccccagcagagggccgccgttgcggccgtagacggcccggtgctgttgctggcggtgccgggcagcggcaagaccaccgtgctgatcacccgcttgggctacatgaccgaggtctgcggcatcgcaccggagtctatcctgacaatgacctacacggtggccgccacgcaggagatgcgcgcccggtttgccgcgcggttcggggaggccgaggcggcgcggatggagttccgcaccatcaacggcgtggcggcgcgcatcatcgcgctctacagccggatgtacggccgcacaccgcccgacctgctgcagagcgagagtgagacaacgccgctgctgctgcagctgtggcagagcatcaaccatgagtatgccgccgaaagcaccctcaaggagctgcgcacggccatcacctacattaagaatatgtgcctgaccggtgccgagcttgacgagctggagacggaccttgaaaatctgccggagctgtaccgcgcttaccagcaggcgctcaaggcgcggcacaagatggactacgatgaccagctctgctttgcgctgcagatcttgaacgccgcgcccgccgtggcagcagcgttccgtaagcggtaccgctatttctgcgtggatgagtcgcaggatacctcccgcgtgcagcatgagatcatccgggtgctggcgcagcagagcggcaacctttttatggtcggggatgaggatcagagcatttacggcttccgcgcggcctacccgcaagcactgatggactttgaaaagacctaccccggcgcgcgggtgctgctgatggaggaaaactaccgctcgcgggagccgattttggccgctgccaaccgctttgtggcgcgcaaccgctaccgccggcccaagaccatcgcccctacgcagggggccggagagccgatccgggtcgtggaggtgcgccgccgcgctgaccagctggcattcctgtttgcggaggcgcagcattgcgaggtcgagaccgctgtactattccgcaaccatgagagcgcgctgcccatcatcgacctgtgtgaacgccgtggcgtgccttacggctgcaaggcggtcgagcagaccttttttacaaacaagatcgtgcgggatgtcgcggatatttttgcgctggcagcccgcccggacgatgccgacacctttctgcgctgctatttcaagttcggcgtgccggtgacacgggcacaggcgctgtacgccgccgggcaggcacggcagcacgggcagggctgctggacagcgctgatcaatgaggacagcatccgcccgcgcacccgcgccgcgatggccgaggtggccgcagagctggcccgcctgccccgcatggcggcggacgatgctgtgcggtttttgaccgaccagctgggctacggcaagtatctggacaaaaacggcatggaccgcgccaagttggctgtgctggaaatgctgggcgctcaggagcctacgccccggcggctgctccggcggctggcggagctgcgcaccatcgtgcaggagcatgtcacaccgccggggtgcaaatttctgctctccacgatacactccgccaaggggctggagtatgaccgggtgatcctgctcgatgtgctggacggcatcctgccgaccaagccggagctgtgctgccgcacctccgccgagacgcgccagtatgaggaggaccggcggctgttttatgtggcgatgacccgcgcccggcaggagctggtgctgtttgactgcacggccgagcgctcgtcctttgcgcaggaggtgctttccggtctgccggggcaccgcagccgccctgatgctgtccccgcggggcaccgccctgccccggcggcggcgcgcaagccgctgccgcccgtggatatggcggcgattacggctgtcggggcgcgggtgcgccatgccgtgtttggccccggcacggtggaaagcacagagggcggccgcgtgaccgtccgctttgccgccggtgcaaggacactggatgcccgggtcgtggccgaccgacacctgctgtggccggaatgaaagatatgcgccttccccttttgggggaaggtgcccgaggccccgaccgagggcggatgaggggaaagtcaccggatattacccgttaattggctataaggcggactctgccctcatcagtccgctttgcggacagcttcccccgagggggaagccaaagaggtactttgatgaaaaaaattcttcttctcgccaccggcggcacgatcgccagccggcccacggctgcgggcgggctggcccctgccatcacctcggaggagctgctggcctgtgtgccggagctggccgacctctgtgcgattgatgccgtgcagctttttaacctcgattccacaaatgtcggccctgcgcaatggcaggagatcgtgcgcagcatccgggaaaactacgccgcctatgacggctttgtcattgcccacggcaccgacacgatggcctacacggcggccgcgctgagctacatgatccagaacagcgccaagccggtcgtgctgaccggcagccagaaatccatctacaaccgcgacaccgatgcccgcaacaacctctatcgcgcctttgtctacgccgtgagcgagggtgcatggggcgtgcagctggtgtttgacaacaaggtcattctgggcacccgcgcccgcaagacgcggacccgcagctttgacgccttctcgagcatcgactacccggagactgccgttttccgcgacacaaggcttatccccttcctgcggcggccggccgatctgccgccggtgcagttttatgagcagcttgaccccgctgtctttgtgctgcggctggtgccgggtatgcgggcagatattatcccgctgctggccccgcactaccgtgcgcttgtgctggaaagcttcggcgtgggcggcctgccgggcggtgagcagggcgaaatgtttgccgaactgcgccgctggtgcgacagcggacggctggccgtgtttacgacccaggtcccgcatgaggggtgcgaccttgccgtctatgaggtgggccgcgccgtgggcgagctgcccggcgtgctggaggcgcacgacatgacccccgaggccgtggccgtcaagctgatgtgggcactgggccagacacaggaccgtgccgaggtcatgcgcctgtttgaaaccccggtggaggtcgatattatttaagctgtttttttttaataacgggccttggccgctgtctttttgggaccgcggccttttgctttgccgaaaagtgtgctataatccataagtaggaaccaaaagtacaggaaggagcctgcccgtgcagtattctgatgaacatttgcgctatctgcgcctgctttcccaaaaatacaagacggtggccgcagccgccagcgagatcatccgcattgaggcgctgctgcgcctgcccaagggcaccgagcattttatgagtgatctgcacggcgagcatgaggcgtttgtacatatcctgaacagcgcatctggcgttatccatgagaagatcgacactgtgctggggcctgatgtccccgccgaggagcgcgccgagctggcaacgctggtctactaccccaaccagaagctgccggaattgaaggcgcgccagcctgatctgcacgcatggtaccgcctgacgctgctgcggctgatcgacctgtgccggttcgtttccagcaagcacacccgcgaccatgtgcgccgctgcctgccccagaactgcggctacattctggacgagctgctccacgcccattttgaggatcacgataaggaccagtattacggcgaaattatcgagagcatcctgcgctatgaccgcgctgacgcctacatcgtgcggttctgtgaggtcatcaagcggctggccgttgaccggctgcatatcgtgggcgatttgtttgaccgcggcccgcgccccgaccgtattctcgacagcctgatggcgcaccatcaggtggacatccagtggggcaaccatgatgttgtctggatgggggccgctgccggtagtcccctgtgcattatgacggtgctgaaaacaacgctggcctacaacaaccttgacacgctggaaggcggctacggcatcagtctgcgccagcttgagcgctttgcccagagcacctacgctgactccgatgtgtcgcgctggatcccccacgccgatccgcgcacggcggccggcgatttgaacgccgccgcccggatgcacaaggccgtgaccgtgatgatgctcaagcttgaggcacaggtcatcgcccgcaacccggattttgatctgcagggccgcgactttttgaaccatattgattttgcagcaggcacggtggactaccacggcaccgtctatcccctgctggactgcgacttcccgactgtggaccccgccgcgccgaccgtgctcaccgccgaggaggcgcatgtcatcgccgggctggtgcgcagctttgccgagagcgagcgtctgcagcgccatgtgcagtttctctacgcgcacggcgcgttttacaagatctgcaacggcaacctgctctaccacggcgctgtgccgatgaccgaggatggtgcctttgcagccatccggtttgagggggtggcgcgcagcggcaagcagctgtttgactattgcgaccgccgtgcccggcagggctacagcgcgccgccgggcagcccggcgcggctggccgggcaggactttttgtggtatctgtggtgcggtgccaaatcgccgctttttggccgcagcgccatgacgacctttgaacggctctacattgccgaccccgctgcccaccgggagatcaaggatccctactataagcatatcgccgcgctggacacggccgagcgcattttgcgggagttcggccttgcgggtgcaggctgccacatcgtcaacggccatgtgccggtccgcgccatcgaaggggaaagccccatcaagggcggcgggcggctcatcatcattgacggcggcttctgccgtgcttatcaccagcgcaccggcattgcgggctatacgctggtctacaactcgcgcggactgatcctgcgtacccaccagccgtttgagagcgccgagaaggccatccatgaggatgaggacatcgcaagcaagagcgaatatatctacacggcaccccagcgcatccttgtgcgcgacaccgatgagggcggccgcaagcaggcgctgatccgcgacctctgcgcccttgtggaggcctaccagaccggcgtgctgccgcagggggtggcacaggaaatgtgattgaaatttgcgccatttgcattataataggaagcggatgggtgctgtaggggccgggcatgcccggcccgcggctttcccgtaaaatgtcgtttgccgtcaggctgcaccccgtccgtgtagaatataaaaaggagaggatttgcaaatgccttgtacaaccattctggtcggcaaaaacgcatcgtatgacggctccaccatgatcgcccgcaacgatgactccggctccggccatttcactgccaaaaagctcgctgtgttccagccgcaggactatcctgcggtatacaagtcggtgatctcaggcgttgagatccccctgcccgagggcggcctgcggatgacagccgtgcccaacgccgtggagggcaagggcctttgggctgccagcggcgtgaacgctgccaatgtcggcatgaccgccaccgagaccatcacctccaacccgcgcgtgctgggggccgatccgctcgtcaagggcggcatcggcgaggaggacatcgtttatctggtcctgccctacatccgctccgcgcgggagggtgtacaccgcctcggcagcctgctggagcagtacggcacctatgaaatgaacggcattgcctttcaagatacgaacgagatctggtggctggagacgatcggcggccaccactggatggcccgccgcgtgcccgatgatgtgtatgtcgtcatgcccaaccagctggggctggatatgctggatctggacgatgcactgggcgagcagaaggactttatctgctctgccgatctgcgtgagtttatcaaccggtatcatctggaccttgcacagggcggtgcgctgaacccgcgcgatgccttcggcagccatgacgatgccgaccatgtctacaacacgccccgcggctggtacatgctgcgctatttcaaccccaacaccttcgcatgggacggccccgatgctgatttcacgccgcgctccgacgatctgccttggtgcatggtgccggagaaaaagatcacgccggaggacatcaagtatgtgctgtcctcccattatcagggcacgccctacgacccctacgcagccacggcggccgaaaagggcatctaccgccccatcggcgtaaaccgcaacgactttatggcgctgctgcagctccgccccgatatgccggaggatttccgcgctgtggaatggctggcctttgcatccaacgccttcaacacgatgctgcccctctatgccaatgtggacactgcgccggaatatctggccaacaccaccggggatgtctccaccgacaacttctattgggccagccgcctgctggccgcgatggccgatgcgtcctacgcgaagtcggtgttccacatcgagcgctacaccctgagcgttggtgcgaaggcaaaccacatcatcaacacctgtgacgatgcccagcgtgccgagaccgcccgcgccgcccgcgccgcactgcgcgaaaaggcaaatgaggagctggccgcgatggcgaaggccgaaacgaccgacacgctgaacaaggtcctgtttgagctgagcagcggcatgaagaatgcctattcgcgctcggatgcgtaagaaacctgcataaaaaaggatgcccccgccgcacagcctgctgctgtgcggcttttttgcactttttaacaataatgtcacaatctttgcggaattttcaacttgcttttataccagaatctttgtataataaatgtcaggatggggcactaggaggctgacttagtcccctgctccccattcagccaaaagtatagagaaagaggtatatgtaaacatggcaaatctggatttgactaagtatggcattaccggcacgaccgagatcgtgcataacccctcttatgatgttctgttcgcagaggagaccaaggctgacctgaccggctacgagaagggccgtgtcagcgagctgggcgccgtcaatgttatgaccggcgtttacaccggccgctcccccaaggacaagtacatcgtcatggacgagaactccaaggacaccgtttggtggaccagcgacgagtacaagaacgacaaccaccccatgaccgaggccacctgggctaccgttaaggacatcgccaagaaggagctgtgcaacaagcgcctgttcgttgtcgatgccttctgcggcgctaacaaggacacccgcatggccatccgtttcatcgtggaggtggcctggcaggcacactttgtcaccaacatgttcatcaagcccaccgctgaggagctggagaactttgagcctgatttcgttgtctacaacgcctccaaggctaaggt

SEQ ID NO: 14087 - DNA, 2623 bp, Unknown
  gut microbiota DNA sequence
tagatggattttacccttttgaaggtttcctccgagcacataaaaaggcgcgcggcgcttctgcaactggatttacgcagaaacgccgcacgctgtatgttttttatacgcgccacatcactttgcaatgaacagcactccgagcgtgcccgggccgcagtggctggaaatcacaccgccggctcttgtttcaaggatctcacagaatatgttaagccctttcagataagagcgcacttcctccactacctcacggctgcagccggagtgggtaataaaaatccgctccggtcgggctgccttcaggtcagtttccatgtccttcacataggccataattacattgtcgattttaccgcggtacttctttgttgcccgcatggcaccgttttccaccacgatcttggggtgcagccgcagcgcactgcctgccaaagcggcaacggtattgcatcgcccgccgcgccacaggtataccagcgtatcaacgacaaaacttgcccgcaccttcgggatgagttcgctgacggcagtggtgatctctgccgccgtatgcccctgctccgccatgatggcagcttccaacacaagaagtccgatcccggtagagagattctcggagtcaatgattgtaacctgcgcggcggcatccagctcctcggcggcaaggcgcatgacattgccggaggtggacatgctgccggagattgaaaagcagatcacctcacggccggcctcaacatacggctgcagcagcgctttggcgtcctccagagacggcgcagaggttttcggcgttgccttgtttgcatctgcccacgcgaaaatgcgatcgggtgtgatatctttgccatcccggaactcgctttcgcccagcaggatatgcagcggcagaatgtcgatatcgtacttcgccgtcagctcctgtgaaagatcgcaggtactgtctgagatgattttgactttttggccgatttccatggcgtagctcctcctcaattcctgtcacgctgtctgtgtatcaaaaaccgcatcttcgcatcacagagaatgctgggcgcttttcaggcagcatatccttattgtacttccatttttttgaaatgacaagaaaaatattgcaggcagccttgaagccattcagctcgccagtgacggtcatatacaaaatctccttcacaagcttgtgccggatcggcttttattgtataatggtgtgacaaatttcaagcactgtttgccagcgtttgcggcacagcatttgaaatgaaaattacggaaaagagctttctgccatggcgataaaacacatttttcaaaaagagcctgttctgagcattgctgtctgcctggctctggtttcctcctgcttcactcttccggatgcagaatatcttgggtatattgatttccgcacgcttgcaatcctgttctcactcatgacggtcatggccgggctgcgggggcagggcgttttcgattggcttgggcgcgcgctgctgtcccgtacccgtacaacgcttcagctgaccgctgttctggtggggctatgctttttctcaagcatggtgattaccaatgatgtatcgctgcttacctttgttccgttcacatttgtcgttgtaaacagtttggatgcctccgttcgggataagctgctgcttcccatcgtctgcatgcagacgatagccgcaaacctcggcagtatgctaacacctcttggcaacccgcaaaacctgtacctgtatggaaaaagcggaatggatataggttcttttgttttgctgatgctcccctactccatcctgtcgctggcacttcttgcgctatgggcggtggggctgtgccgccgtggcgcaaagatctccatggcccattctgtggctgctgcaagcccgaacaaggcactattatcgctgtacagtattttattcgtactctgtctgttggcggtactgcgtgttctgccctatggtatcgcgtttgctgcggttctggcctgcgtgcttttggcagaccgggacacattacgccgtgtagactattccctgattctcacctttgttgcgctctttatctttattggcaatctggggcgttttgccgccttttccggatggctgcagcacattcttaccggccacgaggtatgggtttctgtgcttgcctcacaggtaaccagcaatgtgcccgcggcgatcctgctttcgggatttacagagaatatccgcgccctgatcatcggcacaaatcttggcggccttggcacgctgattgcctcaatggccagccttatctcgtatcgcgaaattgcaagggagttgccgtcccaaaaaggacggtattttgtgttgttcacagcttccaacatcctctttctgacggttcttatgggcgcgtgggcgttggccggataagatttctcttgccgtagatttttacagggagcttttgcggaattataagtaaatgcagctgcatggaaacaaattgcagggggtcaatccgagaatgccagcggcgtaaagtctgtactgcctgctagcagatcctccagcgctatgacgccgtaaatgtcccagcttgtcggccgggtgtagagcgtgccgtcctcttccacgcc

SEQ ID NO: 14088 - DNA, 2663 bp, Unknown
  gut microbiota DNA sequence
gggtcacattgtcgcctgtgccgttgccgttttcatcgcggccgcattcgtccacccataccagccagccatcggcaaagccggtcagggagtagtagcactcccatcctgcgcgggttgtgggaaagccatcggccacgggggtaaagctgtctgctgccgcatccagataaccaacctccccgctttggtagttgtagttggcaaggccgctgcggctgccctcggtcaggatatggtagtcgtttcggtagctgatcaggtcgcgcttctccatgccgtccccggtcacaaacacagtacccgcatcgcgttcatagcgctgctgcggtgtacagctcccattggccagatccactgtgcaaatttgtattgcctcggttcgggcgtctgttgactgtatcgtcttggcaaaggtcatttgccgacagccgacctccaacagcgtgtacatttcgggggagtactcccccgccccatcggccagatcatcccatctgcagaccttctgcggctgcccgcctgctttgtccacggcccacagcgtctgatggctgtcatcgtccagcacgctgtaatacaggtttttatcatccacggccacaccgcggcccacaacagacaggcccggctcaatccttgccagcacggtgcgccggctgtggtcggaattgatttgttcccagctgtaatagctggtttcctcgttgtaatagaaattcagcagatagacttcgtccccatcgccgtagcagagggtggtgtttccatcgctccacgcggggcaggtgtcgctgttgtgggcacagccgggcaggctgcagacagggcgcgcatcgccggtctgttcgtcgatggcataaatcagcgcacgacccctcgtgtcggtgtagttgatttcccagtcgttgaacgcctgataatacacgccgtccgcagcggcagtcagcagccgcagggcatcgctgccgatgctttgcggctgctcggcgggggccgctgtggcttctgtggccgcagtcggtgtcggcgtgctgtccgctgcggcctgtccgcaggctgtcagggccagcgccagcgcggcagtgataacaaggtactttttcatgatgtttcctccccgtattgcgtgttcagtgccgcaaaggtctgcggcgtcatgctggcggcggagagcgtaacgctgtacccgccggcgttcgccacggcgtagacctgcgcggtctcactgtagcctgccgcgccgaagtcccgcacggctgtgccccattccgggtactgccagtcggtaaactcgtccagcccaagcagggcgcaatattgcgccacagcgtcatcggccagcgtagcgccctgccccagatcgttctggtagttaaaatatagcggtgcatcgtcgccggaaagaatcagctggatatacacatgctcggtatcggtgtctgtgtagatttcttccggacggcgcaccagctgcgtcaggccgcagggcgcggtgtacagctcccagctgccgtagtccaggcggcagaccgagagcgcggcggcatagctgtcatcgcacagcagcccggcctcgtgcagggcgcgcagcgtccggcgggcgcgggccagcgcactgccgtccatcgtgcccgccgtccagccaccgtcccagaggctgttgctgccgagcggcaccttcgtcacatgctcggcggcgtagagggtgcaggctgtggtgttagcccgcccagctgccgtaaagcgctccccgtccgtgcggatgtggggcgctgccagcagtgcgcggtcccacagggcgaacaccgccagcggcagcgccagactgcacagcaccacagcggcacaacgcaggaaggggcgcagcgtatcagctttgtgtgtcattgtaagcctccctttcgctcggcagcacctccggcacggcgatggtcacggtcgtgccgacatgctcggtgctggtgatttccagctttgccccgtgcgccccggcaatacgggcacagagcgccagcccgatgccgctgccgcctgcggcccggctgcgggacttgtccaccatgtaaaatgcctcggtcacgcggggcaggtcggcggcgggtatgccgcagcccgtgtcggtaacggtgaaaactgcctgcccggcgcggcgctcacaccgcagggtgatggccgcgccctcgatgccttgacaggcgcgctgggcgttgagggtcaggttgcgcagcatatccacccacaggctgcggtctacccgcaccacgcaccccgcgctgatgacccgcggcacgggcgtgctgccctgcggcaggctgcgcacggtctgcagcaaaagcccggcatcctgacagagcaccagctccagcgccccggcctgatccagccccatcagggccagcagactgcggctcagtttctccagccgctgagtctcgtggtaaatgtagcccgctgcctcccgctgggtctcggcgtcatcgggccgggcacgcatcaggtcagcatagccgagcatcgcggtcatcggggtcttgacttcatgcgtaaacgccgcaataaagtcctgctggctctgcgtagtccttgataattcgctgatttttccttccaccgctgcagccatcgcgtcaaagctgcggctcagcgcgccgatttcatca

SEQ ID NO: 14089 - DNA, 4260 bp, Unknown
  gut microbiota DNA sequence
tcggcaattttctcgctggccgtctgcagcgcagtcagcgggcgggtcacgcggcggctgaacagcactgccgcaccgccgcccaataccagcagcgccgccgaggccgccagccacacccgcagttgggcgtcacgggtggcgaacaccgcgctcacatcgtaggcgcagagcatatcggcccgcacgccgggcagatccagcggctgggtcagcagcagataccaccgcccggccgcccgggtcagctgccatgcgttttcgccgtccgtcagggcctgcttcagcgcggtgcgcggcagagccgcaggcaggccggagtaaagtgcatacgcaccgtccagccagagtgccatgctgctgcccgcatcggctgtctgctcggcatactgctgggcagcggacgccaaaatgtaattttcaaactgcgcgctgtctgtggcttgaaagatgatgcgttccagcgcatacttttccttttcctgctgggcctgcagggccgtgcgggtgctggccagactgccggaaaagctctgcccggtcagcagcagccctgccgcgcccagcgcgcaggacagcagcgcaatgcagcccagagatagcttggttgcaaatttcattgctgtttcctcataccagatcgcggccctgcagcgtcacctgcacccaatcctgactgcccgccagatagtctgctgccgaaatgatcccatactccccgcggcaggtggtaaagctgtagggtgcgccgtccgtgccgatgtcatttgtcgtgtagtagatctcgccgtatttcacaagcagcatcgtgtcactggccgccacaataaacgggctgcgctccaccgcctgatccttgagccatgtggtcggcagcggggtgtagacgccggtctcagggttcagcagcccctcgctgtcatcgcgcaccgtcacagggatccagccgtccagccttgcgccttccacgacaccgtatgatatctgtgttccctgcaggtcaagctgtcgggtctgggctgtgcccgcagccaggtcgaattttgtcaccagcccggatttgttcagcacataggccgcaccgttgtggacaagctggacattgcccgcatcaccgccccatgtcatgtcggtgtcggtcatgctgcccgccgtatccagcagacagaggtttttcgtctgctctttctgcgcctcttcgtcggcggccagccatgcgcgcagctcctcatccgtggcggccgctccggccgggttcaagggctgctgctgatagcctgcgctgtgctgcaaaacgattttgtcctgccagcagcctacggcgaaatagtcctcgccgtccggtatgctgcgggtaaagaagcacgccgcaccgccctcatccagacgaaaagcggaatattcgtcatagctgcgcacaaatgtatacagtgctgtgccatccgtgtaccagatataggcattggtcaaattgggcaggtcatcaccctcggccacacggcggcggtcactgccgtccggattgctcacatccagataggcgccgtcactctcattgtggcggccatccacaagccaatagagccggtcgcccacgggcagcagcacggcttgcggcacgcagccgttacggatggccgtcatgtaggccgggcagctttcatccgcatggctgcagccgagctttttgcagaggatgcgctgctcgcccgtggaaaaatcaatcgttgttgcgaagtattttccggcatcgtcaatgttcatcgcgctatagacggcatcttggcccaccgccgtgccccatgccgtataaatgggcgtaagcgttccctgcacggcgggtgtttctgtggtgggctctgcagtctgcacgggcgcggcggttgtctcggtggtcgtgcctgcaggcatatcctgcggcgcggccgtgcaggccgtcagtgccagcgccagcagacaggcggtcagccttgcggtgtgtttcatcgtggttatccccctttgtttgttgtacccccagcatagtgcaggattgtttccggttggttacagttttgtcacgggcgggttacattttattccttttccagcatatacccgatctgccgcacgctgtgcagacggtcgccaaggctcagcttgcggcgcaggcgggcaatgtgggtgtcaagcgtgcgggtgtcacagcccgtgccgtcatcgccccagacggtttcgtacaggtaatcccggtacagcgcccggccgcggttgcgcaaaaacaagagaagtaagtcatattccttgcgggtcaggtgcatttcctcctcaccgcgcagcacacggcaggccgcagcgtccaccgtatactcccacatcgtgtagacagcggtgctgcgtccggcgcgccgcagcacgctttccacccgggccacaagctcggtaggggcaaacggcttgacgatgtagtcatccgcgccgctgttcagcccgcgcacccgctcagccacagcgtccttcgctgtgatgaagatgcagggcgtgcccgtgggccgcaggtacgccagcagatcgtacccgtccagatggggcatcatcacatcgagcagcacgagatcatagcggttcttttccagcaaatccgccgccgcgcggctgtcggtcacggcctggcagcggtagccagcctccgtcaggatgcgccgcaccagcatggcaatggcggcttcatcgtccacaatcaaaatcggattcatactgcgatcctcccttataccccccattgtacaacaaaatgttacagcttggtgaacttttggccaaaattcgcagaccagctttgcaagactcctccgcgcggatcgtttgcccgtacaaaaagctccatccccttatttacggtgcaaatctattggaaagaatccttgacaaattttgccttcgttcggccttcttcaaaataccacaaaatttttgttgtggcggctgatggaattgcaatcatggggcatgggatggtataatgtgtaaatagggtggtatgcccttccgctttggcggtacatgttatattgtaataggttttatctgaggagttgcggaatgaaaaaaaacgatctttctcccgaggccttccgctttgaaggcaagatgtccctgaagcaggcactgccgctgggcatgcagcatgtgttggcgatgtttgtcggcaaccttacgccgctgcttatcatcacgggcgcctgcggcctggccggcggtgaatttgccgacctgcgcgtcacactgctgcagaatgccatgcttgtggcgggcatcgtcacactggttcagctgtattccatcggccccatcggcggcaaggtgcctatcatcatgggtacctcctccggcttcatcggggtgttcagctcggtcgcagcctcgatgggcggcggtgtgctggcctacggcgcgatcatgggtgcgtccctgatcggcggcctgtttgagaccgtgctgggcttctttctaaagccactgcgcaagctgctgccctctgtcgttaccggcacggtggtgctttccattggtctgagcctgatctcggtcggcgtaaactccttcggcggcggcaacaccgcgcaggacttcggctcggtcgaaaacctgctgctcgccatctttgtgctggtcgtcatcctgatctgcaagcactccggcagcacctttttgaattcctcctcgattttggtgggcatcatctgcggctacattgcagcgtttctcatgggccttgttctgcccaccacggcgctgaacgccgagggcgttgcctacaccaaggcatgggtgctgaactggaacaaggtggccgaggccaaatggtttgcattgcccgagctgatgccggtcaagccggtgtttgatatgcgcgcaatcgcaccggtcatgattatgttcatcgtcacggcagttgaaaccgtgggcgatatttccggcgttatcatgggcggcatggaccgcgaggccaccgagaccgaactgtccggcggcgtcatctgcgatggtatcggttccagctttgccgcactgttcggcgtactgcccaacacctccttcagccagaatgtcggccttgtcagcatgaccaaggtcgtcaaccgctttgcgctggccaccggcggcatcttcctgattctctgcggtctggtgcccaagctgggtgcgctcgtctcgatcatgccgcagtcggtgctgggcggcgcagcggtcatgatgttctcctccatcgtggtgagc

SEQ ID NO: 14090 - DNA, 3326 bp, Unknown
  gut microbiota DNA sequence
atatgaattaacggcgcggcgatgcggtatcagccggcaatttttttaagataaggcgcaggggaaggaaaatgaatttcaaaaacagctatgaagacggaatctattcttctgacatgacaaagctgggagacagtgtgcttcagtcgatgcaggaaacgattcaaaaaaacggcggtgtcgggaccattaccgggtactttgacgcggatctgtcgattttgtcgatcagtgatttgctgctgcaccatctggggtacagctacgaatcccttatggcgcagacaaagggctcgctgaaaaagcttttttacggggagaatgtcactttccttgagaatgaccgctttcgtcagattcatggtgcgggagaagggcagatcctcacagcggacggcgcccccgtctatgtgcgcctctacaaagaaaatacagcggatgccgccggaaagccggtctgggtcatgtccgtgcagatcaactgggcgtatgagaatctcgctctggtcaatgaatccacacgctcggcgctctggtattttgactgcaatgaaaacagtgagatcgtcaatgtgtgttggagccatgcgtttcggcgcatccttgggtatcgtgatattctggatttcccgaacgagctggctgcatggtcggagcttctgcatccggaggataaggaccgtgtcctgaagctgctgcaggacacgattgcagacaaaaccaatcagacaaagtataaggtggagtaccgactgaagacaaagggtggccgatacctgtggttccgggcgtctgcggaggtgatacgccgtctggatggctcggccaagcgaatcgccggaatcctcagcaacattgacgcagaaaaaagaagccggatgcaggcgcagcgggcagccgcctttcaccgcgcgttcaccagcgcaaacctctgcgaatactatgtgaaccttgaagaaaacacatttgacaccttcaaggtggaagcctccctgatgacggcctttgagcagagccatacatgggatgagctggtcaggttctttgtggacaactatgtcgttgcacaggacaaaaaggccgtgacggatttctataaccgcgcctacattgcagaaaaattgaagggactggacaccgagctgtgccaggaatgccgcatcatgctgaatggcgaggagcggtgggtccgcaatgtcgtcatgcgcggtgagatagaagattccgaatatgcgatgatcttcctgcgggacatcaccgagtccaaggcagagacggcgcggcggatgcagatggcctcagacaacgcatcgatggatcttttgattaagagtatggtgcgtctgctggaccgctttgtcgtctgcgatcttgagaatgaccggtatcggttctataatctgcagggggaaatgatatacgcgccgaccggcacctaccatgcttttgtggagcaggtgactgcaaagtataaaacgcttgagccgctggaagctttgaagacggcgatgtccccggaaaatatccgtaagaacctgaccgcagaaagcgatgtctataaatttgaatactgctctctggacgaaaacacctacaaaattgcctcattcattccgctggagtgggagggcacaagactggtaaaggctctgctggcctccatggatgtgtcgcaggagaaaaaggccgagatcgaatcccacagggcgctgaaggacgcctaccgcgcggcggagaatgcaagccgggccaagacagacttcctctccaatatgtcccatgacatccggacgccgatgaatgcaatcgtcggcctgacagccattgcaggtgcgaatatcgagaatcaggataaggtgatcgagtgccttggcaaaatgacaaagtcgagccgccatttgctgggactgatcaatgaagtgctggacatggcgcgcatcgaaagcggaaagatgtcccttgccgaggaggatttcaatctgccggagctggtcgataacctgattacccttacaaagcctgccatcgatgagcaccggcataattttgaggtccatgtggaccatattgaacacgaggccgtctgcggcgacagcctgaggattcagcaggtctttgtaaacctgatgagcaacgccgtcaagtacaccccggatggcggcaatatcatattctccattaaagaaaagccgaacggtttctcggagcttggctgctacgagttttcgattgcagataacgggatcggcatgacgcccgaattccagaagatcatgtttgagccgttcagccgggcggacgatcaccggacgaccaaggtgcagggcacgggtctgggtatggcgatcacccaaaacatcgtcaacctgatgaacggcagcatcaaggttgacagtgcgccgggcaaaggcacaaagatcacggtgacgatttatctgaagctgcaggagagcaaaagggagcaggaaaaggaactgctcgacctgccggtgctggttgtggacgatgacaaaacctgctgcgaaagcacggttgcaaccctcaaggacattggcatagcaggcgaatgggtgcttacgggcagggaggccgtggagcgctgctatgcgcgccatgaagccggatgcgactactttgccgtgattctggattggaagatgccggaaatggacggcatcgagactgccagaaaaatacgcgagcaggtaggcaaggatgtgaccatcatcatcctgacctcctttgaattcagtgagatcgaggaagaggcccgggcggcaggcgtggatgcgtttatcgcaaagccgctgttccgttcccgcctgacggcgaccctgcggcagtttacatccggcaaaaaggagaaaaacgcccgaagccttctggaaagctttgccaaaaccgattacacgagcaagagggtccttctggtggaggacaacgagctgaaccgtgagatcgctgccgaaattctgggtatgacgggcgtggccgttgacattgccgaaaacggaaaaatagcggtcgaaaaggttgtggcagccccggaaaaatggtatgacctgatctttatggacatccagatgccgatcatgaacgggtacgaggctactgcggcgatccgctcacttcccggcgggcgcggaaaggtgccaatcatcgccatgacggcgaacgcctttgccgaggatgtacagctggcaaagaacaccggcatgaacgaacatatcgcaaagccgctggagtttgataagctcaacgatgttctgaagcaatggctgcaatgatttggaaaaacccataaaaagggctgcggcatgaatttt

SEQ ID NO: 14091 - DNA, 7123 bp, Unknown
  gut microbiota DNA sequence
tacattgcaaaataagagatacccacccacaacaggaggctatcatttcatggcagaagaaatcatcaccgaaaccaaccgcgaaactgctaccgaccatgcctacggcggtgcgcagattcaggtcctcgagggtctggaggctgtgcgcaagcgccccggcatgtatatcggctccaccgggccttccggtctgcatcaccttgtctatgagatcgtggacaacgccattgacgaggcactggcaggctactgcacccatatcgaggtgaccatcaagcccggcaatatcattgaggtatcggacaacggccgcggcatccccgtggacatccagcccaagctgggcatcccggctgtcaccgttgtctacaccgtgctgcacgccggcggcaagttcggcggcgaggactccggctacaaggtggccggcggtctgcacggcgtcggtgcatcggtcgtcaacgccctgtcggagtggctggtcgttcgtgtccgccgcgatggggtagagtatgagcagagcttcaagcgcggcaagccggacggcgatttgaaaaagatcggcccggctgcttctaccggaacgacagtcaccttcaagcccgacccggagatgtttcaggagacaacgctctaccactatgagacgctgctcaagcgtctgcgcgaggaggcgttcctgaatgccggcgtccgcatcaccctgacggacgagcgcgccgatgccgaccgcccgcaggaggagcagaacggcgaagtccgcaccgagacaatgtgctacgagggaggcatccgctcctttgtcagctatctgtgcgagcgccgcgacctgacccccctgcacccgcaggtcatgtatatgaagggcgatggacagggcgctgtggccgaggtggcgctgcagtattacgacaacagctacaatgagctgctgctcagctttgcaaacaatgtccacacccccgagggcggcacccacgaggatggctttaagctggccctgacccgtgtgctgaacgagtacggccgcgccaagggcattttgaaggataaggacgagaacctctccggctccgatgcgcgcgagggcattattgccgtggtcagcgtcaagctgcaggaggcccagttcgagggccagaccaaggcaaagcttggcaacaccttcatcaagggtctggtcaacaatgtggtctacaaggccctgaccgaattttttgaggaaaaccccgctgtggcgaaggctatccttgaaaaggctacgcaggcggcccgcgcccgcgctgccgccaaaaaggcccgcgagctggtccgccgcaagagcgcgctggaatccaaccgcatgcccggcaagctggccgactgtcacgaaaaagacccctccaagaccgaactgttcatcgtggagggtgattctgcaggcggctcggccaagatgggccgagactccaacattcaggccattctgccgctgtggggcaagatgctgaatgtcgaaaaggcacgcgccgaccgcatctacggcaacgacaagctgatgcctgttgtgaccgcgctgggcaccggcatcggcgatgagttcgatatttccaaggtgcgctaccacaagatcttcatcatggccgatgctgatgttgatggctcgcatatctgcacgctgatgctgaccttcttcttccgctatatgcggccgctgatcgaccacggctatgtctatgttgcccagccgccgctgtttaagctgcagaagggccagaatgtcaagtacgcctacaacgatgaggaaatgaagctgctgagcgccgagatgcccggcgcaaaggtcaaccgctacaaaggcttgggcgagatgaaccccgaccagctgtgggagaccaccatgaaccccgacaaccgtgtcattgtccagatcaagatcgaggacgccgagcgcgccgacgaggcgttcagcatcctgatgggcgagcaggtcgaaccccgccgccagttcattgagaaaaacgcaaagtacgcgaatctggatgtgtgatgttccatgtggaacattggtagtatatgcacaatgtatttccgaaacgaaaatggatgcggctgcgcaactatgattatgcctctcaaaaggtttatttcataacgctgtgtacgcaaaatcgtgaaaaaatcttatctgagattgtagggaggggtcttgacccctccgtgcgcgcggaagttacgctgatgccgtatgggtcgattgctgaacatgatttactggaaataccaaaccattttcctaatgtggaaattttgaattataccataatgccggatcatctgcatatcttattggcgctgggctgccgggaggctgctgcggaggggtcaagacccctccctacagtgtcaaccattatagggcaatataaatccggtgtgagccgcaaatgtaagcgtgcaatatggcaaaaatattaccacgaccacatcatccgcaaccaacccgattttgaagaaacatggaaatatatcgacaacaacccattgcaatgggtgttggacggaaaagcagaaagcaatttataacaacagtttaaggtgatacaatggaagaaaatatcatcatggtgccggggtccggtaccaaggtcattgtgcgcgatgtaaagcaggaaatcgagacggcgttccttgattactcgatgtccgttatcgtggcgcgtgctctgcccgatgtgcgtgacggcctcaagcccgtgcaccgccgcattttgtatacgatgcatgagcgcggcaatgacccgcagcatccctaccgcaaatccgccgatacggtcggtgcggtactgggctcttaccacccgcacggtgacgcttcggtctacgatgccatggtgcgtctggcacaggatttcagcctgcgctatccgctggttgacggtcagggtaacttcggctctgtggacggcgatcccccggctgcctaccgttatactgaggcccgcatgtccaagatggcctgcgagatgctgaccgatattgaaaaggacaccatcgactgggaccccaactttgacgagaccaaaaaggagcctcatgttctgcccagccgcttcccgaacctgctggtcaacggcagtcagggcatcgcggtcggcatggcgaccaacatcccgccgcacaacctgcgcgagatcgtcagcggcatgatcgccctgatggaggaccccgacatcgacctggccggtctgatggagcatgtcaagggcccggacttcccgaccggcggtatcatcatggggcgcagcggcatccgcgccgcctacgccaccggccgcggcaagatcacgctgcgcggccgcgccgagatcgttgagaaaaagaacggccgctatgagatcctgatctccgaaatcccctatatggtcaacaagacccgcctgatcgagtcgatcgccgaccttgtaaagaacaagcggatcgagggcatcagcgatatgaatgacgaatcctcgagccgcaccggcatgaagatcgtcattgaaatcaagaaggacgccaacccgcaggtcgtgctgaaccagctttaccgctacacccagctgcaggacacggtcggcgtgatcatgctggcgcttgatgacggcgtgcccaagatcatgagcctcaagaccatgatggagcgctacatcgagttccagatgcaggtcatccgccgccggactgcctttgagctgaaaaaggcgaaggagcgcgagcatattctggaaggcctgcacaaggccgttgacatcgtggacgagatcatcgccacgatccgcgcctgcaagggcggctttgccgaggcgcgtcaggccgtgatggataacttcggctttgacgagctgcaggcagatgccatcgttaagctgcagctcggccgtctggccggtctggagattctcaagatcgagcaggagttgggcgagctgcgcgccgccattgcggactttgaggatattctggccaatgacgagcatgtcaagcgcatcgtcaagaccgacctgaccacgctggccgacaagtacggcgatgagcgccgcacctccatcgaggctgtgtccggcgaggtggacatcgaggatctgatccccgaggatacctgcgtctttacgctgacccacgaggggtacatcaagcgcacaacgctggacacctatcaggcacagaaccgcggcggccgcggtgtgcagggcatgacccagaaggacgaggactttaccgaggagatgtatgtcggctcgacgcatgactacatgctcttcctgacgaatcagggccgtgtctaccgcctgaagggctatcaggtgccggagggcagccgtaccgccaagggcagccatatcgtaaacctgctgcagctgcaggagggagagagcgtcaccctgatgctgcagcagaaggctgatgtcgatgaggacaacacctacgcaacgatgatcaccaagcagggcctcatcaagcgcacgccgctgtcccagttccgcaacatccgcaaggccggcctgatcgccattgcgctcaacgagggcgacagtctggtgtggagccacctgaccaagggcgatgatgaaatcatcgttgccacccatgacggcgcggccatccactttaccgaggaggacgcccgctcgatgggccgtaccggccacggcgtccgcgtcattaagctgcgcgagggcgactatgttgtcggcgccggcgtctgccgcccgggtgccaccctgctgaccatcagcgaggagggcaagggccgccgcagtcgtatcgacgactatcgcatcacgaagcgcggcggcttgggcatccgcaactattccaacggcaatgtggcgggcatcaagatcgtggacgacaccgatgacctgattctgatcagccagaacggcatcctgatccgcatccatgcatcggacatcaacatccagagccgctacggcagcggcgtccgcgtcatgcgtatgctggacgatgaccgcgtggccgttgtggcccgcgtggaccgcgacaacgatgccgagaccgcaaagatcgaggacaccggcgagagcgacccgacacccgaggagctggctgccatcgaagccgaggagctggcccaggaggccgccgaggacgcagcacccgagaataatgacgaagaataaataagcaacaggggagaggccgcgcattggcctctccttttttaaaggcttcccccgaggggctgcgcccgcaggcgcgtgtcggagcgcaaccgccgaaggcggctcttagcgcgtagactgaagctgccgccagttctaaaggcttccccttcgggggaagctgccgcccgcaggcggctgatgagggcaaagttcgcatagcctcccttttaacgggcaacctccgcaggctctcccctcatcagtccgcgggcggggccgcggacaccttcccccaagggggaaggcatcacgcccatgaattttctgcacctactggaaaatatccctgtttcatggtattctaaagtattcccataaaaaaggagcatccacatggaactgcatacaaccatctgcgctctggcgaccccaccgggcgagggcggcattgccacggtccgcgtgtccggcccggacgcctacgccatcgtcagcaagatatttgcgccggtgcggcagggcaaaagcgttgccgatgccaaaggctacaccgccatgctgggccactacctgctgcacggggccgagatggacgagtgtgtggcgctgtttttccgggcaccgcattcctacaccggcgaggatgtcatcgagctatcggtacacggcggcacggcgatggcagacggcctgcaggaggcactgatcactgcaggctgcgtaccggccgggccgggggaattcacccgccgcgcactggaaaacggccgaatgtcgctgacgcaagccgaggccgtgatggaggtcattgcggcgaacggccgacagggggccgcgctggcaaaatcggcgctggacgggcggctggcaaagcgcatcggcaggatacagaccgcgctgcaaacgctgaacgcccacctgaccgcatgggtcgattacccggaggaggatgtgcccgagctgtccgatgaggcgtttgtgcgcaccctgaacgaacagaaagccgagttggacgcgctgatcaacggctacagtgccggtgcggtgctgcgccatggcgtagactgcgtgctgctgggccgccccaatgtcggcaaaagcacgcttttgaacctgctggccggctttgaccgcgccatcgtcacgccggtggcgggcacgacccgcgatattgtcgagcaggcggtccagctgggcagcgtgcggctgaatctgtttgacaccgccggtgtgcgcgaggtcggtgcggacggggatgccatcgaggccgagggcatccgccgcagctggaaaaagttggacgaggcgggccttgtgctggcggtgttcgatgccgcgcagccgctgtcagacgatgatctggagttggcccgcaggtgtcagggccgcccggcaatcgccgtgctgaacaagcaggatctggcaggggagcaggatgttccacatggaacattggagccgtatttcaaaaaaattgtgccgatgtgcgcgaaggacgctgtcggtctgcaggcgctgaccgatgccgtggccgacctgctgggtacggcacagctggacccgggggcggcgcagctttgcagcgcgcgccagctttcagccgcgacccgcgcgcgtgatgcgctggccgaggccatccgtgcaaggcaggacggttttggtttggacgccgccgccgtctgcctgacagacgccctgcaggcgctctgcgacctgaccggcgaggacgcgacagcggcaacgattgatgaagtgtttgaaacattctgtgtgggcaagtaagtaaaaaatggcggagccttctccctctgggggagaaggtgtccgcggccccgcccgcggacggatgaggggagagcctgcgggtgctgcccgttaaaagtaagaccgcgtgaactccgccctcatcagccgcctgcgggcggcagcttccccctcgggggaagcctttaggaagagccttccccctg

SEQ ID NO: 14092 - DNA, 4221 bp, Unknown
  gut microbiota DNA sequence
acctactaccacggaatccgacaggtatcggatgaactttgccgagaaaatcggctgtccgtcatcgaaacggacggcaagggaaaatcttatgacgagtggctaagcggccaggccggcaagcctaccatccgaggtatggtacgcaaagatgtggaacaggctattgctgccgccgacagctttgatggctttatcacggaattgcagaacatgggctacacggtcaaatatggcccgcgtgtggaacacatggctgtgcgccgtaaagacgctcaacgaaatatacgcattggccggctcgacccgcgcttttccgagacagcgctgcgggagtactaccacaaactgcaccgtatgcccaccgaaatgcagcaggaataccggcaggaaaacgccccggcaaaaccgaaatggcagcccacagaattacagcccactgttcggcgagcgcggtatcgcggcaagctgccacgccggtatccgaaggcatccggctttatggcttgctactatcactactgcgccctgctgcggaaagcctaccacggcaaggcaacaaagcgctgctactttttgctgcgtgaggatttcctgctgttcagccgataccagcagcaaacgaaattcctatgggaaaaccatattgaaactatggatgaactgctggcctacaaggaaaatgcagaagtccaaatccaacagcttgcccgccagcgcaaagttttatatcgccaaaagcgtgagccggaacgtgccgcgcgggatgagaaaatcaaatcactgacccagcaaatgaaagccctgcgccatgaggtttacatctgttccgacatcgaaacagatgccgccgaggtgcaggaaaaactacggcaagcagaacttgccgcacaggaagaacgaaatgaggtgaaacaagatgaacaacggaggcgaagcagccgatcagatggtgcgggaagccttacaggttaccgaagtagcaattaagctgtctgcgctgggtattaaaaatgcactggccttatcgctggcctacgccaaggaaaaccctaaagtgaaaggcaaaaccagccttgaccgtctgttgcgggagggcaaggaactaaaaattattgccctgcaaagcaaagacgtgggacagtttaaggaattggcaaagcagtacggcgtcttgttcgcggtcatcaaggataaggcacagaacgaaaaagttgacgtcatgttcaaagctgaagatgtcgccaaactgaaccgcatctatgagcagttgggatatgccattcccaaggtcactacggcagaccgaaaaaaagacccaacccgccgtcaatccggcgacagcttgttgacgcgcgggaagaatcctttggatattgacccacgcccatctgtgcgagccacaattatggcactgaaaaatgcagcgcagaaggcagaacaggcgcaggaaaaagtgcaggatattactgcgaaggaggagcgataaatgtacgaacagcgattgcccatcgaggagtggaaagccaaaaaacaagccgaacttaaagaaaccattgcggggcaaagatccgtattgcaggaagttgtgcaggatggccagcgccttgctgactatctgtacggcagggggcggcttggtagtcatatcacatccggcaatgcagcacttgtgctgcaaaccctgccgcaagcgcgggccgtattgaccgccaaagactgggataaattcgggcggcgcgtaaacaaaggggcaaaaggcatcccgcagcttgtgcgcgtcaatggttattataatgtcggctcaattttcgatgtatctatgacctacggcaacaagccgtatccgattcctgaaatcaagccggagcagatggacaaggccatcaaggaactggagcgcctttctccggtcaacatcatatttcaaaatgagggcgttgtcgggtacgatgccgagcaacacgcgattgtgttcccaacggccatgccgcagcgtgaagtgctggcacgactgcccgccgaaatcgtcattgcaaccgcagagcagcacacgccgggtatctcccaagcgccttatctgcgaaaaacagcaatggccgtttcggtggagttttgcgggcggttttccctgccgatgcccgataccgctgccgctacgctggacgggatggacacccacattccacccggcgaggaacgcaaaacactggaagaaattcgggaactgtctgtgactattggagacaccgttgaaaaggcacatggcctgcagcgcggtcagagcgcaccgcagcgggatgaggcccgctaaacatcatgcgcccgaataaggaccgtcgcacagaaattattctgtacgggctgttgctgataccgctgctgtttgctgccgcagcgctggcacaggcaactgaacaggcgcaggggctggcagaaatcaccgcagtgttgtccgaaattctgcacaccccatccatgctgcgctggtgcgccagcactccaaaatttctgctggcggtgctggtgctttatccgttggccgtctactgctatatgctcgaccaagcagaccgccaccccggcgcggaacatggtacggccaagtggggcagcgcccacagactaaacatcaagtaccgcaacaccaaagactccaaagaaaattacatcttgaccgagaatgtacgcttcagcaccgacagccacgcgcataaacataatctcaacattatcgtaatcggcggatctggtagcggcaagacacgcttttatgtgaagcccaacgcgctgcaactgattggctcttatctttttctggaccccaaaggggagttgacacgcaccctcggcagaatcatggaaacgaaaggtatcagcgtgacagtgctggaccttgtgcattttcaaggccattacaatccgatggcctatctcgaaaccgatgaggacgccatcaagctggcgtttgccattgtcaacaacaccaaacccaaggatgcccccagcggcggtgataagttttgggatgattcttctgtgctgctgatctccgcactgattctctatctcatgtacgaagcccctgccagtgagcagaatttttccacattgatgtatatgattctgaattgccaagtcagcgaaaatgaaatggtcgagaaccccttgatgatgctgtttggagaactggagcgccgcgacccacagcaccctgctgtcctgcaattcaaatcttttatgttaggtgcaaaaaagacgttgcaatccatcttgatttcggcagcggcaaacttgtacatgttcaactcccgcaagtttgcggaaatgacttcgcgcgatgaaatgttcctgccgcgtatggggttggagcagcgggcattatttattgttttgcccgacaatgatacaacttttaatttcattgcaacgatgctctacacgcagcttttcgaccagctttttcggctggccgattccacgccggaatacaacggtgcgctgccggttcatgtgcggctgatgatggacgagtttgcaaatgttgccttgcccaagaacttcaaaaatatcttggcagtgtgccgcagccgaaatatcagctgcgacattattttgcagaacattgcccaactaaaaagcctgttcaaagatgattgggaaggcataatcggaaactgtgacaccctgctttacctcggcggtaacgagtacggcacatacgaatatctttccaagattctcggcaaggaaaccgaacgcaccaaaagccaaagcattggaaaaggcagccggggcagcagcagcgacagcctgcaaaccgctggccgcgaactgtgtatgcccgacgaaatccgccgtatgcgtgacgatgagtgcctgctgctgatgcgcagcgaggacccggtaattgatcgaaagtataacctattaaagcatcccaatgtaaaatatacacccgatgcaggaggtgagccttatgtaatcccgcccgactatatgggtgacgccgtcactatcacaatggacgctgttgccgcagcgacagcacccgaaatcaccgaagaaatgtacgaacagctcgactacttagaaaaacacccggaggaaaattattatgaaaatgaagaaagcttctctcaatacgaccaaggtgactgaccgcaaaatcaagcgcctttatcttgtggcggcgacggtggttgccgctgcttttgttat

SEQ ID NO: 14093 - DNA, 4372 bp, Unknown
  gut microbiota DNA sequence
gccatgcctgcctttgcagatgatccgctgacgaccatcaacaatctgagcgactttgtgttcagcgccatcaaagccatcggcgcaatcctgctgggcttcggcatcgtgcaaatcggccttgccctcaaaggccacgatgccagccagcgggcgcaaggctttatgacgttcttcggcggcgtggtcatttactttgcaaaggatattcttgatatgattctgtaagcgatgccgtctcgttgacttttatgctaaataagcgtataatgtttagcgtgaaagtcaattcgagagaaggtgtgtgctatggattctacaacgaagattatagagttggcttcccaaaataatggcatcgtaactgctgctatgatttcttctgccggaatatcacgcggaagtttgaaatatttggccgatacaggccgattagatcaggtctcccgtggggtatataccctgccggaagtttgggaggatgaatttgtatccattcaagagcgatataagcgtggtgtatttgcattggataccgcactgtttctgcatgatttgactgacaggacaccacacaagtttcacatggcatttccctatggatataatacatccagtccaaaagcagcgggaattttatgctcttgcaagaaagagccttattacagtcttggaatcgcgctggttgacacccctgccggaaatacagtccgggcctacaatgcagaaaaaaccctatgtgaaattctaaaacccatcagccacacggatattcagatcattacagatgcattcaagcggtacgctggccgtaaagacaagaacattcctttgctttcggaatatgctcatcaactacgcgtagaaaaacggctgcgtccttatttggaggtactattatgaaaaacgctatgcagctgaaagcgattatgaaaaagctggcgaaagagaaccagatttccgcacagcttgttctgcaaaattatatgctggaacgattcttggagcgggtatcattatccccgtatcgggataattacattatcaaaggtggctttttaatttcctctatggtggggctgaactccagagcgacaatggatatggatgcaaccataaagggttatccagttacgcaggatgccgtccaaaaaatgatagagcagattctcaccgttcctgttgacgatgacatcacatttacattcaaaagcattggtgaaatccgggagggtgatgaatatactggataccgcgtagctttgacagccgattttccgcctatggcagttcccttaaagctggacattactactggcgataaaatcacaccacgcgaaattcaatatgactacaagttgatgctggaagatcgtcatattcaagttatggcatacaatttggccaccattctggcggaaaagctggagactgtaatatctcgcagtgaccagaatacccggccaagagattattatgatgtctatatccttaccaaactgcaagcagaaaatatagacttccccgctttaggggcggcactgatggctacagccagtaagcgaggctctgattcgattttgcaagattatagagcaattgtggaagcggtgcgaaacagcgagattatgcgtaggcaatgggataattaccgaaaagatttcgactacgcttccactatcagctttgatgaagtgtgtgatgcagttgcttctacaatggacaccctaataacaaacaatttttttaattaagctatgcagtcggcagactttctgtcggctgttttcttttatctgaaagtgggtgaaaacttgaatcaaaactggatcgtcgaaaatctgaacaacgccttttctacatggaatggaaagctgggcgagttatgggggctggtgacaaccggcccccaaacttttaagggtggcgcagtgtggagcgtgatgcagacactgcacaatggtatggttggcattggctatgcactggtcgtgctgttctttgctatatcgctatgcaaaaacacaatgaattttcacgagttaaaacgccccgaagctgcaatccattactttctccgctttgtggcggcaaaagcgcttgtgggatacggcatggacattatgctgaatgtgttttcgatctgtaacggcatcgtcacagatatggccgacagcatgggcggtatctcagaagctatggtgtcgctgcccgcagaaatgcagaccgctatcgaaaatgtgggatttctcgccagcataccgctatggctcgtaacgattctcggcagcttgttcattacggtgctttcctttgtaatgatccttaccgtgtatggccgcttcttccgtttgtatatgtacacagcgctggctccgctgccgctggcggcttttgctggggaaagcacacaatccgtgggcatatcatttttgaaaagttatgtcggcgtgtgcttagagggtgcggtcattgtactggcctgcgtgatttactcagcatttgtcagtacgccgacagtaaccagcggtgaagcgaccactattgtgtggagttatcttgcggaaacagttttcaatatgctcgtattggttggccttatcaaaggctctgaccgaattatccatgaaatgatggggttatgatatgcaaataccaatcaacaaagaaatccgccattaccaagaggaaatctttttggggctgaatctgcggcagatgatttgctccggcgcggccattgccgtggcagttgcggtctatttggggctgaccccgctgttgggtcatgaaacggcgggctgggtctgcattgtggccgctgcgccgattgcagcagcaggatttttcacttatgactgtctgacctttgaaaaattcctgcttgttgtaatagacagcacagttatcagaaacgattggcggttatggaaaaccgaaaacaaatattgcaaaaagaaaaaaggtgataagcattgagactaagtgagtacgcatctacgcgaaaaacgcgcggcagctataaaatgccgcgttcggtgcagcagagcatccccatcgacagaatctatgcagacggtgtttggcaatcgggaaatgtgttcagcatgatgtggcaaatcagcgacatcaactacgccatgcagagtgacgcggccaagcagaatattctaacgcagcttggcacggtctacgcgggcatccccgctgactgctggatgcaagtctgcatcgtcagccagcgcatggatgaaaaagcctttgcccgtgatgtgctgtaccaccgcgagaacgacggctttgatgccctccgcgccgagcgtaaccgccaaatcaaggccaacgcccgcgaaaatggaaatgtggtgcagcataaatacatcatcgtgtccacgaacaaacccggtgtaaaagaggcccgcgaacgctttgtacaggtgcaggggcatttgctgtctgcattttccgccttggaatgtgccgtcacgccgctggacaaccgcgcacggctggaggtactgcacaagtttttccgcatttccgaggagggtcgttttaacttcgagtttgataattgcgccaaactggggcaggacttccgcgattctatcgccccggactgcatccgcttttgcaaaaagcatattgaaatcgaggatttttatgccaagtgcatgacgatcagcgagtacccgcagcagcttgatgataagtttatctccgcactgcttcagcaagtgccatacattgtgttatcaatcgacattgagccggtggaaaccgaggatgctttcaaagaaattgacaatgcgcagatgaaaaccgatgccgagaaagtccgtttcaataagaaatccgtggaaaatctggacttcacttcctccgtaccgcagcggacgcaggagcaggaccgcatcattgccaacatccgcaaagaaatgacggagaacgaccagcagatgtttttgagcctgctcaccgtcacttactttgctgacacactggaagatctcgcgctggaaaccgatgcactgaaaaccacggcggcaaactataactgccgattcaccgagttgtactttcagcaggaacgcgcctttaacacggccatgccctacggtctgcgccgcatcgagagcgtgcgcacgatgctgacgaaatcgctgacagcacttgtaccgttcaatacgcaagaaattctcacaccgggtggcatttgttacggcagaaacgccgtgacaggcaatctcatcatcgggctgcgcactagccttgtgaacggcaatgcaatggttgtggcgacatccggcggcggtaagtctatgttcgtcaaactggaaatccttatgctgtatctgcgttttaccaaggc

SEQ ID NO: 14094 - DNA, 7757 bp, Unknown
  gut microbiota DNA sequence
ccgtcaggcgggaattgtgcggtattgccttagatagtatgtcttataacacagcagctttcagaacgagaggccgccctatgaaacaaccgcgcaagcatcttctctgtctgcttctggctctctggcttaccggcgtgctgctggcaggctgtgccgcagacaccgccccccaaaacgccgacctgccggtcatcaccgtcggctgcgacaactacccgccctttaactatgtgaacggtaacggccagcccgccggcattgatgtagagctggccgccgaggcgttccgccgcatgggctaccgccccgaatatatcacgatcaactggactgaaaaaaacgcgctgcttgaaagcggcgcgatcgactgcatctggggctgcttttcgatgaacggccgcgaggacgaatacatctgggccgggccgtatatgtacagccatcaggtcgtagccgtcatgccggacagcgacattcagacgcttgccgatctggcgggcaagacggtggtcgtgcaggccaccaccaagcccgagagcctgtttcttgatggcaatgacccccgcatccccgagatacgcgcgctccactcgctgcagaagcaggagctgatctacagccaccttgccaagggctacgccgatgccgtggccacgcacgagatctcgctgctgcagtatatggcggactacggcgccgagttccgcattctggaggagccgctggaggtcgttggtttgggcgttgccttttcccgcagcgatgaccgcggcattgcgcaggcgctctgcgccacgctggagcagatgcgcaccgacggcaccacccgcagcattctggcaagctaccttgcggaccccgacaaatatctggaggcagacggctatgcagactaaaccccgccgcaccgcccccggctttcgcccgctgaccatcgtgatcggcctgctgcttctgctggtcgttggcctgtattcgatccggactgacaactttgagggcgagcagaattttgccagccgcgtgaactatataaaggaccagtgctatgactacgccagcctgtcgctggccgtcgagtccaagagccttctgcgcattgccgaggcctgtgaacagtgtgcgcgcgatattcagaccggcaccgctgcggttgaggcggaggtgctgtccggctgtgtggaaaaccactacctgaccggcgtagctgtgctggaccgggacggcaatgtggtgcagtgctacagcaaggagggggcactgccgcagcagctgctgcaggagctgaccaccgcgccgctgctggatgtggccgaccacccgaaaaagacctactccgtccggctggtctgtgacgatgactccttccttgaccttgccgcagcagcccggaccgatgcagacggcatcgtggcggtgttctaccacaccccggccgactatgtacacagctataacctcaactgccagcatcttctggcgggctttacgacccccggcgacggcacccttgctgtggtcagcggcgattcgatcatcgcctccaacgacacaagcctgctcgggcttgcccccgatgctgtgctgccgctgcggctcctgcgtgagcacggccgctttaaccggatggtctatgtgcgggattccaacacacacttccggggatatttcggctataccacgcaggggcgcgacttctatgtctacgcctacctgcccgagggcacgatctacaccacgaccgtcaaaaacctgatgtttacctcggtggcttatctgctcatcgtgctgatgatcgagctggtgcgccaccgcacgctgcagaactatcaggaggaaaaagcccggcaggagcacgcctatcaggcctcgctcgagcaggccgcccaccgggccgaggctgccaacatcgccaagaccgagtttctgcagcggatgagccatgacatccgcacccccatcaacggcatacgcggcatgatcgagatcggcaaccactacagcaccgacatggccaagcaggccgaatgccgtgaaaagatctgggaggcctccggcctgctgcttgagctggtcaatgaggtgctggacatgggcaagctggagtccggcgaggtcgtgctggagcatcgccccttcaatatggtcacgctgctgaccggcctgtgcgatgtgctggaaaagcaggccgccgagcgtggcatcaccatccgctgcgaggacatcgcactgccccaccccgaccttatcggcagcccgctgcatgtaaagcggcttgtgatgaacattatctccaacgccatcaagtacaataaggacaacggcagcatcaccctgaccctgcatgagctgcgcagcgagggcgacaaagcatggatccgttttacctgcgccgataccggcatcggcatgagcgaggaattccagaagcatctgtttgagccgttcgcgcaggagctgctggacgcccgctccacctacgccggcacagggctgggcatgccgattgccaaaggccttattgatgcaatgggcggcaccatcgacttcaccagccgtcagggcgagggcacgaccttctatatcacgctgccctttgaggtcgaccgcgcagcggcaccgcagccgctgcccggcgcaccggccgacctttcggcgctgcagggcaagcatatcctgctggccgaggacaacgacctgaaccttgagattgccgagttcctgctgcaaaacgccggtctgcgcacgaccgccgcccgcaacgggcaggaggcggtaacgctttttgccgcgtccgcccccggcacctatgatgccattttgatggatgtcatgatgccgctgctggacggctacgaggcgacccgcgccatccgcgcccttgaccggcccgatgccgcagcgatccccatttttgcgatgacggccaacgcctttaccgaggaccgccgccgcgcctatgattccggcatgaatgagcatctgaccaagccgctcgagccggacaccctcctgcgcacccttgcaaaatacctgcagcggtgacccgcctgcagcaccaaggccctccccgggtggggagggcctttttcatcggttctgccggcggaaggcgcttggcgacatgcccaacgactttaaaaatacgcggttgaagctgcggatcgtgccaaagccgcattgctccgccacctgggtgaccgggatgctgctgccctgcagcagcatggccgcatggctgacccggtactggtttacaaagtcctgaaagcccgtgtgcagccgctggttgaaatacgccgacagataggtataattataaccaaggtcgtgcgccatctgctccagcgtcaggctgccggtatagttctgctgcacatagttgatgatgcgggccgacagatgggcgtccgcatcctgctgggggcgcgggcgcagggggcactgctccagcgcagcaccgcagatcatgtacagccccgcgagctttttgcaccggttgtttccctgccaaagcagctccatcaggggcgcagcctcgatgcggaacaccgggtttgcaaaggcccgctgccccagctgggccgaaaattccggcacccaatcgtcagaaaatatccacagcacactttgggaggccccatttgtgtggtagctgtgtatctggtccggcagcaccagcagggcctcgccggggtggatctcaaaggtatccgtctccagcgtacaggtcagcgtcccggcctgcacggtcaaaaattcatagctgtggtgcagatgcgcggggaaactgaaattgtggtcacgctggcagtagagatacccccgccggtccgagcgctcggcctcgtagatcagcattgtacgcactccttttcgacgcaaaatccaaacttatgtctattattttatacactctttcttgccagtgcaaggggtaacaggtaaaataatcttaaaaaggaattctgtttccaagaaggagcaaccgctatgtattacatcggcattgatctgggcacctccgccgtcaagctgctgctgatggacgagaccggccggatcgacaacatcgtcagccgtgagtacggtatcgcgttcccccaccccggctggagcgagcaggagcctgccgattggtggaacgctgtctgtgacggtatccccgcgctgctgcagggcttcgatgcctctctggtcaggggcatcggcgcaggcggccagatgcacggccttgtcgtgctggataaggccgacaaggtcatccgcccctgcatcctgtggaatgacggccgcacccagaagcaggtcgattacctgaacaacgagatcggcaaggataagctgagccgttacaccgccaacatcgcgtttgccggcttcaccgcgcccaagctgctctggctgcgcgacaacgagccggagaacttcgcccgcattgagaagatcatgctgccgaaggactatatcaactacaggctgaccggtgtccactgcaccgactactccgatgcctccggcatgctgctgctcgatgttgcgcataaatgctggagccgcgagatgctggacctctgcggcgtgcgcgaggcgcagctgcccaagctgtttgagagctggcagcctgtcggcaccctgaccgccgaggccgccgccgtgctcggtctgccggccgatgtcatcgtctgcgccggcgcgggcgacaacgccgctgcggcagtcggctgcggcgcggtgggcggcggcaggtgcaatatctcgctgggcacctccggcaccgtctttatcacaagcgacaccttcggcgttgacagccacaacgccctgcacagctttgcccacgcggacggcggctaccacctgatgggctgcatcctctccgccgcaagctgcaacaagtggtggaatgaggagatcctgcacacgcaggactttgccgccgagcaggcccccatcacccccgacaagctgggcgcgaatgatgtctacttcctgccctacctgatgggtgagcgcagcccccacaacgaccccgccgcccgcggcgccttcctcggcctgcggatggacaccccgcgcgccgccctgacacaggccgtgctggagggcgtggcctttgcgatccgcgactgtgttgagatcgcccgcgcgcagggcgttgagatcgccgccagcaccctctgcggcggcggtgccaaaagcccgctctggcgcgaaattctggccaatgtgctgggcatccccctgacgctgccccagaccgagcaaggccccggctacggcggcgccatgctggcggccgttgcctgcggggcgtatcccagcgtgcaggcctgtgccgatgcactggtacgcgccaaaagcacgaccgagcctgaccccgcaatcgtagaaaaatacaacgcgcgctatgccctgtggcatacgctttatcccgcactgaaggcgtcctacgccgcaatggaggcactgcaatgaagatctattcggtaaatgacccggaattcaagccctacggccgtgttgtgaccggtctggaggccgccaaggccgaaattctggccgcgctggcttccaccccgctgcccgccgcaacggattatgtcccagaggacgagcgcctgcaggagctgcccgccgccgtggaggtgtcggagcatctgttcggcggcatgccctgccagctgggctggtgcaacggccacaacaacgcgctcaactgtctggaatatcaccgcgacagcgagttcaacctcggcaccgaggatttcgtcctgctgctggcccggatggaggacatggaggacggcaagcttgacaccgccaaggtcaaagccttccgcgccccggccggcacgctggtcgaggtctacgccacgaccctgcactacgcgccctgccatgtcgatgccgacaagggcttccgcgtgctggtcgcactgcccaagggcacaaacaccgccaagccggacatgcagaacaacggcggcgatgactcgctgctgtgggcctgcaacaagtggctgctcgcccacgccgaaagcgccgaggccaaagccggtgcctacatcggcctgattggcgagaatgtgcatatttgaaagagttttcaacaacaatctttaagacggaggaaaaccactatgaaatccaccaacattcctgaggtcaagctcggcattatcgccgtcagccgtgactgctttcctatcgcactgagcgaaaagcgccgcgccgccattgcggccgcctgccagaccaagggcgttgccctctacgagtgcaagaccaccgtggaaaacgagcatgacatgcagaaggccgttgccgaggtcaccgaggccggctgcaacgcgctgaccgtctttttgggcaacttcggccccgagacccccgagaccctgattgccaagttcttcgacggcccttgcatgttcgtggccgccgccgagggtgacggcgacatgatcaacggccgcggcgatgcctactgcggtatgctgaactgctcctacaacctcggcatgcgccacctcaagggctatatccccgagtatcccgttggcaccgctgaggagatcgccgacaagatggccgagttcgtccccatcgcccgcaccattctgggcgtccgcgacctgaaggtcatcaccttcggcccccgcccgcaggacttcttcgcctgcaacgcccccatcaagggcctgtatgagctgggtgttgagatcgaggagaactccgagctggacctgctcgtctcctacaaagagcacgcgggcgacccccgcatcgaggaggtctgcaaggacatggctgccgagatgggcgagggccactactaccccgacctgctggcccgcatggcgcagtttgagctgaccctgctcgactgggccgagaaccacaagggcagcaaaaagtatgttgcctttgccgacaagtgctggcccgccttcccctctcagttcggctttgagccttgctatgtcaactcccgccttgccagccgcggcatccccgtctcctgcgaggtcgatatctacggcgctctgtccgagtacatcggcatctgcgcctccggtgacaccgtcaccctgctggacatcaacaacagcgtgccgaagtacatctatgacgaggacatcagcggcaagtttgactataagctgaccgacaccttcatgggcttccactgcggcaacacccccgcctgcaagatgtgcggcgaccgcgccgtcaagtaccagctgatccagcaccgcctgctggagccggtcggcagcgatcccgacttcacccgcggcacccttgagggtgacattgccccctctgacatcaccttctaccgcctgcagtgcgacagtgagggtcagctccgcgcctacatcgccgagggcgagatcctgcccgtggccacccggtccttcggcggcatcgccatctttgcgatccccgagatgggccgtttctaccgccatgtgctcatccagaagcgctacccgcaccacggcgcagttgccttcggccattatggcaagaccctgtttgaggtgctgaagttcttcggcgtcgcggacattgcctacaaccagcccaagagcctgccctatcccaccgagaatccgtttgcctgattcccgcgcagccaaagctatttcctaaagccataaagaccccccgaccgcttgtaaaacaagcagtcgggggtttactgtttgttaaggcttccccctagggggaagctcagtttgtag

SEQ ID NO: 14095 - DNA, 2325 bp, Unknown
  gut microbiota DNA sequence
agaaaggcttcccccactggggaaagccttttatgcagaggtaaaccatggaagaaaaatatctgatcaccatcaagggcacgatggagcagcggggcgacaccgacacggtggagcttatgacccgcggctcgctcgtccacaaggacggcgcctactatatcgtatacaaggagaccgagacgaccggctacgagggctgcaccaccaccgtcaaggtggccgatgacgcccgcaaggtctcgatgctgcgctacggcaagcagtcgagccagcttatcatcgagaagggcacccggcatctctgccattatgagaccggctacggcgcggtaagccttggcgtggccgccgatgtcattgagcatgcgctgagcgaggagggcggcaagctgaaattcagctacacgctggactccggcgcagagaatttcatcagccggaatctggttgacattacggttgataagctgccggaagcgtaaaaacgcgttgcccctaccgcgttattgcaataaaaaattccccacaggaggttcatcatggaatataaaaactacaacccccgcgcggcggcgctggcgcaggcccgcaccctgctgaccgatgccgtcaaggctgccatcgctgacggtaccctgcccgaagctgcgctgcccgacttcatcgtcgagatccccgccgatgtcaaaaacggtgacattgcctccaacgcggccatggccggtgcccgcgccttccacaaggcgccgcgccagatcgccgaggctatcaccgccaagcttgcgctggacggcagcctgttcgaccggtttgagatcgccggtcccggcttcatcaacctgttccttgcgcaggactggttcaccagcgttgtgcgcgccgccgtggccaaccccgagtacggccgcaccgatgtcggcgcaggcaagcgctacaatgtcgagttcgtctccgccaaccccaccggcccgatgcacatgggcaacgcccgcggcggcgcgctgggtgacggtctggccgcctgtctggactgggcgggctacgatgtgacccgcgagttctacatcaatgacgcgggcaaccagatcgagaagttcggcaagagccttgccatccgctacctgcagctgtacaagggcgaggacgcctgccccctgcctgaggagtgctatcagggcgcggacatcatcgcccgcgcgaaggagtttgccgagctccacggcgattcctatgtggaaaaggactttgacgagctgaagaaggccatcgtggccgatgccctgcccaagaacatcgccggtctgcagcgcgacctcggcaagtaccgcatcgagtacgatgtctggttccatgagagcgacctgcacaactccggcgcagtcaaggccgtggtggacaagctgctggagagcggtgcctgctacaaggccgaggacggtgcgatcatgtaccgcagcgcccagtacgccgccaagtacggcgttgtgaacaagcgcaagaccgaggacggcagcgaggaggaggccaaggacgaggtgctggtgcgcgccaacggcatccccacctactttgccgccgacattgcctaccactacaacaagctggccgtgcgcggctttgacaaggccattgatgtctggggcgccgaccaccacggccatgtggcccgcatgaagggcgcgatggacgccattggtctggacggcagccgccttgacatcgtgctgatgcagatggtcaacctgatgcgcgacggcaagcccgtgcgcatgagcaagcgcaccggcaaggccatcactctgactgacctgctggacgaggtgcccatcgattccgcgcggttcttcttcaatcagcgcgaaagctcctccacgctggactttgaccttgatctggccgtgcgcaacgacagcgagaacccggtctactacgtgcagtacgcccacgcgcgcatctgctccgtgctgaaaaagctggagagcgagggcgtgaggtttgaaggtgccgaggccgtggatgccgctgtgctgaccgaccccgccgagcaggcactgatccgcctgctggctgccttccccgctgagatcgccgctgccgccgagaagtatgacccggcccgcatcacccgctactgcattgatgtggcgtccgcctaccaccgcttctacaacgcctgccgcattcttgatgcggagggcaccgtgcagcagggccgcattgcgctgtgcctggccgtgcgcggcgtgatccacaacatcctgacgatgttcaaggtcaccgcaccggaaacgatgtaaccccatgccttcccccgaggggctg

SEQ ID NO: 14096 - DNA, 7879 bp, Unknown
  gut microbiota DNA sequence
aacggtgacatgctcttcctgccggtcggcgcatcgaagccggtccgcgtgcagggcacctttgtcactgatgaggagatcggtgccgtgctgagctttatcaagtccacctccaccgcacagtacgatgaggaaatgatagccgagatggagcgccgtgccgttgccgaaaaaggcagcaagcggggcggggacgatgacggcgaggcaggcggcgcactggatgccatgtttgagcaggctgttgagtgcgtcatcgaggccggacaggccagcaccagccttttgcagcgccgctgcaagctgggctacgcccgcgcggcccgcatcatggaccagatggagcaggaaaagatcatcggcccctatgagggtgccaagccccgtgccgtgctggtgacaaaagcccagtgggaggagcgcaagctcaacggtcagtatgatgaataagcagaaaggctggcgcatcgcagccgctgtgctggctggcttgcttctgctttctgcctttgtcattcagctggcgggcggccgcggccctctgccagactggcagcagctgcgcgctgcgctgggcgtaccgctccgcacggaggaaagcgtaccgaagcctgcccccggcagcaccgctgtgtatgtgctggatgtcgggcagggtgacgctgttttgatttgtcaggacggtgcgtactgcctgatcgacaccggccccgccgaggccgaggatgcactgctctacgacctgcatgcactcgatgtagagtcgctggactatctggtgctcacgcatccccatgccgaccataccggcaatgcccgggcggtgctttcctatttcccggtcaaacagcttttgctgccgctatgggagccgggcgctgatgataccgctgactggccccgccggctggctgaatgtgccgcagaaagcggcaccgagctaatcacagcggagtccggggatcgctacccgctgggcggcggcacactcatgattctgcagggcggcagcggagatgccgcaagcgtcaacgatatttcgctctgcactatgttcacggccggagacttccgttttctcgacaccggcgatgccgaggaagccgccgagcagcggcttcttgatacctacggctccgccctgcatgccgtgctttacaaggcagggcatcatgggtcgtatacctccaacagtgcagcatttctgcaggctgtcaagcctgcagccgtggctgtcagctgcgggcttgataatgattacggccacccccacagtgccgcactcgaaagctttgcggccgccggggccgaggtgtaccgcaccgatctggagggcagcctcacctttctatggcagaataacacgctcagcgtggagaccaccgcagatgcctgcgcgcctgcagcgtaacgacaaggagttacaaatgacgatcaccgaacaattcaaagccaaacgctgtgttttctcgatcgagtgctttccgccgagacagaccacccagatggataagctgaaagtcaccctgcagcagatgcagacgctcaaccccgggttcatcagcgtcaccttcggcgcgggcggctctgccggcggcgtttctactgccgaggttgccgactatatccagaacgagctgcaggtccccacgcttgcgcatctgatctgcatgggcaacgaccagatccgcgcggctgagattctcgaccagctcgaggctgtcggcgtccgcgatgtgctggccctgcggggcgaccgcagccccacccgccccgaaagcccggacttccgccatgcgagcgacctgacctccttcattaaatggaagaagccggatttctcggtacatggtgcctgctatcccgaggggcaccccgaggcagacaccctgctgcacgatgttgagaatctgcggatcaagcaggccgccggtgccgagcatcttgtgacccagcttttctttgacaacatgcatttttatcgtttcctcaatctggcgcgccgcgccggcatcacgctgcctgtttcggccggtgttatgccgatcgtcaagcgcagccagatcgagcgcacggtttcgctttcctcggccagcctgccctcggagtttacccgtatgatttcccgctatcaggacgatccggcctcgctgtatgatgccggcatcgactatgccgtcaagcagctgcgcgatctgatcgagggcggtgccgatggcatccacctgtatgccatgaacgatgccgccgtggccgccaaggtctacgatggcatccgggatctgctgtaatggagcgccgcaagcctgccgccattgaccgtgccacagcgctgcgctatatgggggccgccggttggacgccggatgccgctaccgcagccctgttggacaaggcggaggagcaggtgctggcagcggctgctccgcgcgctgtataccgccgcctgccgcgcacagcactgccgcttgatgactgcggcacagatcttacccgccatctgctcggctgcggagaagtgctgctgctggctgcgacccttgggtctgagatcgacaagctgctgcgccggatggaggtatccgacattgcgctggcaaccgccgccgatgcgctggcctccgtgctgctggagcaggtctgtgatgcgctggaaagcgagctgcgcgccgctgtgcaggcgcagggcgatttcatgaccgggcgctatgcccccggctatggtgactgcccgctggagctgaacgataccctttgcctgaccgtggacagtgtgcgaggctgcggtctggctgtgaccccccagcacctgctgaccccccgcaaaagcaccaccgccattgtaggcattgccgatcaccctgtgaccggcacccgtgcaggctgtgcgacctgccatctgcgggatacgtgttcgttccgcaagcgcggcacgacctgtttcaaacaagatcgataggggagaatcgtatgcagatccgtgaagtatttgaccgtaagcgctttgtccttctggacggcggcatgggcacccagctgcagacccgcggcctgcagcccgggcaaaagcccgagctggccgctctggaaatgccggataccctgaccgccatccacgccgattacgcccgcgccggcgcggacatcctgctggccaacacctttggtgccaacgccaaaaagcttgcaggctgcccctgcacggtcgagcaggtcgtttctgcctcgattgcctgtgcgcgcagcgccgccgcagaaaccggcgcactggtagccttggatatcggccctctgggtgagctgctggttccggccggcaccctgcgctttgaggatgcctacgccgagtttgcgcaggtcatccgtgccggtgcagcagccggggcggatcttgtctttctggaaacgatgacggatctgtatgagttgaaggcggctattctcgccgccaaggaaaactgcgccctgccggtctttacctcgatgagctttgagagccgcggccgcacctttaccggctgtacggtggaaagctacgccgtcacggcagccggcctcggtgccgatgccgtgggcatcaactgctcgctgggtcccaaggagattctgccgtttgcacagcggctctgccgcagcgtccccgccggtgtgcctgtttttgtcaagcccaatgccggtctgcccaacccggacggcagctacaacttgaacgccgcagaatttgccgccgagatgaaggcgtatgcctcgatcggtgtttcgatggtgggcggctgctgcggcacaacgcctgcctttatcgccaagctgcagcagacctttgccccgctggttcctgctgaaaagattcctatccgccgcagctgtctgtgtacgccggttcgctttgtcgaggtggacggtatcaccgttgtgggagagcgcatcaatcccaccggcaaaaagcgtctgcagcaggctttgcgggacggtgacagcgcctatccctgcgcacaggccgtagctcaggccgaggctggtgcccaggtgctggatgtcaatgccggtctgcccggtattgacgaggccgccacactggagcatctggtcaaggacctgcaggccatcacggatctgccgctccagctcgattcctccaacccggaggctctttcccgcgcgctgcgcatctacaacggcaagcccatcgtcaactcggtcaacggtgagcaaaagacgctggacaccatcctgcccctttgcaagaaatacggcgctgccgttgtcggcctggcactggacgagcacggtatcccggctgatgccgaagggcgctttgccattgcaaaacgtattgccgctgccgccaatgcggccggtatcccgaatgaggatatttacatcgactgcctgacgctgaccgccagcgcccagcaggagggcgctgttcagacgctggaggcgctgacccgctgcaaaaaagagttgggtgtgcgcacggtgctgggcgtttccaacatcagctttggtctgccgtgccgcggctatctgaacaccaccttcctgacaatggccatgtcggccgggcttgaccttgccatcatgaatcccaacacgccggagatgatggccgccgtgcgcgcctaccgggtgctgacaagtcaggacaagcaaagctccgactatgtagccgcctacgccgatgtacagatccagaccacccagacgagcaagtccgccgccaccgtagctgaggtcggcgcggctgccccgggcggagatgcgctgtttgaggcggtacggcgcggcttgaaagccgaggcccgcgctgccgcagacgctgccctgacgatgcgggagccgcttgatgtcgtaaacgcctctctgatccccgcgttggatgccgtgggggatggctttgagaaggggactgttttcctgccgcagctgctgcaggcagccactgcagcacaggccgcctttgagtccatcaaggcgaaaatcgccgcctcggggcaggcacagggcagcaagggcaagattgtcattgccactgtcaagggcgatgtacacgacattggaaaaaacatcgtccgcgtcattctggaaaattacgggtacgatgtgcttgaccttggccgcgatgtcgcccccgagcgcgtggtggaggctgtacgccagacgggtgcaaagctcgtaggtctgtctgccctgatgacgaccaccgtccccaatatgcaggccacgattgaggcgctgcacgccgccgggttagactgtaaggtcatggtgggcggcgccgttcttacaccggactatgcccgggacatcggtgccgattactactgcaaggatgccaaggccagcgccgatctggccaagcagcttttgggataataccaccgccgcgtttcgctgatgaaacgcggttttttcgcaatcagttgtaaaaaatacaagtatgaccccatacgccttgcagtttctgtaaaaatgcggtatactaagtctgtctagcgtttttatgcattttccttattttgtatggtttacaggagttttcttttgaaacatgctgctaagatcgccgcttttctggcgattttcgtctttttaaatcttatcctctgctgctttatgccgccggacaatggttccagccttgccatgtggcgcgcataccatgaaaaggaacaggtcgacattgctgtaatcggttcatcacttgcctcctgctcactgccggagaacgaattgtctgcagcaacgggaaagaccgtcagcctgatggcgacaaacgctcaaagctgggatatgtcaaaaatcgcactcgaaaccgtcctgcgggagcacacgccggagagggtcatacttgtaatggaccttgccaacatgaccggcgatccttttcccaaggcgcagaaagcttttttctacgctgaactgcagacagcttctttcaaggatgtccccctcgaatttcttcgccatataacaaaccgggacaattttacaacggacggttcactgaatgcatttttcccgtggcaaagcggccgctggccgactgactggctggccgctatccggcaaaaggcggccggtgcctataagcgcctgtctgcacgcatcgcacaccgtcaggataacggctacgatgcagttgtggatttcaacactatcggaaaccagaacacctggaactggacatcgcatgatttccaacagctgcatattgatgagcttacagacatgatgacattgtgtcaggaaaagggcgttccgctcatggtcatctctgcacccaaaacgactcttgatgtcatcagctatcaaacctattttgaggattacgcctacttcaagcagctctgcgcgcagtacggtgccgcctactatgacttcaacctcgccaagccggagttgttcttgagcgtcgagcctgactattacagtgaccaaacccacatgaatagaaagggcggtcgtgctttctgtcaaagcatggctacctttctcgacttgctggagcatggacaggatgtagaaagtctttttataacgccggacgaatatttggccaacgccgatttcatcacaaatgtgtacataaccccggaggtacatcccgacaaggtcgttttgcttgccacctcctaccaagggcctgccgtaaagccggaatatgaattctgggcaaaaggaccaaatgatacggattatcaaaaaatttctgattattcggatcgcacatgggcagagttcccgcttacagaacagggaacctatcaatttcgcgtcaatgcgcgcgtttccggtacggatactgcgtttgaccgctattatgaatgctctgtcgatcactgatttaatggatggtgtagtgtggaactgtattccttgagttttgtccttctcgtcacagtcgggctgttgctgtattacaccgtgctgcgccgctgccagtggctctgcctgctggcgctcagccttgtcttttttgcagcaagcggttggcagggaattttctttctgctttttacagcactgacagtctggggcggcgggctgtggcttgcccgtcttgacgccgactgcgccgcacggcgcaaagcgcccggcatcacaaaggacgaaaagaaagcagtcaagaccaagacacagcgccgcaaaaagggcgttgttgcgcttgtgctggtcacaaatttcttggtgctgggctattttaaatattggtcatattttgcacgcctgctgtccggtgcggtggccgccaccgcaccctcggcgctggggctggtcatgccgctcggcatcagcttttacacctttcaggcggtcggttatctgatcgactgcttccgcggccgccacccggctgaaaagaacccggctcggtttctgctgtttatttcgttttttccgcagctgatccaaggtcccatcaaccggtacggagcaatggagccccaactgaccgccgtgcatttctgggagtgggagcgcgccaaacgcgccctctttgtgatcctgttcggtgcgatgaaaaaatacgccattgccaacccgactgcaccaacgattgccgcgatccttgaccggaacgatcccaccctcgccgggtcgatggcactgctggcgatcctgctctattcgctgcagcagtatgcggatttttccggcggcatcgacatggtgctgggtgtcgcgcagctgttcggcattgagatgatgcccaacttccgccagccatatttttccacctcgctgggagatttctggcggcgctggcatatctccctcggcgcatggatgcgcgattatctgttctacccgttcgcgctgaccaagccgatgcagcgattcggcaaatgggccaccgggcactggggcaagcact

SEQ ID NO: 14097 - DNA, 4865 bp, Unknown
  gut microbiota DNA sequence
tggtcatcgcccttgccgatctgctcgagcctgccttcaaaaaaatgaacaccgccctgcatatccccaccgagagccggacatggcatatcttccgcatcctgcggaccttcgtcatcgttaatatcggctggtattttgatcgggtggggctttccctcggagccgcttatctgcgcaacacctttgtgagcttccgccccgaggcgctgactgctgaggctcccgccgcctttgccgctgtcacggggccggcgtggggtatcgttgccatcagcactgtgctggtctttgttcacagcctgattgcagaactgggccgcgagccgtatacagaggttcagcggctgccgcttgccctgcgctggggtctttactaccttgtaatgtttctggtcaccctcagcttcatctgcgtgaccgagacctccggtttcctttacgcaaacttctaagaaaagagattttatatgcagaccaatattctggattggcttgaagctactgcagcccgcactccggagaggatcgctgtcggcgatgcgcagcaggactacacctgggcgcagctggcagaaaacgcccgccgcgccggcagctttctggccggtcataccgcgccgcgctgcccggtcgcgttctatctggaaaaatccgcgccggttttcgccgcaatgctcggcactgtctatgcgggctgctgctattccgtgctggacacccgccagcctgccgcccgcacacagcaggtgctgaacaccctgcagccgtgcctgctcatcactgaccgcgaccatgcagacgccgccgcggcgctcggttgctcctgcagcgtttacctgctggaggatttgctcacagcagcggtacagccttcgctgctggctgcccgccgtgcgcaggctgtggacgtagacccgctgtacatcaactttacaagcggcagcaccggcgttcccaaaggggtcacggtcagccaccgctcggtgctggactttatcccgcagtttgccgccatctttggcataaaagcgcaggatattctcggcaatcaggctccgtttgactttgatgtttcagtcaaggatctctacaccgccttatacaccggtgccaaggtgcagatcatcccgcgtgcctatttcagccagcccaccaagctgatggactatctggcagaccatgccgtcacaacgctggtctgggctgtcagcgcgatgtgctttgtttcgatcatgaacggcttcggctaccgcgtgccttccgcagtacggcaggtgctgttcagcggcgaggtcatgcccataaagcatctcaataaatggaaggccgccctgccgcaggcccgtttcgtaaacctctacggccctactgagatcacctgcaactgcacctactacatcctgccggatcgtgcccttgccccggaggaggtgcttcccatcggacacgccttccccaatgaaaaggtttttctgctggacgaaaacgaccgccttgtcaccgagcccggtcaggcaggggaactgtgtgtttccggcacggcactggcgcttggctactacggtgacccggcccgcacggcacaagccttcacccaaaatccattgaacacccgctggtatgagcgcatctatcgcaccggcgaccttgcgcgctgcgatgcagcgggggaattttattacataggccgcaaggattttcagatcaagcacatgggccatcgcgtagagctgggcgagatcgaggccgcagccatgcgctgcgatgctgtgacgcgcgcctgctgcatctttgatgcagaaaagcagcggctgcacctgttctataccggcagctgcgagaaagcggccctgctggccgcgctcaaagcagccctgccgccctttatgcagccgaacacggccctgcagctggacgagctgccgatgaacaaaaacggcaagatcgaccgcacggcactggccgcactgaccaaaaaaggagcccgaaaatgacagatgccactttgcagcagcttgcggccgcctacggcacgccgacctttgtctttgatgtggatgccctgcaggcgcgtgtgcgcgctatacaggaggtattcggcccggacattaagctctgctattccatcaaggccaatccgtttttgctgcccgccatgtccgccgtcaccgcgcggctggaggtatgcagccccggcgagttgtccgtatgcgagagcctgcaggcagcggatgcgcgtgtcatctattccggcgtcaacaaaacacctgtcgacattgcccgtgccgtcgcagacggtgccggaagctacaccgcagagtcccttttgcaggtccgctatctgcaggaggctgcccgcgcggcagaccgccgtctgcctgtgctgctgcgcctgaacgccggcagtcagttcggcatgtcgaagcaggatcttttcaccgccttaaaaaaacgcgcagaaacaccgaatcttgactttatcggcattcactattttgtcggcacccagcgcaaaaagctgacctcccagcaaaaagagcttgccatgctgcaggcactctatgatgagatcgagcagaccttcagcctgcgcctgccggagctggaatacggccccggcctgcccgtgccgtactttgacggcgatgacttcaccgatacccttgcccccgccagagccctcgcccctgcgctgcaggaggctgcagggtgggcacatctgactgttgagatgggccgcttttacactgccgaatgcggcttttacctgacaaccgccatggattgtaaggatcatgacggccagcattactgcattgtggacggcggcatgaaccacctgaactatcttgggcaaattatgggaatgaagcgcccgcacctgcgccattttgccgcgcagcaggggacgcagcaggactggacgctctgcggcagcctgtgtacgaccaatgatgttctggtgcgcagcatctccctgaccgggctgcagcccggcgacctgctcgtatttgaaaacgccggcgcttactctgtcacagagggactggggcttttcctcagccgcgacctgccgcagatcgttctgtggcaaaacggcgcgccgcagcttgtccgcggcttcacaccaactcatcccctcaacacaccgttgggaggtttataaaccaaaaaggagcattattatggaacaattactggaaatcctgagcgagatcaaagaggatgtggatttcacgacctgcaccacgctgattgatgacggcattctcgattccttcgacatcctgcagatcatctccgcactgaatgaggcgtatgacatctccatccctgcctctgaaatcatgccgcagaacttcaacagtgccgagtccctttacaagatggtggagcgcctgcaggaagattgacggaaaacgcttgcatttatccgggacttattgtataatactaaaagcggacagggctgaattgcgctgtttcgcgtacagatgcaggtcccgcgcgtgggcagcctgtgaaccatgtcaggcggggaaccgagcagcattaagcggtgcttgcacagtgccgcggtcaagcctgcatctgtacgcaaagcagcgcagccgcgtgctctgcccgctttatttgtatcttaacgggaggtgggcagatgtaccgcgccttataccgcaaatggcgtccccagcgctttgcagatgttgttggtcagacagccatcgtcacagccctgcaaaaccagattgcagcgggccgcatcggccatgcgtatctgttcaccggcacccgcggcaccggcaaaacgacctgcgccaagatctttgccaaggcggtcaactgtctggatacctccagccctgacccctgcggcgaatgtgagatctgcaagggtatcgactccggcgctgtcatggacatcatcgagatggacgctgcctccaacaacggcgttgacgacatccgcgacctgcgggacgaggtggcgtatctgccctcggtctgcaagtacaaggtctatatcattgacgaggtccacatgctctccacggcagccttcaatgcactgctgaaaacgatggaggagccgcccgagcatgtcatcttcattctggcaacgaccgaggttcagaaggtccctgtcacgattctgagccgctgtcagcggtacgatttcacccgtatcacggcagatgacattgctaagcgcctgctttatgtagccgggcaggaaaaaatcgatctggacgaaaacgccgcacagctgattggccgtctggccgatggtgccatgcgtgatgcactgtctatactcgacacctgcgccggtgtggataataaggtagatgaagcgctggtacgccgtatggcaggcgtcacagacaggggatacctgtttgagatcagtgatgcgatcgcagccggggattcagttgccgcgcttgaaaagattgccgccctgcgccagcagagtgttgacatgcggcgtctctgcatcgagcttgccggtcattaccgaaacctgatgctcagcgccctgccgggcggcacggcactgctgaccggtatctctcccgaggaggaggctgcctacaatcagcgccaggattttccgcagggcgatgccatccgcgccatcaatgccttcggctccgcacttgagaagatgagccgtggcaccgaccagcgcattgaactggagctggctgtcttttcgctgacgcagccggagattactgccgccgcccctgttgtggtgcagcagaccgcagccaccgcagcgccgcaggcctttgcatccgcgccgcccgtgcagccggctgccaccgtcgtgcccccggttgtacagtcaagtactg

SEQ ID NO: 14098 - DNA, 44442 bp, Unknown
  gut microbiota DNA sequence
cgcgcagccctctgttcctaagcccgcaccgcgcaaagcggaggcggcgcggtctgtcggcccgctggagccgttcggcttctggcctgctgtgctgtccgaccttgaagagaatgatgctatgctgatttcttttctgcggggcacaaaagcctactgtgacggaaagcgtgtgctgtttgaatgcagcgatgccttccgggattatatccgcagcaaccgcgaggtcagcaagcggctgaaggaagcgatttaccgcgtttccaaaaccaagtacagcatcggcccttatgaagagccgaaagccgccgaaaacggcagccccgctgtcagcctggatgaaaccctgcacaccatgcaggcgctgggcgttgacctgaaaatcatcgacaagtaaatttatttggaggaaaacctatgaaagcaagactgcccaaaggctacggccgtcccgattccaacgccatgatgcgtcaggtccagaagatgcaggatgatatccgcgccaagcaggaggagctggaggccaaggaatataccggcaccgccagcggtgagatggtcactgtcacgatgaacggcaagcacgagatcaccgccgtcaagatcaagcctgaggctgttgatccggacgatatcgagatgctggaggacctcatcgcagctgctgtcaacagcgcttcttctgcggttgacaaggactccgaggaggaaatgtccaagatgaccggtggtctgaacatccccggcttgggctgagaggcacaccatgtttcaaaaaacagagccgctggaaaatctggttgaccagttcgcccggtttcccggtatcggccgcaaaagtgctgtgcggatggcttatcaggtcatgtccatgcctgcggaacaggcgatggagctggctcaggctatcgagcacgccaaaaaggatctgcaccgctgccgcatctgtcaggacttcaccacaggtgatgtctgcaagatttgtgcgtcccaaaagcgggaccgcagcgtgatctgcgtggtggaatccccccgcgacatcaaggccattgagcgcacccatgagtataacggtctgtaccatgtactgcacggcgcaatctcacccatggacggcatcggcgccgatcagctctgcatcaaggagctgctggcccgcctgaatgataccgtcaaggaggtcattatggccaccagtcccacggtcgagggggaagccaccgccatgtatattgccaagcttatcaagccgcttggcgtcaaaacaacacgccttgcctacggtctgcctgtcggctccagtctggaatatgccgatgaaaccacactttaccgcgccatggcaggccgcggcgagctgtgacacaatttttcttgacttttaagcgcaggtgcgctacaatgagtatcctgccagtgcaaaggaggtgtacccatggctgaggacaaaagcggaaagaaaatgattgccgtcaaccgcgaggtacgccatgagtactttgtgatcgaggcgttggagactggtatcgagctggtcggcaccgaggtcaaaagtctgcgcgccggcggggtaaacctgaaggattcctgggccgatattgacgatggggagctgattgcaaagggcattcacatcagcccttacgagcagggaaacatcttcaataaagatccgcgccgcccgcggcgtttgctggcacacaaggcagagattcgccgtctgagccagcaaatcaagctgcagggatacacgctggttccgctgtcgctctatttcaaaaaaggtcgcgtcaagctggaactgggcctgtgtaagggcaaaaagctgtatgacaagcgtgcgtctgctgcggcgcgcgatgccaagcgcgatattgaccgcgctatgaaaacgcagcgataaggttgttttcacttcactttcccggtgggggacaccccaccgaatatgcggggctgtaatggtttcgacggggagagagaggcgtgagcagcgggccgtggcggtgacccacgataaaagcgccaacttaaattaactgacaacaattatcctgttgccgtagctgcctaattaggcgctaccgtcctgcctgtgttagtaccgcatagggtcagggcgtcgattaggtactgaacgtgaacaggcttaagctttgcggcccggcatgaatttatgaagctaccaaggtgtagtgcgtgtgtgctcgcccgcaccaagggaaatccaataaacacactgcgcccggagatactctaaccgatttcttttcggacacgggttcgactcccgtcagctccaccacgaaaaacagcgtagattcgttggaatatacgctgtttttatttttagatatttcttcaaaataggtgttgacatttcactctcgattcgctataataattaagctgacttgagacagcccggttcgaccgggtgtagcgcagtttggtagcgcgcttgaatggggttcaagaggccgtgagttcgactctcgccactcggaccagacattgggctgtagcaagtagcaaaacacccgccggagcgtctccggcgggtgtcttttattacatctgtaagccgtagtcctgcaggcactgcatcagccctgtctgtaaatcggagaagccgcttcctgccgctgcgcgaagcttactgccgtccattcgcagactgcgtttccagtcctgcttttctatgtcagggcggatattcagctgttcgcaggcgcgcagcgccgtttcatacatatcgcagtcattttcgctgccgaaattataaatacctcccggcagctccataacctgcgtcagcttttcaacggcctcgcgcacataggtgatgccacgatagtcatggcaggagaatcgcaccgtctgctgcctcatagccgcagtgagcaggtcagcacaaaatttccgcgtatcggcaggccgtaccccggcagatcatacatccaggtcgcacgcagcatcacggcatcaggcagggcagacagcacccgctgctcagcctcccacttgtggcgtccgtagacatttgcagggcagagcggctgttcctctgcaaacggaccgttttcgttaaggcccgtgtacacctgatcggagctaaagcatatcagctttgcccctacgcgttttgccgcctgtgccatccaaagcgggagcaaaacattcgcgcggtaggattcctcaggatgcttttcactgtagcccgtgtccgagattgccgccgtatgcaggatcacatcgggctgtgttcggcagatatactcctgtactgctgtttcatttgctgcggccagcattcctttcggaaagctgcacagctcataccgatcggccagttgggtcatgatacgcgcacccacaaagccgcccgcaccggaaaccagaacctttttcataaaacgccctccgcatcgtgcatagcttgcccttattgtaccgtttttgcccaccccgtgcaagccgcttgacaaattttgcggcattgtgtatactattttctactaaaacacagtgtggatttttacagttccgatactacttttcgccacacaatgacctgtgcaagccggtcattgtgtggctttttctatgcgatttttgtgcaaaaaaaggagtgcacgcgtatgaacgatacctttatgaaagaaaaacctgtatttccgctgctgaccagcatggcattgcccatggtcgcttccatgctggtcagtgcgctgtacaacattgtggacagcctgtatgtggcccgcatcagcgaggaggctatgacagccctctcgctggtctatcctgtgcagaacttcatcaacgccgttgccatcggcttcagcatcggcatcagcgcgttgatctcactgcatctgggggccggcaatcaggaaaaggctgacaccgccgcaacgcacggcatggtgctgtccctgctacacggcatcattgcctccgttgccggtattgctgtcataccgcgctttctgcgcagcttcactacggatgaaaccgttattgcgctggggctgacctatgcgcgtatcgcgtttctcttttccgttatcatcatgactgctatggcttttgaaaagatatttcaagcggtaggctgcatgaagatcacgatggcagggctgtcgctcggctctgtctgcaacatcattctggacccgttgctcatctttggtatcggtcccttcccgcagatggggattgccggtgctgcactggctaccggcatcggtcagatgatgcaggtggtgttctatctcatcgtatattttgtccggccgattcccgtacatctgcgccgcagctgcctgcatttcaaccccagaatggggctgcagctttactcgatcggcgtgcccgccattttaaatctcgcactgccatcggtgctcatcacctttctgaattctctgttggccttttattcacagagctatatcgttgtgctgggcatctattataaattacaaaccttcctgtatctgccggcgaacggcatcgtgcaggggcttcgccccatcattggctataactatggtgccggggagtatggccgtgtcaaaaaggtctaccgcactgccatggccatgtgcgccgccattatggccgccggcacgctgctatgcctcgtcttgtcggagcagctgatggggttgttcagcaccaacagtgaaaccattgccatcggcacgacggcgctgcgcatcatctgcacaggctttctggtatccacgatttcggttgttgtctccggcgcgctggaggggcttggcaaggggatagcgtccttagtgatttccctgtgccgctacattgttgtcatcatgccgctggcctggctgttctgtcgctttgcaggcgcagacggtatctggcatgccttctggctgacagagtttttgacggccgccatctcgctggcggtttaccacaaaagcgtaaagctcaacagaatttaatcgcctaagcgccacacacgccgtgtggtatagccaaaaaagccggtgccctcccgtttgggaaagcaccggctttcagtgtttatgcctgctcctgcacatagcggatgaacgcatcacgctccgctgcggagcggacgaccgctgtatacatctggtcgcccatatccaggcgcaatgcctgcgggatgcgcccgcacatcttgatccggctgccgtatcgcgccatgatctgggcgtgggtgtgcttgtactggtggcagtcgcggcggcccgcatagacacagaaatacttgtggccattcaggtccagactgcgcacctcatcatagcataccatgtccgcccagatctggtagcagtccacagagttgccatagttgatcatatcgggggtgtaaccgcctgccgggcgcatattgacctcaagtgccacataatcgccctttttgccaaggcccggcttatcctcgttcagctggaaaaactcacagtggaaaaaccggcttttagcgccaaacgccttgatcgtgcggaagcccacatccttgagcgccgcaggaaccgttttctgcgtccagtagctcaaatcgccgttttggctgacgatatccagcatcggggtggggaacacattggaggtgtagaacagcggcacacagttactgtcggccacgccgtcaaagctgacgatcgtaccgttgatatactcctccataatatactgcaccgcatggggctcggcatagaattttttcagctctgagaagttcttcagcttataggtagcctcggcaccgcagccgttatccggcttgacgataacagggtagcctacctccttgataaacgcccgggccgccgcgagagtgctgaccatatggtggcgtgccaccggcacaccggccgcacggtagctttccttcatgcggctcttgtacttgatgcgctcgataaaatcattcttggcaccggtattgatattgaaatcggtgcgcagctgcgcatccatctcaagccagtattcgttgttcgactcgatccagtcgattttgccgtagtggaaggtgaagtaagcgacagcgcgcagcatttcctcatagctgcccagattatccacgcgataatactccgtcaggcagtgctttagctcaccgggaatctcatcaaacggtgcatcaccgatgccaagcacgttgacaccgttgcggtgcagccggtcgcaaaaattccagtaagtgttgggaaaatgcgggctgacaaagataaagttcatcgggttcttcaacttcctctctcaaaaatgcgcgtatgccgtttatacaaagcggttctgctcacggctatactcatagccgatctctgcaagcgccgcacaaagcgcctgccggtccgcctgctcacggtcgcagaaagcatccagtgaggcatcacggtcgcgcagctgggtattcacatagctcagcagcataatcgggtcatgggggagcatgggtttacctcctaaaattccataaaaaagagaaaaagccggtcacacgatgtgaccggcattttttccttccaatcagaccgcgcgggtaactttaccagagcgcaggcagcgggtgcaggcgtagatatacttcggggaaccgtccacgatcgccttcacgcgcttgacattggggttccaggtacggttgctccgacgatgagagtgagaaaccttgataccgaacgtgacacccttgccacagcaagaacatttggccataatgcttgcacctccttttcaatagctttaacagtatagcgtatatgtgcagaaaatgcaagagtttttgaagaaaaaaattcagtttttttcataattttgcgtttttgtctgaatccggcgctaaatattgtgttttgcggccctgcggggcttgtcttgccgcggtttctacgatataatagaaaagaattttaatggggtggtgttggcttttgaacggactgctgtctccggcgcggatcgtgcagtatctgctgcgtgccgtggtagtgctgattgcgatcccatttcatgaatccgcccatgcactggccagccaccttctgggggatgataccgccgtgcgggccgggcgtctgtcgatgaacccgatgcaccactttgacccgcttggtgcgctctgcatgctggtgggcggtgtcggctgggccaagcctgtatcgatcaacccgtacaattataaaaatccaaagctcggcatggcgctttccgccgctgccgggccggccagcaattttctgcttgcgtgggtgtcgatgatcctgtacaagctctgctggtacagcgggctggggcagacgctgcctgctctgttgatgttcttttattatatggttgtcatgaatctgagtctcggcgttttcaacctgctgccggtgccgccctttgacggcagccgcatcgcgctgctgttcctgccgcagaggctctacttcaaggccatgaaatatgaacggtacattatgctgaccgttcttgtgcttgtatttttgggcctgttggatataccgctgtcgtggcttgtaaacggcatgtggcggctgatgctgcagctgacgggctttgtggaattgttgtgggggtattgattttttgccggaaattctgacattcaagatagaagattttgagggcccgcttgatttgctgctctatctggtgggcaaaaataagatgaacctctatgacatcaacatcatggcgttgatcgagcagtacaccgccgccatccgggagatgcagcaggacaggatggaggtatccagcgagtttatcgatatggccgcccatctggtacagatgaaaagcgccctgctgctgccccgcagccccgaggctgagcggatgaaagccgagcttaccggccgcctgatcgagtacagcgcctgtaaggaggttgccgcccagctgggcagccgtgcccgggatctatacaccgcagcgcgcgagccgatgctgcttgtcggcgctgccgagtatacccgccgccatgacccgaactggctggtgcaggcctggttcaacctgatgggccgcagcacccgcaagcggaagcccacacaggaaaagtttgagccgctggtcacagcgccctttgtctccgttgcaagccgtgtttcccacatgctgcgcgggctgctcaagggtcgtttgcagaagatgggcgagctgttcagccgcgaggagagccgcagcacgaatgttgccaccttcttggccctgctggagctgatccgcgccggccgcgttcaggtggacgacagcggcgccctgcagcttgaccgcacacaccgcagaagaaaggacaaaacgcaatgacagaacgacaggagcttggctctctggaagccatgctgtttgcccatgcggagccggtggaaaccgcccgcctggcggatgctctgcggctggacacagacgaaaccaccgagctgctgcaaaagctgcaaaaacggcttgacgagcaggaaagcggcatggtcctcctgttttttgagcctgaccgttggcagatgacgacccgcccgtattacggcgaaatggtcaagcggattctcgacacccgccgcaatgcgccgctttcacccgcggcgcttgaggtactggccgtcatcgcctacaaccagcctgtgtcccgcagctttattgagcaggtccgcggcgtagattcctcatccaccgtcacaaagctgcttgataagggcttgattgaggaggccggccgtctggatttgccgggcaagccggtcgcctttcaggtcaccgacaccttcttgcgcgtgtttgggctgggcagcctcaatgatctgccgccgctgcacggtgaggtgcaggaggagcctgcccccgaagccgacagcgatgccgagcagctggaatggaagtgattgccgatggctgttctcttgtttatcctgcggctgattggctggatactgctggcgctgctggttatcctgctcgccgcgctcgttctgccgctggggatacgggttttctaccatcccggcagcctgcaggtcagggcgtattacgggccgctgcagtttacgctttggccgcggggcgacgcgggcaatgcccctgcggcgccgcagcctgcggccgcccctgcaccgtccgcaggcacatcggcagctacagaaggaaagacgccgcctgctgccacagcaggcaagccgagcgccccgcctgccgcgaaggctgccgcaccgcacaccacattgcctgagtcggcagctgccccgcagcccggcagcgctgacacagcgccgccggagcctgaaagcacgcccccgaagggctcactgcccttcggcatctcggagcatatcagcgcagcccggcagcttctgtccgatgacccgatggccttcgccagctgcatgctgggccacacaggctggcttggcaggctgtgcctgcgcgcactgcgtataacgcatctggatattttctggacggttcacgcagatgaagccgctgcgaccgccgcactttacggcgcagagatggcgctggccaacaatctgctggcctttgtgcagcagcatgtccggctgcagagcgaccgcctttggctggagcctgatttcaccgggcagcgggcaggggagcgaagcatttcgttttcactcaaatcctgcgcgggcgtgctgctctggcttcttctgcggctgctgcgccgcctgtggaaagacccgcagctgcagcctgcacacacatcgtaattcgttggtttctatggcaataccgcataattctaagtgccgatacggcgagcgaggtgcggcagttgctaagccaaaagcgcagataatactggatgtcttatcgagcattttggcaacgcagatgccgtaccgcagccgccggagcggtgcttaagccgtcaggcgggaattgtgcggtgttgccctatataaaaggaggaattttccatggctgagcatcctattcagggcctgatgggcgttacgattgagaagatccgcgacatggtcaactcagagaccatcatcggcgaccccatccatgtcgatgataccaccatcattcccgtttcccgcgtcaccttcggctttgtatccggcggctccgatgtgggccccgcctccagcaagcagatgttcggcggcggcagcggcgcaggcgtctcggtcacgccggtcgcgttcctcgttgtctccaacggcaatgtgcgcaccgtccagctggtggagaaggtctccgccgtggacaatgtgattgcctccctgccggagttggtcgacaaggtcgccgcactgatcaaaaaagaaaagccgggcacagataagcccgctgaataaggagtatattgaatggcagaatacagagtgcaaaaagtgctcgccgatcagggcatctgctcccgccgtgaggcggagcgcctgatcgcagcgggcaaggtcaaggtcaacggccaccccgtcaccttaggtgacaagatggaccccgactacgacaaggtcatgatcgacggcaagaccgtccgcatcgtgcgcaagcgccaatacacctacatcatgctgcacaagccgcgcggctatctgaccacccgcgcggatgaccgcggccgcaagaccgtcatggagctggtggccgatgtgcccgccatgctgcgtcccgtgggccgtcttgacaaggacagcgagggactgctgctcatgaccgatgacggtgcctttatcaatatgctgacccacccgtccggcggtgtcggcaagctgtaccgcgtcacggtcaacccccgcgccactgagcagcagatcatcgagatgtccagcggcgttgtactggatgacggcgtcaagacgcagccctgtgtcatccatgtcgtcgtggacgagccgggccgcagtgtgttggagattaccctgcatgagggccgcaaccgccagattcgccgcatgtgctccgcagtcggcctgcaggtcgtgcgcctgcgccgcagcgccgagggtcccgtcaagctcggcatgctgcagcccggtgagtaccgcgagctgaaaaagagcgagatcaacgctctacgcaatgccgccatgaaatccaccgccaaggggtctgcccgccccgctgccccggcaaaacgccccggccccctgaaaaagcgcagcaattccgactgaaaaatgcagaaaattctaaaaatatgcaaacttccacttgtgaaaatattaaaatcgtagtataattcagtcaaatggcgtttttttgtgaagcaattttataaaaaacagtcagttttaccataggaggaacctgtatggcagcaaataagcccggcaaggcagagatccttgcagcattttttgatgacggcacctactcgccgctgtttaccgatggcgcagtaagtgctgcttacggctgtgcaaacggccagaacgcctatgtcgtatttgaggacggttctcccgtcggtgtgcaggatattgagaagaatatccgcgtgctggagatggccgccgagaccggtgcgccggtcgtgaccttctacgactccacgggtgccaagctggagggcggccttgcactgctcaacgccaacgcccgcctgaccgctgagatcgcacgcgtttccggtgttgtgccgcagatcgccgttgtcaccggcacctgcgcgggcaccaacgccatcaacgccgcctccgcagatgtctgcgtcatggctgaggacgccgagctgttcctgaacgctccgttcaatgccgaggacaaggttgccaacgccggctctgccgcatttgctgccaaggccggtgtcgccgccgtcaccgcagcagacgcagtcgccgccgccaagcaggctgcttccatcgttgccctgctgcctgccaacaatctggccggccccgctctgttcgactttgccgctccttccaaggctctcgaccttgtgaagtacaccgccgctgacgctgtcgccgcactggctgacgagggcagcgctgtggagctgtacgccggttacggcaagaacattgtcaccgctctggccaccatcaacggcagcgccgttggcattgttgccaccgagaagaaggctctgtgccacaaatgcaccgccaaggccgctcgttttgtccgcctgtgcgatgcctacagcatccctgttgtgaccatcgtcaataccgagggcttcggccgcagcgagggtgacgatgaggccggcggcatccgtcaggccgcccgtatggccggtgtctatgccgaggccacgaccgtcaaggtcgctgttctggccggtgaggctgtcggtcccgcctacaccgtctttgccgcctgtgctgactggcgcgttgccgtgcagggctgcaccgtggctccgctggcccccgaggctgccgtcacggtcctgtacaaggacgagatctttgcctctgacaacatcgtcaacaccaccaaggccaaggctgctgcctacgccaaggagatctgcagcgccgatgccgctgttgcaaacggttctgctgacgctgttgccgatgccgccactgcccgcgcaagcgttgctcaggcactggatatgctggtcggcaagcgtgctgtgcgtctggctaagaagcacggcaatatcaccctgtaatcatcaaccttgaaatagggaggacatttctatgaaaaacctgatcgttaccgttaacggcgttgcttataatgtcaccgttgaggagggcaccggtgcccccgctgccgctgccgcacctgctgctgcccccgcagccgccccggctcccgccgctgctcctgcacctgctgccgcccccgccggtgccgccggcgctgtctctgtcaccgcccccatgcccggcaacattctggatgtcaaggtcaaggccggtgactccgtcaaggccggtgataccctgctgatcctcgaggccatgaagatggagaacgagatcagcgcaccgcaggacggcaccattgccagcgtcaatgtgcgcaagggcgatgtcgtcaactccggcgacctgctcatcacgatgaactaatagaaaggccgggtgaatcacattggctaagaaacccattaagatcactgaggtcgtcctgcgcgacgcccaccagtctctgctggccacccgtatgaccatggacgaaatgcgccccatcctgcccgaaatggacaagatcccgtatttctccgttgagtgctggggcggcgcaaccttcgactcctgcatccgcttccttgatgaggacccgtgggagcgcctgcgcatcctgcgcaaggagctgccccaccagaagctgcagatgctgttccgcggccagaacatgctgggctaccgcccctacgcagatgacgctgttgagtactttgtccagaagtccgttgccaacggcattgatgtcatccgcatcttcgatgcactgaacgacccgcgcaacctgcagactgccatcaaggcggccaacaaggagggcgcacatgttcaggcctgcatcagctatacgctgagccccgttcataacaacgagtactttgccaactatgccaagaccctggaggagatgggtgccgattccatctgcatcaaggatatggccggcctgctgaagccctacacctgctatgatctggtcaaggagctgaaagagactgtcaagatccccgttgacatccacagccactacaccgccggtcttgcctctatgtccatcctgaagggcatcgaggctggcgccgacattgtggataccgccatgagcccgctggctctgggcacctctcacatgcccaccgagagtctggtcgccgccctgcagggcaccgactacgacaccggtcttgacctgaaccagctgaatgttgtccgcgcttacttcaacaaactgcgcgagaagtacattgccaacggccagatcaaccagaagtccttgggcgttgatgccaacaccctgctgtatcaggtgcctggcggcatgttctccaacatgctcaagcagctgaaggatgccggcaaggaggacaagcttcaggaggttctggaggagattccccgcgtccgtgaggatgccggttatccgccgctggtcaccccgaccagccagatcgtcggcacgcaggctgtctttaacgttatcatgggtgagcgttacaagatggtcaccaaggagttcaagggtctggtccacggcgattacggcaagacccctgcgcccatcaagaaggagttcagcgacttcatcctgaagggtgaggagcccatcacctgccgctttgccgacactctggctcctgagatggataagctgaaggctgaggcctccaagtacgccattcaggaggaggatgtcctgacctacgccatgttcccgcaggtcgctcccaagttctttgagaagcgcaatgcccgcctgcagggtgtcgatgctctgcacgccgactacgagaacaagtctcatcccgtctgatttctatacagccgctcccgctttgccgcgggggcggtcttttatttttgtgacgctcacacaaaaaaacaggtgaaatttcgcaaaaaacgacctccagccttgcatccagcccccaaaaatagtacaatatacaatatatgtgttttatgaggtgtaggttatggttttgagcatgacagggtacggccgcgcaggggctttgctgcatggccgtgacatcaaggttgagctgcgcagcgtcaatgcgcgcttttttgagtattcctcccggctgccgcgctcctgcgcatttttggatgatcggctgaaaaagttggtcgctgccaaggtcagccgcggcaaggtggagctaagcctctccatccagaccgtgacagccgcagataccgttgtctccgtcaactggcagctggcagaaggctaccgcgccgcgctcaacgccatggcagagcggatggatctgaagaacgatgtttccgttggtatgctgtcccgctttccggatgtcctgacccagactgccgcgcccacgaacgaagacgagctgtgggaggatgttcgcgccgttgccgggcaggccgtggacgccttcatcgccatgcgcgccgtggaaggtgaaaagatgaaggcggatgtctccggccgcctgaccacaatcgaagcactcgtcggccagattgaggagaacagcgcaggccgcgtgcaggcctacagtgacaagctgtatgcccgcctgcaggaacttttgggcgaccgtaacatcgatgagggccgccttgtgaccgaggctgcgatctttgccgataaaacggcaatcgatgaggagaccgtccgcctgcacagccatgtggcccagtaccacgagatccttgcgttggacgagccgattggccgtaagctggatttcctgacacaggaattaaaccgcgagtccaataccatcggctccaaatgtcaggatgttgccatcacccggctggtggtggagctgaaatccgaaattgagaagattcgtgagcagatccagaacattgagtaaacgggaggggacaccatgaagctgctgaacatcggtttcggcaatatggtcaacgctgaccgcatcatcggcattgtcagcccggattccgcccctatcaagcgtctggtgcaggatgcccgcgagaagggtgccctcattgatgccagctacgggcggcgcacgcaggctgtgcttatcatggactccgaccatgtcattttgtccggcatcccattggaaagcatcaccgggcgtgctgcagaagaaagcgaagaaaagaggaagtaacgatgaaaggcgagaaatatctgtttgtagtctccggcccctccggcaccggcaaggataccgttgtggcagccctgctgaaaaagcaccccgagattcagcataccgtctcggccacgacccgcgcaccgcgcgatggggagaaggacggcatcaactaccattttatgtcagtggcggactttgaggatcatctggcgcatgaccagatcgtagagcataccaaatactgcgagaattactacggtacgctgcgcagcgagatcgagggccgcatgaagctgggcatcccggtcattctggtcattgaggtcgagggtgccggcaacatcaaaaaaatgtaccccggtgccaccacgatttttgtcctgcccccggacatggccgagctggagcgccgtctgcgctgccgcggcaccgaggacgaggcaaccattcaacgccgcctcaagcgtgccgaaactgagatcgccaactcggtcaactacgatgagcatgtggtcaatatcgccgtggattcctgcgccgatagcctttactccatcatccagttcagactgcagcacggcagcgacgaatgagtctgctgcttgcccgggcggctgtaaatgacgccaatatccattttgaccggctgtattcctacctcatccctgcacagcttgtcggcaaggtttaccccggcagcatggtactggtgccgttcggccggggcaataaggcccggatggcggtcgtgctggcggtggaggaagcggaggaggccgatgccccccagcggctgaaatccctgtacgatgccgcgcccgaggaggcccgtttgacgcccgacctgctggaactggttcgctttttgaaggagcgcaccttctgcacctggtttgaggccgtcaaggctgtcattccctatggggcgcagtaccggcccgtgacggtggacggacgccctgtcatgcagagtcggctgacccgctccaccgaaaagctctacacactggcccgtgcattgcccgaaaagccaaagcccggcccgcgccagctggcggcagtcgaggcactgaaaaacggccctctgaccgcccggcagctggacgaagtggggatttcccgggcaacgctggacggtcttgtcaaaaagggaattttgacggccgccgagcaggacaaggcccttgatttgtttgctgcaatcccttttgacccgcagccgcttaccctttccgcagagcagcagcaggtgtttcaggagttgctgcccggccttgaggatgacaagccccatgcagcgcttctgcatggcgtgaccggcagtggcaagaccatcgtattcctgcgtttgatccagcgcacgcttgcactgggccgcagggcgctggtgctggtgccggagatcagcctgacaccgcagatgatccgccgtcttaaatccacctttggcagccgtctggctgtgcagcactcggcgctcaataacactgaacgccttttgcagtggcgcatgatccagcagggcaatgccgacattgtggtaggcacccgcagtgccgtctttgcaccgctgcagaatctcggccttatcatcatggacgaggagcaggagcatacctatcaaagcgagtctgccccgcgctatgatgcccacgatgtggccaaaaaacgcgccgtgatggaaaacgcactgcttctgtttgcctccgccacgccgcagactgaaacttactatgccgcaaaaagcggccgtctgcagctggtcgagctgcgccatcgctacggtgggcggccgctgccccatgtggattttattgatatgcgggccgagctggctgcgggcaacccgcgcgaggtcagtgtccgccttgcccgtgagctgcaggaaaatctggataacggtgagcagagcatcctcctcttgaaccgccgcggctaccgtaccatcggcatgtgtaccgcctgcggccatgtgctgaaatgccccaactgcagcgtgccgctcgtctaccacaagccgcagcaggcgctgctctgccaccactgtggccatacggtgcagccgctgccccagacctgccccgaatgcggcggcaagatcaactacagcggtttcggcacgcagcgtgtcgaggaagaactgtccgagctgctgcccggtgcccgcatcctgcggatggatcaggactccacctcgcgcaaggacgcgcatgagacaatgcttgcgcagtttgcgcgccatgactatgacatcctgctcggcacccagatggttgccaagggccttgactttgaaaaggtcacgttggtgggggtcttgggcatcgactcgctgctgtttggtcagggcttccgcgcctatgagagtgtgttcagcctcattacgcaggtcgtggggcgcggcggccgggctgagctgccaggccgcgcactcatccagacctctgtggcggatcatcctgttttgcagctggctgctgcccaggactacgagggtttctaccgggaggagatcaccttccgcaggtttgggctttacccgccgttctgttcctttgtggtcatcggctttatcggcgatcaggaaggggctgtgctgatcgctgcgcagcggttcggcgtactgctgggagagcatgctgcccaaaagccggatattccgctgcgcattctgggcccggcgccgatgaacatcacaatgctcaacaacaaattccgttacaagctgacgctgaaatgccgtaacgatgcggcgttccgcgcgcttttgcacgagacactggatgcctacgatgcggaaaagctgccgcagaaagcatccgtgatccttgatttcaattccgatggtgatctgtaaagcatcatcgcccaagatttggaggttatttttatggcactgcgtacaatcgttcaggacggcgacccgatcctgaaaaaagtctgccgccccgtcaccaagtttgacgatcgtctgggcaccctgcttgacgatatgaaggaaaccctgctcgacgccaacggtcttggtctggccggcccgcaggtaggcatgatgcgccgcctgttcatctgccttgacgaccgcgacctgcccgaggaagtccccgagaactacgaatacaagtttattgagttcatcaaccccgagattcttgagctgagcgatgagcaggtcgagctgtacgagggctgcctgtccttcccggggcacaacggcgcgatcaagcgctcgaagcatgtcaaggtcaaggcgcaggatcgccatggcgagtggtttgagatggaggccgatgatatgctggcccgctgcatccagcatgagaacaaccatctggacggcattaccatcatggatcttgccgagcatttctatgaggacgattaccccgaggaaaacgaggactgatttatgcgcatcctgttcatgggaacccctgatatagccgccgaaagccttgccgccctgctggacgccgggcatgaggtttgcgctgtattcacccgccgtgataagcctgtaggccgcaagcagatactgaccgcaccgccggtcaagcagctggctgtcaagcatggcatcccggtctaccagccccgcaccctgcgggacggctcctctgatgacatcatcagggagttggcccccgatgtcgtggttgttgtggcctacggctgcctgatcccgccgcagcttttgcatacagccaagtacggctgcatcaatttgcatgtctcgctgttgccgaaataccgcggctccgcccccatccagtggtccgttctgaacggtgacgccgggaccggggtcactattatgcagctggacgaagggctggacaccggtgatattttgctggtggagccgatcgccatcgaccccgaggagacgagcggcgagctgttcgaccgtgtcagcgctgtcggcgcaaaaacgctggtcactgcgctggaaaaaatcgaggcaggggagttgacaccgcagaagcaggatgacactcaggccaccatggccccgccgctgacaaaggatatggcacagttcgactttacgcaggacgccgcccacatccacaactgggtgcgcggtatgaacccgtggccggtggcttggtttgcacaggacggcaagcgcatcaaggtgctggaaagccgcttggcggagaatccgcttggggcagcccccggcacagtgcttgcgctcaagccgctgaccattgctgccgcaaacggcgcggtcgcactgctgaccgtcacgcccgagggcggcaagccaatggcgggcactgcatgggctgccggccgccgcctgaaggcgggggacaacctgtgacgccgcgccgtctggccgtaaaggcattgatccatcaagagcaggcaggctacgccaatctggtgctggatgctgagctgaagaaatgcgccccgcccttggaaggccgcgacgccgccttcgctgcgcgcatcttctatacaacgcttgagcgcctgcctctgctggactatatcttaaaccaattcacaaaaaagcccatcgccaagctggatgcacctgtgcgcgccgtgctgcgtgcaggcttggcgcaggcgcggtatatgaatgtgccgctgcccgccgccgtcaatgagtcggtcaagctgacccgcgcgctgggcaaatccagcgctgccggcatggtcaacgctgtgctgcgccgcgctgccggggctgccgtttcggagagcgattttcctgacccgctggagcggctttcggtctactactgcctctcccgcccggttgcggagctgctctatgcgcagctcggggcagaggcctttccgctggcagccgccttttaccgcaagcccaaaactgcgatccgcgtgaatacactgcgcaccgatgacgccagcctgacagcactgctgcaggccgaggggcacaccgttgcccccggcccctggcccggtgccctgatcgttgattttgccggctcgcccgccgcaagcgccgccttccaaaaagggcttttccatgtgcaggggctggccagtcagttcgccgccctttgtgtggatgcacgcccggggcagcaggtgcttgacccctgcgccgcgccgggcggcaaaagcctgacgctggccgagtgtatgcaggacaacggccgccttgtcagcggtgagtttgcccccagccgggtgccgctgctgcaaaaggcctttgaccgctgcggcatcacctgtgccgtggctgtcgagaacaatgccgccgtccacaataacacttggccgaaattcgaccgtgtgctctgcgatgtgccctgttccggcttgggcgttatcgccaaaaagcccgacattcgttacaaggatttggacgggatagagaatctgctcgacacacagcaaaaaatcctgcaaaacggggcggattcccttgccgaaaacggccgtttggtgtattctacctgtacagtaaatgttcaggaaaaccaaaatcaggtggaaaaattcctttctgccaatcctgatttccatcttgtgcagcccgagagcgcactgcccggggcagatattacaccgctgggcacggtatttctgccgcataaaaccggaacggacggcttttttgccgccattctggaacgaaactgaactatgatccgttattataaagggaggtgaccccgcatgagtgaaaagatctgtatttccgatatgacgctggatcggctgaccgcctacatcgttggtctgggccagccgaaattccgcgccaagcaaattttcaaatggctgcatcagaagcttgtgacggagtttgcccagatgaccgaccagcccaagacactgctggccgctttggcagagcagtgtacgattgcggcaccgtcgatccgccgccgccagcaatcccgggacggcaccgtcaaatatcttttggaactggccgatggaaactgcatcgaaaccgttctgatgcgctacaaatacggcaatactgtctgtgtatccacacaggtcggctgcgccatgggctgccgcttctgcgcctcgacccaggcgggccgcgtccgcgacctgacggcaggggagattgcatcggaaatctatactgcgcagaaggactccggggagcgtgtctcgcacatcgttttaatgggcatcggcgagccgctgcacaattttgacaatgtgatggattttcttgagatcatctcctgcccggagggtgtcaacatcggcatgcgcaacatcagcctgtccacctgcggccttgtgcccaagatagacgagctggccaaacggcatctgcagcttacgctgtcggtatcccttcacgcgccggacaaccggacgcgctcgggcatgatgccggtcaacgatgcctatccgcttgagcagctgatccccgcctgccgccgctaccagaaggagacgggccgccgcatcagctttgaatattcgatggtgcgcggcgtcaatgacagcagcgagatggctcaaaagctggccgacctcatccgtggcatgggggcgcatgtcaaccttatccccatcaatccggtggacggcagcccctactccgccacagacgatgccaatgtacaccgcttccagaaggagcttgaggcactcggcgtcaacgccaccgtgcgccgccgtctcggcaccgacatcagcgccgcctgcggccagctgcgccgcgaggatgcgcagggaaaataagctctgccattggcagcagaaaggactcaacctgaatgaagatcgccgcgatcactgacatcggcagctgccggcaggaaaatcaggacaattactgtgcgcagcagctggcaggcggcaccgcctggggcattgtctgcgacggcatgggcggtgtaaacggcgggcgcattgccgcccgcattgccaccgataccatgcagcagtattttgcccgccacatgaaggccctgcagcccgggatggaaaagacctttatcatgcgcgggttcgacatcacgaaccgcgctgtctatgaaaaatccacctccgacccggagatgcagggcatgggcaccacgggcgtctgtgcctacgccagccgcggcatggcccatctggtacacgccggggattcccgcgcgtatctgttccatgcaggtacgctgcgacagattacccgcgaccactcgatggtgcagcagctggtggacagcggccagatcacccgcgagcaggcggccatacacccgcaaaaaaacctaattacccgggcgctgggtgtctcggccaatattgtgccggagtacaaccgctgcgagatcgaagaaggggatattttactgctctgcacagatggtctgacgaatatggtgtcggacgatgatattgcacaggtactgcgtgaggtacccttctttgatgcaaccagtatcctggtagaccgcgccctgcaggcgggcggacaggataacattacggtcctgctgatgggcgtggaaactacggaggtcaacaatggataatctgattggcaaacgactggacggccgctactcgattgaggggcttgtgggcgttggcggcatggccaatgtctaccgcggcaccgatctgaaaacaggcaaccagatcgccgtcaaggttctgaaggaagaattcctcgacaatgaggagctggtccgccgcttcaaaaacgaatcgaaggccatctccatcctcagtcatcccaacatcgtcaaggtctacgatgtatctgtcactgataagctgcagtacatcgttatggaatatgtggacggcatcaccctgaaggagtacctcaaacagcgcggcggcgcgctgacatggaaggaaaccgtgcattttgccacacaggtgctgagcgccctgcagcatgcacactccaagggcatcatccaccgcgatgtcaagccgcagaacatcatgctgctggcggacggctccatcaagatgatggacttcggcattgcgcgcttctcccgcgcgcagagccagaccgtcagcgacaaggctatcggctcggtacactatatcagcccggagcaggccaagggcgaacgcaccgatgcccgcaccgacatatactctgtcggtgttatgctgtatgagatgctctccggccgcctgccgtttgacggtgatggtgccgtgtccatcgccatcatgcagatttccgagaagccgaagcctctggcagagattgcccccaacaccccggccggtctgcgccagatcactgaaaaggcaatggaaaaagaccccgacaagcgctaccagagtgcccgggaaatgcttgatgccatcgaggagttcaagcgcaacccctccattcgctttgaatatgaataccgcaatgctgaggacaacccggaaaggagcatcaaccgcgtggtaaacagcgccaagcccagcgccaaatccgcaaatatccgcacaagcgacgcccgccgggtcggcacggccaacccgggccgcagcaaatcgaccaagcgcaagaagaaaaattccggcaggggcttttctctgctgccgatcttcttcggcatggccgtggcgttcgttatcggcgctgccattctcgtctacctgatcttcaccaactccagcaacctgctcttctccaaccgtgccgatgtgcaggtcatcagctttgtcggcatgacgaaggacgagtttctcgccaccgactacaacaaactgctgcgcgccgaatttccggaggaatactccagtgagccggccggcacaatcatccgccagacccccaaggcagggcgtaccgtcaaggaaaagcagcgcatcgtgctgacggtcagccttggcacccagtatgtcacgatccctgaaaccaaaaacatggtggccgaggacgctgagcagaccctcaaggatatgggcctgcgcgtgaccaagaagccgatggtggacaactccgttgccaacggcgcagtcatctactctcagcccgccgccggtgaaacggttgagggcgatactaccgtcattctgtatgtcagccgctctgaggttgcccgcgatgtgacggtgcccagcctgaccggcaagaccattgaggacgcccgcaatgatgtgaaggggctgaccctgtccatccgcacgattgagcaggccagcgaccagcccgccggcaccgtcctgagccagtcgcctgaggcgaataccaccgtgcgcaaatcctctgtcatcacgctggtagtttccacgggcgtgcccgaggccgcacaggagcctgagcagaccggcccgaccgtcaacccggacggtacgatcaccgtgcaggaaagtacctggtggagtgctgacggcagccaccagatccaccagcgtaccgatggctcgatgtggaatgagaacggccagcgctgtgattcgcagggcaatcccatcggctgataagtgaggacaacatggcctatatcaccaaaggcatcggcggcttttactatgtcaaaacaccggacggaatcgtggaatgcaaagcccgcggcatcttccgcaagcgcggcatcacgcctgtggcaggggacaatgtgaccctttctgccgacggcaccatgatcgatgagatcctgccccgcaaaaatgttttcatccgcccgccgatcgccaatctggatattctgttcatcgtcaccagcacgacccagccagtgcccagcacccttgtgctggatcaactggctgcagccgccatctacaaggatgtgcagccggtgctggtggtcaccaaggcagatctggccgccgccgacatgctgtgcaccgcctacgcgggcagcggtatcccgcttgtgcagctgaactacgagaccggtgagggcctcgatgaggtcaagcgctatatcagcggtcacctctgcgccttctgcggcaattccggcgtcggcaagtcaacgctgctcaacacgctggcccctgcgctgaaccgggagaccggccagatcagccaaaagctgggccgcggccgccacacgacccgcgaggtcgagatttttgagatctgcggcggcagactggcggacacccccggctttgccagccttgaagcacaaaagctctgccgtattcccaaggaagatctgcagcataccttcccggagtttgcgccgtatttcgggcagtgccgttttaccggctgctctcaccgcagcgagaccggctgcgccgtgcgcgaggctgtggaggccggaaccatcagcaaaacgcgctacgccagctaccttgccatgtatgaggaggccaatgcgcggaaggagtgggaaaaatgagcaagcgcgccgttatcctgtccgctgtgccggtagcagctgccctcggtcattatgtgcagcccggggactttatcgttgcttgcgatgcgggctaccgcaatgctgcgcggctcggtttacagcccgatctgatcgtgggcgattttgattccgccccgcggcccaaaactacacaggagaccatcgttctgccccatgtgaaggacgacaccgacacccagtatgccgcgcgctggcttctggagcagggctatgatgagatcacgctgctgggtgctctgggcggtgcccggcttgagcatactctggctaacttggctaccgggttgtaccttgccaaaaacggcgtcagcgttctgctggccgatgagcgcagcgagctgcgctttctgaccccgggccgtgcgctggtgctggcacaccacgactggaagtttctctccctctttcccatggagggaacgctcaccggcgtctgcctgcgcggcgtgtactacccgctcgaggacgccgttcttaccgcagagtatcccctcggcgtcagcaatgaatttaccgctgacaccgcctgcctgcagtgcagcagcggctgcggcgttgtggtgctgacccgcgatgatgcgtaacacaccgtaagcgcgctgcatagtatggcgtacacagacacggaaagtgaggtgtatgtcatgcatgtggtcgtggttcgctgcccgcgcggcctgcgctggcttctgcgcgcagccttcagggtatgattttttcccctgcctgttacgggcaggggctatttttttgccctgccgcatataatgccccagaacataaccggaaaggggcaagcaaatatggaactgaaggtgttcaaagacaccatagcatcttatggcggccgctgggaaacgcggctggaattacctgttgagaccgagcttttgatccccgattatctgcccgccgtctttaagatcgtcaaatgcctgatcacgcccgttgtgctgcagaaccgcgtgaccggcaacagatggcagaccgagggctatctgcgctgtaccgtttactaccagagcgaggagcccggtgcccgcctgctgcgcacagagcagaaatttgcctttgaaaaatcggtcgagctgcccgccgggcagtatgccgaggggcctgcgcaggtctggggggagccggaatactgcaactgccgcgcagtcagtgaacatcgcattgatcttcgcggggcgtacatcctgtgtgccgccgtggctgtgcggcgggaacttgaactgctgacctcgctggccgactgcggcattgagcagtacacccgcattttgcagggcatgcaatgcgccgtgactgaggaaaaaacgctgacagccgagtcctctgccgcgctgcccaccaccggggagaatgtgctggacatcaccggcagctttaccgcaggcagcatagtgccggccgccgggcaggccagcgtgcagggaacgctgcagctgcagatctgcagccagaatagcgacagcggcgagctgaccgtgcgcagcaaggatattcccattcagcagacgattgaactgcccggcgtggcggaggacgatgccccgctggtgcgcggtgaggtgctggcctgcgttctcagcgcagcggagagtgcgggcggcgcaggggaggcctcgctctcggtgacatggaagctgcgcatcgaggtttggcgtgccgtacagtaccgcgtggccgccgatgcctactcaacgctctgcaagacacagaccgttcaaacgccctgccgcctcctgcagaaaacggccgacctctcggggcgtatctccgtttccatcgaggacgatctgcccgatgccgagggaacggtcatcggctgctttgtgacgctgggggcagcctgtgccgtccctgcggacggtgaccgggctgaaacccacctgcgcctgcagggaaagggcatggcccatgtgttgatcggcgatgcacgcggggagctgacctgctatgacaaaacctttacctggcagccggacggtgtctggcccggcacagtggatgccgcgtggcccagcatgggcgctgctgccgtccgggtcgtcagcagcaagagcggcgcacggctgcgggtcgatcttgagatcgagacaagcggtatcctgatgcaggccgccagtacggacgccctctgcgatgtggagctgggggaggcctacaatgacgctgacggcccggccctgtacatctattatgcccggcagggggaacgcatctttgacattgccaagcgctaccatgcgcgcgcccgggatcttgccgctgccaaccacctcgatacgaccgacaagccgcctcaggagctgaccaccgaggctgcctgcctgttgattccggctgcgctgtaaaggagggtacacccgtgacacaggaacagatctaccagaacatagcccagcgcaccggcggggacatctacctcggtgttgtggggccggtgcgcagcggcaaaagcaccttcatcaagcgctttgcagagcttatgctgctgccccgcatcaaaaacgaagcccgccgggcccgtgcccatgatgagctgccccagtccgctgccgggcgcaccatcatgaccaccgagccaaagtttatccccgagaaggcggttcggatcgagctttcgggtggcggcagcttccgggcacggctcatcgactgtgtgggctacatggtggacggcgcgctgggccatgaggaaaacgaagcgccgcgccttgtcaaaagcccctggttcgaccacgaggtgccgttcgatctggcagccgagaccggcacacgctgcgtcatccgggagcatgccacggtcgggctcgttgtcacaacggacggctcgattgccgacctgccgcgggaggcttatctggaggcggagcgccgcctccttgccgagctggacgccatcggcaagccctatatcatcctgctgaactgtgccgacccggacagcgcggattcccgccgccttgccgctgaactgaccgaaagctacggccatgccgttttccccctgaactgcacctcgatgactgtggaaacactggaccggctgctgcaggcacttttgtatgagtttcccattcgggagattgctgtgcagatgcccggctgggtaacgatgcttgaaagcgggcactggctgcagagtgccgtctacaccgccatgctggattttgctgcctcgctgcacaagatggccgacattgccggcaagcgcccccagcttggctgcgagtatatcaccggaacctccctcaccggcatggatctcgccaccggcagcgtcacactccgtgtcactgtagaccccgatattttttaccgcatcctcggcgagcagaccgggctggacatcgtggatgaagccagcctgctgccctgtgtcgtcagtctggcacgggccaagcgcgcctatgacaagatcaaatccgcactggatcaggtcgaggccaccggctatgggatcgtcatgccgggtattgatgagctgacgctggaggaccctgaaatcgtgcggcagggcggccagtacggggtgcgcctcagcgccagcgcccccagcctgcacatcatgcgtgccaacatccacaccgagctttcccccacagtgggcagtgagcagcagggggaggagcttatcaaaagcctgctttcggattttgagaccgaccccggcaagctgtggagcacaaacatcttcggcaagagcctgaatgagcttgtcagcgagggcgtgcaggccaagctgctgcatatgccgcaggaggcgcgcactcgtctgcagcagacccttgagcgcattatcaacgagggctgtgacgggctgatctgcattttgctgtgacggaggggttatgttcagacgcattaccagagccgaacgggagcgccgcgccgccaaggccgagctggacagcacaatgcaggcgatgcgcgccgttgacagcgcctttcgggaggcacaggacccattttccatcgagcagctgacctaccagcatgcggcgcttatgtgccgctgccgcgcgctgctgcgcctgctgcgggcagacagggaggacccatgacggcttactggccctatgctgcggcagccgtctgcctgctgagcgtggtgcgctgcgcggcccgccagcactgcgggctgcgcagtctgctgggcggcgcggtatgcggcctgggggtactggcgctgctgggcctgctggagcctattaccgggatcaatctgccgctgaaccgctttacggccttctgtgccggggtattgggcctgcccggcgtgacggcactgctgatcctgcggctgctgctgtaggggctgatacagtgctctataatttttcttgccaaagcgccgggaatatggtatactttttgggaaaacgagtggaacatacggcggcgggacagcccgcaagggctgcctgaggaaagtccgggcttcacagagacagagtaactgctaacggcagccgggggtgaccccagggatagtgcaacagaaagaaaccgccgcgaaagcggtaaggatggaaaggcgaggtaagagctcaccagcgcactggcgactttgcggctatgtaaaccctgctcgaagcaacatccgtatgggacattatgcggagtctcgcgcgtcccggtgatggcgtgagccttgcggcaacgcaaggacaagatagatcgtcgtttgatacagaacccggcttacgttccagtcgtttttcttttgtaatcggttaaagcacacctgttttttgagacagatgtgcttttttgtatttttctgttccttttccgcataaaaaagcgcaaaaccgggcaaaaaccgcttgtttatttcagataaatcgtatataatgtagtgtacgcctgtggttgtgccaagatagaggggcacttataccacagctatatgggaaaagtatagaaatgaattagggggatcgtacttatggcagattattttgcaatgaatcatgacgagctcaccgctgaaaaggccgcgctcgaggcacagtacaaaaagtttcaggacatgggcctgaagctgaacatggctcgcggcaaacccggccctcaccagatggatctggccatggacctgctcaagcttgatgattacaccgctgccgatggcaccgatgtgcgcaactacggcaaccttgagggtctggaggaggcccgcgagctctttgccgatgtgttcggcgtcaaagcaagcgaggtctttgtgggcggcaactccagcctgcagctgatgtacaatctggtcgcaatcggcatgatgttcggctttcaggattcgcccaagccgtggagtcaggtcgaaaaccgcaagttcctctgcccggtgcccggctatgaccgccacttcgccatcactgaggatatgggctttgagctgatcagcatccccatgagccccgacggccccgatatggataagattgagaagctggttgccgaggatgacaccatcaagggtatctggtgcgtgccgcagtattccaacccggacggctacacctacagcgatgagacgatccgccgttttgctgccctcaagaccgctgcccctgatttcaagatcttctgggatgaggcgtacatcgtccatcatctgaccgaggagatcatcgagaccccggtcctgctgaacgaggccaaaaagtatggcaatggggaccgcgtctttatgttcacctccaccagcaagatcaccttcccgggtgccggtgtgtctgccattgcctgcagcgagagctccatgcagtatatgtgcaaaaagttctccaccatgatcatcagctatgacaagatgaaccagctgcgccatgtccgcttcctgaaaaataaggaaggcgtgctggcacacatggccaagcatcgccgccgtctggtaccctgctttgacgctgtaaagaccgcctttgccaccgagctgaccccctgcggtgatattgcccattggaccaaccccaagggcggctactttatcagcctgtatgtcatgcccggctgtgccaagcgtgtggcccagctctgcaaggactgcggcctgaccctgacgggtgccggctcggcctacccgtaccacaaggaccccgatgactcgcatctgcgcattgcgccgacctacccgagtctggacgaggtcgaaaccgcttctgcactgctctgcgtctgtgtgcgtctggcagttgttgaaaagctgcttgctgacaagcagtaaaatctatcccgcccgccggtgcgggcaagtttttggaggtttctatgaacagaaaagggaagtcatggccgttgtttgtcgtggcaattttgatcgtgctgttctccctgacggccatcctcggtgtaagctatacctatggcgataccaagaatgtctatgtcaagggcgcatctgatatccgcttcggtattgacatccgcggcggcgtggatgtcacattcatgcctgccggtgatgtggatgccaccgatgagcagatggcagcagccaaaacggtcatcgaggaccgccttgtcggcctcggcatcaccgattacgagagctatgttgacaacaacaaggatcgtatcatcgtgcgtttcccgtggaagagcgacgaggcggacttcaacccgcagaccgctattgacgagatcggcaccacggccaaaatggtattccgcaagggctcttccgccacgggtgaggagatcctgagcggtgacgatgtggcttccgccaacgccgcctacaatgagacggagggctgggtcgtacagctgaagttcaattccaacggtgcctccgcctttgcctccgccaccaccgagctggctgccaacaacggcaccatctcgatctggctggatgacaacaatatctccactgccaccgtcaatgaggccatcaccggcggtgaagccatcatcaagggcaagtttgatcaggatagcgcctccacgctggccaaccagatcaattccggctctctgccgtttgctctgtctgcggagagctactccaccatcagcccgtctctgggtgccaagagcctggatgtcatggtgcaggccggtatcattgcctttatcctcgttgcgatcatgatgatctgccgctatcgtctgcccggcaccatcgccgtcatctccctgctgggtcaggttgcggctacgctggcggttgtctccggttatttcactgttttccccggctccacgctgacgctgcccggcattgccggtatcatcctcggcatcggcatgggcgttgacgccaatgtcatcactgctgagcgcatcaaggaggagctgtccaagaacaagacccttgacggcgctgttaagagcggcttcaagatgggcctgactcccatcattgacggcaatgtgaccatcgtgatcgttgccgcgatcctgatgggtgccttcggccccacggacggcttctgggccaaggtgttcaacccgattttcttctggttcggaccctccactgccggtacaatctactcctttggcttcaccctgctgaccagcgttctgctcaacttcgtgttcggcgtctgggcgacccgcgttatgatccgcggtgccgtcaatttcaagccgctgcgcaaggcatggctgttcggcggccgcaaggatggcggtgccgactttaagaccccgtccatcaacttcatcggtaaccgcaagaagttctataccttctcctgtgcgctgctcgcccttgtgctggttttctgcggtgtgttcggtgtcaagatggatgtcgagttcaagggcggctctatgatcacgctggcgtatgagggcgatgccgatctgaacgacctgaagtccaccgtcagcgccgaactgaacaagagcaacctgaccctgcagaccggctctgatatttctggcaaccagaccctgacggtcaccctgcccggcagcgataccctgactaccgaggagctggacagcctgctggccaccctgaacgagcagtaccccgataacgctttcgttcagaacgaggtcagcaatgtcgatgccaccatcggcaaggagttcatgctcaagagcattgtggcgctggtcgctgcctgcgtgctgatcctgctgtatgtagcctatcgtttccgcaggatcggcggtctcaaggccggttccaccgccattgtggccctgctgcacgatatgcttgttgtgtttggcgtctttgttatcctgcgcattcctctgaacggcaacttcatcgccgctctgctgacgattctgggctactccatcaacgataccgttgttatctatgaccgtatccgtgaaaacagcgccctgtacagcaagaagcagctgagcctggctgagctggtcaatctgtccatcaaccagagctttgcccgctccctgatgacctccatcaccacctgcatggcgctgggtgttgtctgcatcgtctcggtcatctatcgcctggacagcatctattccttcgcattcccgctgctgttcggcatggtaagcggcgtttacagcacgatctgcatcgccacgccgctgtgggtcgattggaagaccaagaaaaaggctgccaagcaggcctgaaaatccacacaaggaggtaaaccgatatgaaatgcccctattgcggtgaagtggattccaaggtcatcgactcccgcccgacagaggacggcgagaagattcgccgccgccgtgagtgcctgaactgcaaaaagcgctttacgacctacgagatcgttgagacagtcccgctgatggtcgtaaagaaggaccgctcccgtgaggtgtttgaccgccagaagctgctgaacggcatgctgcgcgcctgtgaaaagcgcccggtcagctatacccagcttgacgctgcagtcgaccgtattgagcagcagctgctcaactcctacgaccgcgaggtttcctccatccacatcggcgatctggctatgcaggagctcaagcagatggacgatgtggcctatgtgcggtttgcttcggtctaccgccagttcagcgatgtcaacaccttcatggaagagctgaaggatatgctggacagccgctcaaagcccgccgaaaaatgattgccgcacctgctcaatctgtgtgcaggcgcgctgcgtctccatctccagatccgccagactgtccgtctcggcacagggcggcagcaccgccatcgtctggttcatctggtcaaggatattgcggcgcaccagcaggtttaaaaggccgctgctttcccgtgccttttccgcagccctgccgtaggcacggcgggctgcagggcagtccccctgcatggccagggcatacgcggcctgcacctgctgcacaagtgcctcggtggttcggtccacataccgccctgcggccaacagcagcagacacagcatcagcaggatcacaacggcataccagtttcgtttcataagcacctttttcagaccgtcccctcgggggcggtctttttctgtatcagtacggaccgtttgccgttgtatagcagcaataacacattctttcgtgtcgtgtgccgctccgcaagcagggtatcgagcgccgcctcatccatcccgaaaaaggcaaggttttccctgcagacagccgtgtcgatgagaagcggcagcaggggcggttcctgaccgtccttcggcattgaggccgccgagatactgccgttcggctccaccacgccccaatagacctcctgcggagagaagatatccctgccgcgcagtgcctctgccagatcggataccgtgatgcgcagctgcgcaagcgcatcctgctgtatctttccattgcgtatgacggtcaccggcctgcccagcagcagctctgcataggccgggctgaaccacaacagggtagagtttaaaatttccagcgccgtaatcagaaagatcggcacaaggcttgcaagcagcggcaggtccggctcatcaatgcagatcgatgccacattggagatcagcaatgttgttacaagctcggccggctgcagctcccccagctggcgctttcccatcaggcgcatggctaccgtgacggcgcagtagaccagcaccgtgcgcaccaccgtagaaatcatcctgccgcctccttataaaacacccctgaacggctcacactatcctgcgtgagagggggaacaccgatgccaccaaaaccgctgtaccgttcgctggacgagaaccttgcgtttctggaagaaatgtttggccgttccgatgatttttataccaagcgcctgatgattgcaggcattcgatgtgctatcgtcatgtttacagggctttcctccccggaaaagctttgccgcatggcgctggacatgctggaccgtgaccctgccatgctgggcggcggggcaggactgtgcgattatcttttgacccagagccgcattcccgccgaggccgaggccgttaccgacaggaccgcccttgtggagctgctctgcaatgggttgtccgtgctgctgattgatgatgtgagccgggcggttgccttttccacgcaggaaatgccgcagcgcgccgtttcaaccccaacgggtgagggaaatctgcgcggctctcaggaggcattcaccgagctgctgcgcaataatatctccctgctgcggcggcaattccgcaccggtactcttgtggcggagatcacaaccgcccatacccgcgccaaaaccgaatactgcctttgctatgacaaagcccttgccccggaggagaccgtttccgcactgcgcgcacggctggaaaatgtcgagatcccggtcctgctcgacagcgcctattttgcctccttcctcaagcaggacaagctgaatctcttcccggctgccgcatacaccgagcgcccggctacggcctgcgcccgcctgtgcgagggcaaggttgtggtgctggtagccgggtgcccctatgcgctcattataccaagcttttttgctgagcattttgagtgccttgatgactacgcttccggcgctgtgtttgcaggcctcatccgtattctgaaatatctggcctttctgctggcggtgttcgggccggggctgtatgtcatggccgttgcttttgcgccggagatcatccccatgcagctgttgacaaagctggcccgcggggaggccgccacgccgctgccgcccatgcttgaaatgctctgcgtcacgctgctgcttgagatcgtgcgcgaggccggtctgcgcgcaccgcaatctatcagtcacacggtcagtctggtgggggcgctcatcatcggggagaccgccgtcagcgccggcatcgtcagcgtgccggttctgacgatggctgctgcagccaccatcgccacgctggccgtaccgtcactgtatgaacagtccatcctgttccgcttcgcggtgatcctgctggcagggtgctttggcgtaccggggctggcctgcgccgcactgacgattttggcaatggcctgcggcagtgagccttttggatacgactatctctatccgctgctgccactgggcagggccagcgtgcgggacggttttgtgcgcagcatctggagccgtcttgcccgctccggggaggtgatcggtcagcatgaagcgtgaatgtcccagtctgtttgctgcgctgctcgtcagcctgcttgtcaatgtgctgctgcgcagccacacagcctaccgcccccgggccggtctggcagcagccccgctctgcgcactgctgcttgcggcggtcggctggttgttcgcccggtgctggcggctggcctgcgacccggttttaaggctgctgttcggcgcattgcttgtgttttcctcggttttggaactgctgcggctctggcagcttgccgaccggctctatcccggggcgatcacactgacctccgtctgtctgctggccgtgctgccggtcgtctatctgcggcgggtatctgcactgtcgcagacggcccgtgccgtgctttgtctgctggtggcagccaccgcggtcatgctgatctcagtgctgccgcgtctgcggatcaccaacctgcagtacacagatttgacgcgcgcagatttcctcaccgccgccaaggatcagctgaccctttacccggagtatctgctgcccgccctctggcccgcgcaggacaagcgcggccgtcatacactgctgcggctggccgggtatgcgctggcgttcgatgtctcgattcatctgctgcttgagctgttctacggcgctgccatgccgctgcgggcagaccccgtccacgccgccgcgcggtgcggtgcgctgtccatcttcaaccggctggaatggctgcagttcatcctgtgggtcatggccgtcaccgtcaagctggcgctttatctctatgcgctggtgcggctgctgggcggccgaagcaagacggaggacagcgccgccgggctggaccgctttcctgtgtatctgggcggcatctggctgctttgcgccgtgctgcgcaagattgatctggacacagcgctgccgctgcgcagtgtgctgacctggggctttgttctgctggcatggattggaggtggggccgcatgtctgtaccgaagtataaggcgctgctgattgcctgcatcacgctttttctctgcggctgcggtcaggcgctgtcggagcgggagatcgtccgcgccgtattcttcgcacggcagcagggacagtattccgtctgtctgctgctggctgaccagaacaacaatgaggacggccttcactacaagacttcctccgcacgcggtgtcaccgccgctcaggccctccaccgggccgaggctgcgctgccgggccgcctttattacggcttgattgatctagccgttctgccggccaatgccgactggcaaaccgcccgtgagctgggcagtctgctctacgacaaagcccagcccgcgccggagctttcggtctttgcgctggatacagcctcccacagctgggctgaggatgcctctgccctgtatgaggacatgaagtcggtccgctccgcataccgcctgcactgcggccttcagcagctttttacacaggcggactgctgcgctgtgcccggctaccgcgccgacagcgggtatgaccttctgctgctcgcaaagcggcagaccgcttcttaccgcgctgccggtctggccgcccagctggccgccgtgctctgcgggcagacggatcgtttttacgcgacctacgcgggcgggactgccctgtgccgcgcccgggtcgatgtgacggtgcaggataccaccgtacaactgcacctgcgcgatgcagcgtttgaagcactcacgcagacggggcaaaatctgcaggcattgttctgcgccgagctgcagcaggcttttgccgcgctcaccgctgcacagtcggccgacttttttcacctgcagttctggcacgccaatctgtacggtccccgcagcccggcaccggctccgcagcttacgattctatgggagtaataaaaaaacgtgcccgattccgcaaaatgcggggtcgggcgcggctgcagccggttactgcagggtggtgggccgggtaatataaataaggtttgtgtcggctataaaggtctggaagttatacagcaccagaacctcatcgtagccttctttttcgatcgtggaatcaaggccgtacttgaaattgcggaaatccaccacaccgatcttggcgtagttagcagtcagataggggataaagctgttggcgtagctgtccttcacaaccagaatactgcctgtcccgttgccctcgatggtcgagtagccgttgttgccgtccagaaacgccgcgtatttgtcgcgggtcgcaaacttttcggcgttgatcaggttttcggtccgttccggctcataggcggcctcgccggtgatccggtagaccgtcatcagattgtcaagcgggtagtaggtgatcgtgtcatcctccacattccaaaggcgggtggcggagtaatgggttccctcaaagcctgtcacagtcgcactctcatgggcatcacggtcaaagggcgtcagccccttctgtgcgcagaatgcctcataagcgcggtaggcaccgtttggcgtccagtggtggtctgtcttgaaatacagatactcgtccttacgcgctgcaaacagctcgcgcaggtcgatgattcctgcgctctggccgaccttggcaaagatctcatccagcatggcgttttcgtctaccatcggcgcaccggccggcagcttttcggggtagataacgctggccgacggagccagcaggaaggtcaccttgcaggggtgattggcagcaaactcactgatggccgcgatgtttttgttcagctgcttttccgttgcatcgtccactgtgaacagctttgtaaacatccatcggtccttgcccagcaggataccgccctcctcagccttgcggaagagaatctcgtctgcggcacgctgggtgttgaccgccgcatcacggaaggagaactgatcctgcatccagcgggaaaagccgctctgccagcttccgtccagcaaggcactgacactgaatgcgggaagctgtgcggccttgcggttttccagcacaagctgctcccgcttgggccacaacatattcacagccgaaaagccaaacagcagcacagcgcagaggacgagcagcggaaagcccacgcggcgcctgccgccgcccttgcggtatatgacctttgacatacagcagttcctcctctcagaaattggcatacagcgctgttgcgtttgtggcagccaccacatagcagacgcacagcaccatcagcagggtaaacacaagaagcttggctaccgtgttccggctgatcttatcccaaagccgccgcggcagcgcagacgagcagacgcagcccagcgccagcagcacgccgtagttgcgcagactatacacagcggagataccgccctgcggcacaaacagcttttgcagcagcagtcccagcggtgcgccgggctggttggctgtaaaaataccccagcccagcacgacaaagaacaaggtgtaaagatgcggccagatcttgccttttttcagatatttgagcaggaaggtcttttcgatcgtaagcagcacaaagtagtagagcccccatgcgatgaagttccagcttgcaccgtgccagatgccggttgccgcccagaccaagaacatattgaacagctgccgcgccggaccctttcggttgccgcccagcgggatatagatgtaatcccggaaccaccccgacagggtgatgtgccagcgccgccagaactcggtaatgctgcccgagatataaggcaggtcaaagttagcagggcagtcaaagccgagcagcgccgccagaccgttactcatctcactgtagccggcaaagtcaaagtacagctgcaggctgtaggccaaaatacccagccatgccagcggggtagagacattggccagccccacaccgcctgcgccgatgatgtcggtccacagctcaccgatggaatctgccagaatgaccttttttgccagaccaaagacaaacagctcggcaccgcgctgcgccttttccatcgtgcagcggtttttgccgtcatggagctgatctgccatctcgcggtatttgacgataggcccgacgatcagctgtgggaagaacagcacatacacggcaaaggtcagcggatttctttccggctcgatcttgccggtgtagacatcggcctcatagctaatgatcttgaagatatagtagctgatgcccagcggcagcaccgtaccgatgttgagcgcagcgatccccaaatggccgatctgattcagcgtgtcgatcaggaagttggcatacttaaaatacaccagcaccccaaggttgaccagcaccgccgccagcggcagcagcccgcgcagctttgttctggcccgggccgtcaacaggccccacaggtagttgaatacaatcaggaccgcaatcaacggaagaaatgcaacgccggtccagcagtagaacagcaggctctccgccagcagcactgcatttttggcacggccgggtaccagataatacagcagcagggaaagcggcagaaagcagaacaggaacaccacactgttaaaaaccatagcggaactccctttcttttgatggcatcaccgcgtgaaccaagacgccgatacggcgcaggacaggcggcaatgctttgggtgggtcgttatgaaaaaaggccgttgccgagcggcagcggccttctttcagggtctcatcagaaattcagcgccgtttccagtgcggtgtcgatggcagcgtaatcaggatttgcaataccggcaatgacaatggccacatagttgccgttggtcacaatgcgggcgtccttggccagcgcgatcttatcagcaaactcagcatacaggtcattggcggacaggcttgccttgtaggcctccagctcgctcttgacggcatctacctgaccgtccttggcctgtgccacaaagacaaggccgcagtccgcctgatcgttggtcacatcgcccttgtaggcaacaaggttgtccattgtcagcatcagctcattctcaacggagaaatcgtccagtgcgcgcgggttggcgatggggttgaccgcctcgatggcggcaacggcagcatccagattggcggtgttggcctcctcgccggcggaggcatcggtactctcgctgatgacgatatctgtcgagccatcggcaccgccgatggtgctttccgcagcagagctgctctcagaggagacagcagcggaggtgccgtctgcagaggagccgcaggcggccagcagcatagcacagcaaagaattacaggaatcagctttttcatgggttcagatctcctttatatagtgtatgatattgttttcctctacgcacaggcatagcttgcccgataccttataagaatacactatcttgccatctttttcaagctgttcgcggcaaaacacagggtgtttccgccgggaaatatgtaaattttttataccttgacaaacacgcccccggcgggtacactcaaaacaaagttatacggcgttcctgctgccgtcagaaacgccgataactgtagtttacagaaaaggggggggccgccatgcacaataatacaaaggcgcgcgaaactgccttgaccggcatgctgtttgccctggccatcgcactgtcctaccttgaatctctggtatcaccgctgcttgggttgatgcctgccataaagcttgggctttccaatgttgttgtcatgtatgcgctgttgttcctgcgcacccgcaccgcgctgctgctggtggtgctgaaggcactgttcgcctttttgacgcggggtgccaccgccggttttctttctctttgcggcggcgttttatcgctggttgtcatgctggtgctgctgcacctgccggtcagcgggtatatcttttgtgccggtgctgcactggcgcataacctcggccagctggcgggggcagcagtgctgctttccagcgcgatggctctggggtacgcccccgtgctgttgacggccggccttgcggtgggcggcatcagctgtttgctttcgcgcgccttattcgccgccctgcctgcctatgcgggggagcagcggcgggggagtcctttcaagaaataggaatctttcttaaaaaatgcgttttaccccttgacacctgcaaagctatgtcgtataataagagcacagacacaggaatgtgtcctatgagcaattacaaaataacaggaggcaatttttatggctaagtatgtttgcaccgtttgtggttatatcgctgagggttccatccccgagttctgcccggtctgcaaggccccggcatccaagttcattgagaagaaggacaacacctatgtgaccgagcatgttgtcggtatcgccaaggatgttcccgaggagatcaagcagggtctgcgcgagaacttcaacggtgagtgcagcgaggtcggtatgtatctggctatgagccgcgttgctgaccgcgagggctaccccgagatcgccgaggcatggaagcgctatgcctttgaggaggccgagcacgcctccaagtttgcagagctgctgggtgaggttctgaccgacagcaccaagaagaacctgcagatgcgtgttgacgctgagtgcggcgcctgcgccggcaagatggatctggctaagaaggccaaggagctgaacctcgacgccatccatgacaccgtacatgagatggcaaaggatgaggcccgccacggccgcggcatgcagggtctgctgaatcgctatttcaaataattttt

SEQ ID NO: 14099 - DNA, 6866 bp, Unknown
  gut microbiota DNA sequence
atatagtacaagtaggcagaaatgcccgccggatgatcgaaagcctataaacagaaaagaccgcccccggcggcaaccgggaacggttttgaatagatgctcacccctaaagaggaataagcccccaaacacgcttattatacctctttcgggtgggcttgtcaaagtgtacccagcgtgtccacattggacacatccccgccgggcacaccggccctaaattttaatagcaaggtgattctatgaagatttatactttaatcggcggtgtcaacggcgcaggcaagtcaagccttaccggatccttgcgggccgagcggtcagacctcggccagatcgttgacccggacgctttaacggcccgctgcggcggcgatgaatacgagggcggcaagctggccgttgaccgcatcgagacagcgcttgccggcggcgtgaattttacccaagaaacaacgctttcgggcggctatcctaagcgcctgtgccgccgggcaaaggaagccgggtattatatccgcctgtactatgtcggccttgacacagcagaagaaagcctccgccgcatcaaaaaccgcgtagagcgcggcgggcatgacataccggccaaggatgtacaagaccgctttgcgcatcgcttcaccgatgttgcaaaggtgctgccatactgtgacgaagcaaagttttttgacaataacaacggctttgtgctggtggccgaataccgcaatgggcagcttttgccggtcggcaattaccgcccgcaatggctctgccagctgatcgagagcctataaacagaaaaaaccgcccccggcggcaaccgggaacggttttgaatagatgctcaccccaaaagaggaataagcccccaaacacgcttattatacctctttcgggtgggcttgtcaaagtgtacccaaggaggttttattttatgggtaaacgtacaaatacggcccgctggacgggcaagatgtggcgtattgatgtccagcatgacggcacgcgcaagagcttttacagcaacaagccgggccgcaccggccagcgtgaggccaacgccaaggcagacgcatggctggacgacggcataaacccgcgcggggagcatgtggccgccctgtacccgcggtggtttgccacgatgcaggagacgaccagcgcgggcaactgtcgcaacattgcaagccgctggaaaatctggattttgccgatgatcggcaacaagcgcattacctcattgaccgaacaggatgtgcaagaggttataaacaaagcctattcggcgggcaagagcaaaaagacgctcaaaagcctgtgtgcagatatgcgggccttcttcaaatactgtcgcctgtgcaagctgtccacgttcaacccggaggcgctgcacatacccgccggggcgcggtacaagggcaagcaggtcttgcagcccgccgacctcgtgaagctgttcagcaccgacacgaccacataccggggccagaccatgcccgatgaatacattaacgcctaccgcttccaagtcttgacaggcctacgccccggcgaggtgatcgggcttgactgggcagacatccgcggcaacaccgtccacatctgccgatcagtcaatatcaagggcgaacagacgcgcggcaagaacgaaaacgcggtgcggtccttcactgtgtccgcactggcccggcgggtgctggacgatcagcgggagatcaccggcggcgtcggcagtgtgtttcgcattgccagcgagccacactattaccgccgctggaaagcctactgcaccgcaaacggcttgacgccttgcagcttgtacgagctgcgccacacgtttgtgtcggttgtcaagacactgcccgccggggaggtcaaagaccttgtgggccacagcgaggacatggacactttcggcgtgtacgcgcacactctcgccggtgatgcagaaaacaccgcgcgggccgtcaacggcgtgttcctgcgcgtgctgaaaaacgcctgaatcgtaccgcattttttaccgcacttttgatttttacagcgccccgcatcactcgcccgcaagagcaaaacaacgcgcggacgctgttattttatgcatgcacggatacagttttcttgcaagtcaacggttttggacggttcgagtcctgtcacctcgatactaagagtgtgagcctacaatacgccccctgtctgtaagccatggaaaagcaacttctatgatttccagacggtcgaagctggtccttcacactccattgcccgttttgcatgaaaatgcagagcgggcgtttttatttgcatggcagaaaagccgtttttgcccctttcctgtgcagtatttcctgttgtgttttccccgcaaaaaagctataataatttcaaatttttcttttttcgggagggcttatggaaaggatcaagcgtcatcttcgcagtgccgccgggtatctgcttgtctgtgccaaatggctggtgctggctgcgctggttggctgtgttgtggggccgctgggggcggcgttcgggctggctctgaactgggccaacgccacccgcgccgcgcagccgtggctgctgtatctgctgcctgcggcgggtcttgtcatcgtatttctgtacgagcatcttgacccggacggcggcggctcaaccaatcagatctttgtgtctgtgcgggaacataagcccctgaccctgcgcaccgcgccgctgattttcgcctccaccgtcatgacccatctgttcggcggctccagcggccgcgagggtgccgcgctgctgctgggcggctcggtatccgggcagctcggcaaggtgctgcacctcgaaaaccgcgactgccgcctgatgacgatgtgcggcatggcgggcgccttctcggccatcttcggcacgccgctggctgccaccatctttacgcttgaggtcgtggatgtcggctcaatgcagtacgccgcactgctcccctgcctgctctcggcgctgctgggcgtctttatcagcgggcagatgggccttgcgcccgaggcctttgtgctgcagaccggggccgatgcaacgccgctgaatcttgtgcgggtcatcgcgctgggggcgctgctggccgcgctgagcatcttcttctgcgagctgctgcatgccgcgcccaagctctacaaaaaatttctgcccaacgcctatctgcgtgttgcggcgggcggcgtgctgattctggcgctgacaaagttgctcggcacgaccgactacaacggcgccggtgccgccgtcatcgaggctgccatcgacggccactctgtaccgtatgcgttcctgttaaaaatgctgttcactgcgctgaccttgggcgcaggcttcaagggcggcgagattgttcccatcttcttcaccggggcgacctttggctgcgtggccgcgccgctgctgggcctgccgccgcagctgggcgctgcgctgggcatggtcgcgctgttctgcggctgcaccaacagcccgctggcgtccatctgtctggcgatcgaggtctttggcgggcagtgcatctcgctgtttgcgctggcctgtgccgtttcctacatgctgtcgagttatttcagcctttaccgtgagcagcacttcctgcactccaagctgcggatcgttggtgtgcagcgcgtacacggcaaatgggccgagacggacgcccaacatttccacacaaacgatgacggcgaaaattagcgattcagttgcaggtacgccgttttcatgctataataaagtgttacggagggaaaggcgcgctatgaatgattttgctcttgaaaagcactgctgggctgagattgacttgactgccctgcgtgaaaacttcgattatatctgccgcaccgtcggcgggccggtctgcgccgttgtcaaggcggacgcctacggccacggtgacaccgttgtagcccgcgtgctgcaggagcagggcgcggcagccttcgcggtcagctctttgggcgaaggccgtcatctgcgccgcagcggcatcacaaagccgattctgattctgggctatgccgacccggcctatgcggcggtgctggccgacaatgagctggccaccgcctgtttttccacagaatacgcccgcgccctctctgcctccgccgtgcaggccggtgtgaaggtcaaggtgcatctgaaaatcgacaccggcatgggccgcatcggctttgcggtgcgctccgggtttgaggagaccatccgcgagctggaggcactgtataccctgccgggtctggacatctgcggcgtattccaacactttgccgtggctgacagtgtagcccctgacgatgtagactacacagatgaacagcatgccttgtttgcccgcgtggtggcccgcctgcaggccgatggctttgccaccggcacggtgcactgcgccaactcggccgcgcagctgcgccacccggagtggcggcatgacctgacccgcgcaggcatcatcctgtacgggctggaccccagtgacgaggtacacttccccgatctgcggccggttatgtcgctgaaatgcgtggtcaccttcgtgaaggagctgctgcccggacaaagcgtcagctatggccgcaccttcaccgctgagcacccgatgcgcgccgccacggtctgcgtgggctacgccgacggctaccctcgccgcctgtccggcggactgggcatcatgggtgtgcatgggcagcccgcccctgtgctgggccgcgtctgtatggaccagacgatgattgacgtcaccgacattcccgatgtccgaatgggtgacgaggtcacggtctttggccttggcggcggtgataccgccgataccattgccgccaaaaccggcaccatcaactatgagattctctgcggccttgcccgccgcgtaccccgcgtatacaaggaaaacggcaacatctgtgatatctggaacgatttggaggaaacctgatggcccgcaaaaacatccgcaacttctgcattatcgcccacatcgaccacggaaaatccaccctgtccgaccgtatgctggagctgaccgacagcgttgacaagcgcaccatgaccgaccaggtgctggataacatggacattgagaaggagcgcggcatcacgatcaaggcccgcgccgtcacgatgcgctacaaggccgatgacggcgaaacctatgagttcaacctcattgacaccccgggccatgtggactttcagtacgaggtcagccgcagtctggccgcctgcgagggtgccgtactggtggtggacgccagccagggcgtggaggcccagacgctggccaactgctatctggcgcttgaccatgatctggaggtcgtacccatcctgaacaagatcgatctgcccagcgccgacccggacgccgtcgccaaggaggttgaggatgtcatcggcctgccctgcatggaggcgccccgcgtttccgccaagctcggcatcggcatcaaggatgtgctggagtctgtagcgcgggagatccccgcccccgtcggcgatcctgaccagccgctgaaggccctgatttttgactcgatctatgacagctacaagggcgttatcgtctatgtgcgcatctttgagggtactgtccggcccggcgataccatccgcctgatgagcaccggtgccgagttccagcttgtcgaggtcggccacatgggtgcgaccagcctgaccccctgcgataagctggaggccggcgaggtcggttatctgaccgccagcatcaagaccgtgcgcgatacccgcgtgggcgacacggtgactctggcggcgaaccccacgccggagccgctgcccggcttccgcaccgtgacgccgatggtgttctgcggtatctaccctgctgacggcgcggactaccccgacctgaaggacgcgctggagaagctgcagctcaacgatgccagcctgacctttgagccggagaccagtgcggcgctgggctttggtttccgctgcggttttctgggcctgctccacatggagatcatcaccgagcgtcttgagcgcgagttcgacctcgacctgatcaccacgactcccggcgtccagtaccggctgacgctgaccgacggcacggtcgagattatcgacaacccctccgcctatcccgacccgacccgcatcgtcaagcaggaggagccgttcgtcaacgcccatatctacacccctaacgactatgtcggcccgctgatggatctgtgccagacaaagcgcggtgtgctggtggacatgaaatatatggacgagacccgcgtggacctgcactacctgatccctctgggcgagattgtctatgacttctttgacgctatcaagtcccgcagccgcggctacgccagctacgactatgagtgggaggactggcacgagagcaagctcgtccggctggatttcctgctcaacggcgaggtggtggatgcgctgtcgatgatcgtatttgccgacaatgcctacgccaagggccgccgcatctgcgaaaagctcaaggagaatatcccccgcgcgctgtttgagattcctgtgcaggccgctgtcggcggcaaggtcattgcccgcgagacggtcaaggccatgcgcaaggacgtgttggccaagtgctacggcggtgacatcactcgtaagaagaagctgctggaaaagcagaaggaaggcaaaaagaagatgcgccagctgggcagcgtgaccctgccgagcgaggcattcaccgccgtgctgaagctggattcggattcttaacgggggtttgttccttctttgcaaagaaggaaccgaagaaattccaaacaaaatattcgtaggggagggatttatccctcccg

SEQ ID NO: 14100 - DNA, 23654 bp, Unknown
  gut microbiota DNA sequence
caacaccccgggaggcatgaatgcctcccctacttatattaccccgccgccgtgccctgcaaattttgccgctctgtaggggccgcacatgtgcggcccgcaaccttacggcaaaagcgattttacgggaaggccgcgggccgggcatgcccggcccctacagtgcaataacaaaaagagggtacctgccatttcagcagataccctcttaaattatgtaatactaaattacatcaggctgcggtacagcgctttgatctcctcgacattcgtgtcgcgggggttgccggggcagcaggcatcggcaaaggcggactcagccaggaactgaacatcctcctccttgaggatacccttcaggtcggcgggaatgcccacatcggcgctcagcttcttgacggcagcgatggtggcatcggcggcctcggcatcgttcatctcgtcaatgccggtcacgcccatggccttgccgacagcgcggtaacgctcaccggcggcatccttgttgtactccagaccggtgggcaggatgatggcgcaggcaacaccgtggggggtgtcatacagggcagacagaccgtgcgccatgctgtgaacaatgcctaagcccacattggagaagcccatgccggcgatgtactggcccagagccatgccctcgcggccctccggggtgttctgcacggcaccgcgcagattctcagagatcagcttgatggcctccagatggaacatatcggagatggtgcagtggcccttggtgatgtagccctcaatggcgtgggtcagggcgtccatgccggtggcggcggtcaggcccttgggcatgctggacatcatatcggggtcaacgactgcgacctcggggatgtcgttggtgtcaacgcagacgaacttgcgcttcttctcgacatcggtgataacatagttgatggtgacctcggcagcggtgccggcggtggtgggcacggcgatggtaaagaccgcatgcttcttggtgggggctacgccctcaagactgcggacatcggcgaactcagggttgttgatgatgatgccgatagcctttgcggtatccatcgaggagccgccgccgatggtgacgatgcagtcagcctcggcagccttaaaggcggcaacgccgtcctgaacattctggatggtggggttgggcttgatctcgctgtagacagcgtaggcaaaaccggcggcatccagcaggtcggtgaccttcttggtgacaccgaacttgatcagatcggggtcagagcagacaaaagcctttttgtaaccgcgggaggtcagctcgggaacgatattctcgatcgcaccgtggccgtgataagagatcgtgttcagaacaatacgacttgccatagaaattctctccttttattgtatcggcttttggccgatgatttcagctttcaagcctattataccgttatttttttgacagcgccatttggaaaagtagcgcggactttgtgaaaattccacagcaaaaaagtaggggcgagcaatgctcgcccctacagcgcacccgcaagggtcacgcttcttctttctctttctgcgccttgatgacctttaagcggctgaattcctcacgctcgcgctcactcagcacctcatcaatggatttgatcgtcctttgcatctgcggaatctgcacattgccgagggcgttcgcgcgcttctgggtcttttggatggcctcggccagacggataacgctggtctcgacctctgccagctcgaccgtcagggtcttgacctcattgaatttgagataggccacatcgagggtgccgtttgtcgattccagatcgtagtacagccccagcggcgaggtggtgttcagcttgagggtgggcagctccacacccataacgctgcgggtgctgagctgcacgccgcgctccaccggcacaccggccgcatagccgccgactgaacccaacatgatattggcctttttcagggcctcgtaggcctcggcataggccgccgagatgcggtcctgtatacctgccgcacggtcgatcagctgcatcatctcgcgcaccagaatattgcgcttgcggtccatcaggtcatagccctgcgcggccagcgccagactgcgcttggtcgccatcaggttagattttgtaggaaaaacctgctgtgccattgggtactccttttatactgctttggcttcccctgcggggggaagctgtcaccgaaggtgactgatgagggccgagtgtgccattatcacccgtctgcgggcattccccgcacgctctcccctcatccgcccctgcggggcaccttctcccccaaggggagaaggcttttgggttattttttactgattctcgccttggcaggctcgtagtacttatccagcgtttcggcatcgcagcgatccagcgcattgcggggcagcgcagccagcagctcccagccgaggtcgagcgtctgctccatcgtgcggtcggtgttgccctgaccgataaactcctgctcaaacgcgcggccgaaggccatcagctgcttatcgctctgggacagctcctcctcgccgatgacactcgccagcgccttggcgtcctgcaccttggcgtagcaggcgaacagctggttcgacagggtgacatgatcctcacgggtatagcccgcgccgatgccgtccttcatcagacgggacaggctgggcagcacggataccggcgggtacaggccggtggcgtccataccgcggtccagcacgatctgaccctcggtaatatagccggtcaggtcggggatcgggtgggtgatgtcatcgccgggcatcgtcaggatcgggatctgcgtcacagaacccttgctgcccttgatgatgccggcccgctcatacaggctggccagatcggaatacaggtagccggggaagccttttcggccggggatctcgcccttggaggacgagaactcacgcagggcctcgcagtagcttgtcatatcggtcaggatgaccagcacatttttattcaggtcaaaggccagatactcggccaccgtcagcgcggcacgcggggtgatgatacgctcgatgatcgggtcattggcaaggttcagcagcatgacaacgcgctccatcgcgccgcagctctcaaagctctcacggaagtacgcagccacatcgttcttgacgcccatggcggcaaagacgatggcgaagtccgagccatcggccacgctggcctgcttgacgatctggacggccagctcgttatgcttcatgccggagccggagaagatcggcagcttctggccgcggatcagcgtggccaagcagtcgatggaggaaatgccggtgtggatgtagttgcgggggtaaacacggcttacggggttgatgggcgcgccgttgacatcgcggcgggccatagggtagatgtcgccaaggccgtcaatcgggcggccgagaccgtccagcacacgccccagcagttcggggctcaagtccatcatcatcgggtggccggtcatgaccgtgcggttgttgacaaggctcagcccgcgcgtaccctcgaacacctgaatgacgcagcggtcaccgtccacacggacgacacgaccgacgcgggtcgaaccgtcgtcgaggtgcagctcgaccatttcgtcatactgcacgcccttgacgtcgtccagcacgaccagactgccgttgatttgggaaagtccgatatgttccagaatcatgttgttccctcctcatcagccctgggccacggcggccagcttggtatcgatggctttttgcagctcatccagcttggcaaaatcgtcgttgggcacggtatatttcatctgcaccagctcgtcaaacaggccggtggccagcagacggctgaccggcacctgcttggcgacgagcgcggcgcacttgtcgtacaggtacagaatggtctccatcatcttcagctgcttttccagcgggacgtaggtatcgaccgcatggaaggcattctgctgcaaaaagccgacgcggatgacgcgggcaatctcaattgtcagcttctggtcgtcgggcagtacatcggagccgatcagcttgacgatctgcataaggttgttctcctgcagcagcaggttggcgatgcgctcacggcaggacatgaagtcatggccgacattatcatagtaccagccgccgaggtcgccgaggtactcgctgtaggagtcgttccagttgatggcgggatagtggcgggcgtaggccagcgatttatccagcgcccagaagcagcgggtgaagcgcttcgtgttctgggtgacaggctccgagaagtcgttgccctgcgggctgacggcgccgataacggagacagaaccttccgcgccgttcagcgtcttgacataaccggcgcgctcgtagaactccgccagacggctgggcaggtaggccgggtagccctcatcggcaggcatctcctccagacggccgctgatctcgcgcagggcctcggcccagcgggaggtggagtcggccatcatggcggcgtggtagcccatgtcgcggtaatactcagccagcgtaatgccggtgtagatggatgcctcacgcgcggcaaccggcatgttggaggtgttggcaatcagcacggtacgatccatcaggctcttaccggtacggggatcgaccagctcgctgaattcctgcagcgcctgcgtcatctcgttgccgcgttcgccgcagccgacatagatgatgatgtccgcatcgcaccattttgcaatctggtgctgggtcatcgtcttaccggtgccgaagccgccggggatggccgccgcgccgcccttggcgagcgggaacattgtatcaatgacgcgctggccggtgatgagcggccggggcgaggtcatgcgctcggcagacgggcgcggggtgcggatgggccacttctggcagagggtcagcgtgtgctccttacccttggcatcggtcaatttgacaacaggctcgttgacagtgtagctaccgttggcggcaacccatgtcacggtaccggaaaccatcggcggcaccatgcagcggtgctggatggccggggtctcggggcaggtggcgtagatctggccgggggtcagggtatcccctgccttgacagtgacggtcacatcccacttagcttcctcatcaagggacggctcatgcgcgccgcgctcgataaagctgcccatgtccttttcaatggcgggcagcgggcgctggataccatcatagatgttgcgcaggataccggggccgagcgttaccgacagcgggccgcccgtgctttcgacaggctcgcctgccttcaggccgccggtctcctcatagacctgaatggtggtctccttttcgttcatgcggatgacctcgccgacaaggcgggccttgccgacatagaccatctccatcatttcgaggtcggtcttgcccttgatagtgacaacggggccgttgatgctgtaaattttattttccattgctttgcccctcaaatattgatctccagcccggcgttttccaagaaccagtcgtgctgggcgttcaggcgtgctgccagtgtgtcgtcggcagccagccccttggcggcgttcgcgcccttcaggccgcccagctcaatgctgtcatcggccgtaagtgtcgtgcctgcgggcagcttgacgtccttgagcagcggcaggtcgatgctgcggacggaaaggttggcgttctcccccagtgcttcggccagtgcggcggcctcggtctgcagccaagcagcgtacttgtcgctggcggcaaaatccgccaactgcgcctttgccttggcaaaggtctcgtccgcgatcttctggcgctggtcggccagcttggcacgggccgccatgcgcgcggcgctcaggtcacggttggcgcgggtgcgcgcgcgctcggtctcaaagcgcagggtgcgctccacccgggcattctccgcccggcgtgtctcgtccagccgcccggtgacttcgcgctcggtctcctcacggatggcagcgcaggcagcctcgccctcggcgcggatggactccagaaagcgctcggcgcgggtatctaattcgttcatggtcacacctctcaaatcttcacgccgatggcctcgcggatatagcgggtcaggcggtccttaccggcagcaccgccgccggtggaaggcacggtgatgagcagcggcccaccggcagcgcgggcgctgtccagcacggccgtgtaggcctcggcgatcttctccgtcaccagcagcacggcaatgtcgggctggttggcggcatcggccagcgcatggcgcagatcggcctcactgcgggcaaccgtcccctcaatgcccgccagacgcaggccgttcatggcatcggagttatcgctgatgagaaagaaccgcatggcgttacaccagcttagacaggatcatgatcgagatgaccagaccgtacagagcaatggactcgcccagagcaacgaagatcaggctcttaccgaaggtcttttcgttctcgctgttggccgcgatggcagcgggggcagcggaggcaacggccatgccgccgccgataccggcaaggccggtggccagtgcggccgcaaccagaccgatgctcagggaggagttgtggtcattgtcggtgttgaccgtctcggaagaagaagcggcggcagtcgtatcggcggtatcatcggcggcaaagacgcccagcgcaccgcagcaggtaacggcagccacgatcaggatggtaacgaacagtttgctgaacttggttttcataatggaaccctccgtaaattttagtttatactttcctaatggcaatttgcaggttatgctttttctttcttcagatcaaacgccacgaacttgcgtccgccgcccctgtagcagcggctgaacatctcgtagaactccagacggatgccctgaatggcggacagcagcgcctcgaggcagatgaccacgatgttgcccagaatgacgaccacgatgttgttgggcgtaccggccagcgtgaagacgaccatcatcatgctggcgtggacaatgacgaacgcgcccacacgcaggaaggagatcgtgttggaaaggtagctcagcaccgtttccagcagttcaaacacgctctgcatcaggtagttgcccatgccgcccgcaggctgccagggcttgccctcgaccatcggggccagcagctcggcaaacagcagcagaatcagaccggccaccatgccgatgacggcagcggcctgcggcaggaatgtgaccgcacccatataagcggatgccagatcaacaccgcacaagtaggtcaccatgccgacaagtccgttgggcgagaagatgaactcgccccactccttgtggcgggcatgggtgtacatgttcagggccatagccgccagcaccagaacaatgccgatgtagacagccaccatcaggatacccgtgatggaatccatgaccgaaacgggcttgcccgccatgccaatggcatggtagagcgggtcgagggcctcctcgtagccaaagagagaaccgtagaccaggccgaagatcgtgctcgaaatgccgcaggggatcatcagatggaacaggtcattgtgcttgaccttccacataaaggtgctgaacagcgccagcacaatgccctgcccgacatcgccaaacatcatgccgaacagcacggtgaatgtgatcgctacaaagccggtgacatctgtctcgccgtaggcgggcagaccgtacatttcgacgaaaaactcaaaagggcggctccaccacgggtttttcagcttggtggggggcgtcatcttgccggcggattccggcccatcgaccgtgacgcgcagccccttgacggcgcgggccttacccgcgacctcgtccacctcagacgccgggacccagccgacgcagaagaagtgttggcccttgaccgcagccatgcggcgcagatcatacacagcggcatagtagcaggccgtgttgtagagcagctgcaccttatcggcgttctgctgccacagggcggcaatgcggccgttcacatcatcaacactgcggttgacgacatcgagattttccttgaagtgggtgatgatttcctcgggcgagcccgccgcgccgggcacatgcaccggctcaaagtacagcatcgagaagatgccgtcggtttccagcgccttctcgcgcggggtcatgtagacgccccagtaaccggccttggtctggctgcagggggtaaacaggatgtacgggtcatcgccgtaattgttcatcagcttgttatagccctcggtcggcagaaagccgaaccggaccttgacatgggcacagccgagaatatcatcgacattgaccttcagcccggtaaaatggctgtactgcgtgatgccgtcctcgcagagctttttctggtcaagcagtaccttgcgctcggcgcaaaggtcatcgatcttttccagcagatcacccaggtagctacggccctcggcatccacagggtcgctgtgctgctgcccctcgtgcagctctatgttggcttcctcagccatcgtctcgatctggtcgcggatcgctgtgtgggggttttcctcgttcagagcgccgtaccccagcgattccgacatatatctggtggcgggttcgaggtcaaagcgtccgtccatacagcacgagccgataaactcgttcagctggggcatcgtgccctgcacccgcaccagtttcatcttttcaaccaatcagttcacactccttagcaaccttgcccctctccggtcttttgccgcttcgtaggggcggggctctgctccgcccgccagctttacgcagccgctcctttccgggaaagccacacacacggcaaaacggccacgggcggagcagagccccgcccctaccgtgcaatttcttacagagaggcaagtttaagaatcaatcgttctcatcaaacccgaccagcagcggcttcagctcctcgggcggcagcttgtaatgcacgccctcaatgatgtggtccagatcctgcacctcgcagcgagccagccagacataacacatcatgaccagcgtcgggtcggtcgagaagcggagccactttttgcaccagtcgcagcggtagtggaagaagccctccttcagcacgctgtattcgtggtggcccagcagcgggccgtacttcgttctggcaaaccgtgccttgaactccgcaagatcccgggctgccagaaggtactcccactcggcggcggtcagggccgtgcagtcgcgccgcgctgcgctgcgcacggcggaatccggcgcgccgatgcggattagccgcgccgcattggaaaccgccgatgtatcgcactccagctcgatcaactcccgcaggcccggctcggcagcaggcccatggcccgccggtgccagcgccacaagcgccttgtggcggcagtcctgcaaaagcggctcggcctgtgcggtcaggccccggtctggtctggcgtttcgtaagggagccagaaccttttcccacggggtgccggccactgcggccagaataccgtccagcccggtcgccttggccagcgcatagaggtcgatgcagcagcgctgctgcataaactcgggcagccggaacaggtaatcacccgggcggcccgcatccagacaccgcatggcggcggtcagctcgtccacctcacagcagagggtgaagtattcatacaccttgctgcctgcgctgcggtcataccggcaaaggctgtcataccgggtgtacaggctctgccgcagcaggctttccagctgggcgcggcgggcgtactgggggttgacatcggccagcgccgcgctgtagagcggctgttccttgagggcggcggctaactcagacattgtgcggcagcccatcaggcggcggtaatcctctgcccgcaggcggcggccgtacagcgcccgcgccttggccagcaccgcattgccggaggcattgctcgccttcgtcattgtgcggcctccccgctcagggtgcgctgtacaagcgctgcgcaccattcagcttcatggctccgggcggcggcggtcatggcctcggcggcctgctggcactgctgctccagcgcagcaagggcggcggcgttgccttgctctgcagccttggcagcggcctcacaggctgtcttttcgcgggcgtcacactccgcaatgatcttctgcttctgctcgtccagcgcggccagccgggccgtgcgttccagcttggccttttcactggccttgcgctgggcggcatccatctccaaaatggcctgcatcaggtcgtttacatctttcatgcaatgcacctcactctttgagagctttacctgtcctgcggtttcctatttatagggttgccccatttcaggctcagccgtattatagcactatgaccaaatatggcaagtggtttttgtgcagttttatttgtacaaaatcgggattgtgtttttcttgtcaatgcaagcgccgccctcgcctcagcggcgcaactttggtacaaaacactgcatctgttgccgtaaactttacagtggcggcgcggcgcgctataatgggcgatggttgcaggaacggccgttggccgcccctgcacgcgcaatcacatagaggggtcggaaaatcatgtcacattcactattgcatcaccgcggccagatgtccgaggcgttccgcacggtcatgtttttgtccgcatcgggcgggctgcaggatgcctacacctacatcgggcgcggcaaggtgtttgccaatgcccagaccggcaacatcgtcctgatgagccaaagcctgttcgagggcgattttgcgcggttcgcccactattttatccccgtgctgtcctttgcgctgggtgtcgcggcggcggagtgcatccgcctgcgctggcgggaagcacagcgcgtccactggcggcagctggtgctgctggcggagatcgtactgctgttcgtggtcgggttcttccctgctgcgtgggacatgggtgccaatgcggtggtatcctttgcctgtgccatgcaggtacaggccttccgcaaggtacacggctatccgtttgccagtaccatgtgcatcggcaatctgcgcagcggcatggattctctggtggcgttcggccatacgcgggataaaagcctgctgtacaaggcactgcactatttcggcgtcatccttgtctttgcgctgggtgccggtgtggggacccagtgcgtagccgtgctgggcgccaaaacgatctggctgtcctgcgccctgctcgcggtaagcctctgccttatgttcatcaaggaggatcttgagggctgagggcaaaaaattccccgcagaccatggcggtctgcgggggtatttttatgcctgcttgcgggcgtgtttgtttttcagatcattatagacaccgtgcagccgctcgcccagaaaggtcagccctgccagtgtcggcgcgctgagcgccagcagcacgatgagtaccagcacaccgcccagattcaggcggaccagcggcagccacggcgccagcaaaagcgccccgccaatgcccgccgccgccatgctgccccagatagcccagtgcagcggcgtgaacgggatacaaacgccccacaaaatctgcagaccgacacagaggatggccagcgtgcagatcgtgcctaccatctcggatgggatgtcgaacgcaaagccgaagccctgtgcgcagaacaccagcagaaaatccgtcagcccgccgggcatggcggcccgcatgacattgcgcataaatttgccgcgcaccagttcatggttcggctcaagcgccagaaagaatgccggtgcgccgatggtggcaaaggtgacgagggacaactgcagcggttggaacggataggccagcggcaatcccagcgccacgatgctgagcaggaacgagaagatgttcttgaccaaaaacagcgaggccgagcgctggatgttgttgatgacacgccgcccctcggccaccacgctgggcagggccgcaaaatcggagtcgagcagcaccagctgcgcgacctgactggccgcctgcgcacccgatgccatagcaatgccgcagtcggcatcttttaacgccaaaacgtcatttacgccatctccggtcatggctacggtgtggccgcgcttttgcagcgcgtggacaagctgacgcttctgctccggcgtcacacggccaaagaccgtgcatttttcggcggcctcggccagcgcctgctcactgcgcagggtggcggcgtccacccagtgctcggcccccgcaatgcccgcgcctgtcgctacatggctgacagcctgcgggtcatcgcccgagatgaccttgacatcgaccccctgtctggcaaaaaaacggaaggtcttgggggcattctcccggatgcggttctgcagcggcagcagcgccaaaaattccagctgcgctgcatccagagccgcgggcgggtcaggcagagctgcgttgtattttgccagcagcagcacacggcggccctgtgccagcagcggggaaagtgcgccggtcagctccccggcacgggtccccgccaaaatatccggtgcgcccaccacataacagccctgcgcgccgaaatccttggcgctgtacttgtacgccgtgttaaagggcaccgtgcgcaccgcaagccagccggcgtccccctgtccaaagcggtcggtcagggcgcggccggtgtcgttgtcgggctgctcccccgcgtagaaggcgtgcaggatctcgtccagcggcgcattttctgccagcggcagcgggtcatccgcctgcatggcgctctcggtgatcgtaccggtcttgtccacgcagagggtatccacccgggcaagcgtttcaatgcagttcatatcccgcgtcagcaccctgcgtctggcaaggcgcatcatgctcacggccagcgccacgctcgtcagcaggtaaagcccctcggggatcatgccgatgagcgctgccaccgtggcattgacagtctccttcatcgtcagctccagcacccagtgctgcttccagatcagcaccgcgccgatcgggataagcgctatgccgataaatttaatcagcctgtcaaggctgcgcatcatctcgccccgggcaacacgatggccgttggcctgcgcctcagctgtcagcttgctggcgtagctgtccgcaccgacatgggtcagccgcgccgtgcagcgccccgccatgagaaagctgcctgaccgcagctcgccgcccgcctccttcggcaccgcccgggcctcgccagtgataagggactcgttggcctgtgcgctgccgtccagcacaacagcgtctgctacgatctggtcccccgcgccgaactccaccacatcgtcccggaccagatcatcggagagcacctcgcaccattggccatcgcgcaggcagcgcaccttgcgggccgatacaagggtcagctcatcaatggtctttttggcgcgcagctgctgcacgatgccgatgagggtattccagaacacgatgccgagaaagcccatgttcaaccacgagcgcacgagcgccagcatgacggccagcacgagaaacacaaggttgaaataggtacagatattgtcccgcacgatctcaccggtggtcttggtctgggagcggggcggctgattcgtctggcccgctgcgcggcgcgtttcgacctcggcagcggtcagcccgtgatacgatggcatgtaggaggctcctttcgggtggaattgggtgggttgtaggggccgcacatgtgcggcccgcggctttcccgtaattgcgcgtttgccgttcggctgcgggccgggcatgcccggcccctacagcataaacgatccacatcgctttattatggcaagtatacccatcaagtatgaacaaaacaagtgcccggctgcattttggtgcagtcgggcagttttgttcatattggtcagcagggcagcgccggctcagtcctccagcggtgcaaaggctgccgtggggtcggcctcgacagcctcgagattttcggtcagctgtgcaagcaccttatagaatatggccagctcgccggggtctatcccctcatcggcgcggcgcgatacatcggccaccacggcccttacccgcacggcgcggtcgcggcccgcctcggtcagccggtagatagcgttatacttaccgggtgcgccgcacttctggaccagaccgctgcggaccagatcggccagcacgcgggagatcattgccgggtcaagatcgcaccgctcggtcagctccgagaagcgatacccgtcgggggcagcgtcaagctggcaaagcaccagcgtgtgcccggccttcagctcaatgcggttcatgccgtccgtcttgatgcgctggatgaccttctgcaggcgggacagcgagacggacaggcggataaaacgatcattcatatcagacatcctgcagctcgccgcgggagcttgctttcaggtaggcatagatgaagccgtccagatcaccgtccatgacagcctgcacattgccgctctcgtagttggtgcggtgatccttgaccagcgtgtaaggcataaagacatagctgcggatctggtggccccatgcgatctcattctggacgcccttgatgtcatcgatcttatccttgtgctgctgcaaagcgatctggtacagcttggccttcatcatctccatagcgtactcacggttctgcagctggctgcgctgggtctggcagctggtcacaatgccggtgggcttgtggatcaggcgcacggcagaggaggtcttgttgatgtgctggccgccggcaccggaggaacggaacacctgcatctcgatgtcggcggggttgatctcgatgttgatgttgttgtccagctcgggcatgacctcaaggctggagaagctggtctggcggcgggcgttggcgtcaaacgggctgatgcgcaccagacggtggacaccgtgctcgctcttgagcatgccgtaggcgttggggcccttgaccatcatcgaggcagacttgataccggcctcatcaccgtccagcacatccagcacctcaacgctgtagccgtgggcctcggcccagcgggtgtacatgcggtagagcatctcggcccagtcctgcgcctcggtgccgccggtaccggcgtggaaggtcaggatcgcgttgctgtggtcgtactcaccgttgagcatcgtcataagctgcagctcatcaatggccttctccacaccgttgacagcctcctcgccctcagcggcgagggcggggtcgttctcctcctcgatcatctccagcagggtctcggcctcctcatactgggtggagagcttgccgaagcgctccagcttatttttgacctcacccatctcaccgatgatcttctggctgcggtcctgatcatcgtaaaagccgggcatcgtcatctggtgctccagctcagccagacgcttctcactggcttcgatggaaagggcgtcccgcaggtcgtccacggcagtcttcatgccgccgagttttgctttcagttcgtcaatggtaatcatatagagtatccctcatcccataagttcgcataaaattacatagtaccattataagcgaattgcgcagcgttgtaaagagggcggaacgcataaaatattcgcagggggggatgtatgccgcccctacagcacaaacagatccatttcacttgtaaaatccatctatcttgtaaagtttttatgttttctttgcatttatccatttgatgcggtataatgactttatgttactgggaggatattcaatgacacgctacacaggaaaccactgccctgtctgtgaacaggcttttaccgatacggacgacatcgttgtctgccccgactgcggcaccccctaccaccgggactgctggaaaaaggtcggggcctgtatgcaccgctccgagcatgccgccgggtttgagtggcagcccgagatcggccccgaggccgtaaaggccgcgcatgaggccacctgccccaactgcggtacccgcaacacgccgggcgcggcccgctgcagccattgcggctgtcccctgccccgcagcgaggccgacagtgccgatgccgccaagcccgaggagcaggtccccatctacgcccgggaccccgccgccctgcatcaggaccgcagcgccgcccccggcccgcacatcgaaacctacagcgccgaccgggagggcggcatctaccgccgggagatcggccccgaggatacgatcgacggcatcaaggctaaggactgggccgcctatgtagggcgcagcccgatgtactacctgatgcagtttttccgcatgagcatcacgaaccgcaaggccgccgtctgcctgtcggcgttccttttcggcccggcgtacctgttctaccgcaaaatgtggaaggagggtctgctgactgccgttctgaccattgtgctgagcatccctacctttatagagatcatctcggtctttaatccctcgcttctcggcgcgatgccgctgggctggctgccggtcgccgtcaatgtctgcgccgtggcatcttgggcgctgaacatcattctggggctgtttgcggtctcttggtaccgcagggaggccaagaaaaatatcgaccgcatctacgccgactaccctgacgatgaggcccgcaccgatgccctgctgcagaagggcggcacgaatctgctggcggcgctgctctactttggcattatgctgctgcttgcctcgctggtcatcaatctggccgggcccggctttgtacagtacgccctgtcgataagcggctattaaaagctttgctgtatcatgtcctgcagggcggatgtcaggcatcccccctgcataaacacagcatcaccaaaaaagaacgcacaatacaccaatggtgttaaaataggaggaaactcatgaaaactgctctggttattatggctgcaggcattggctcccgcttcggcggcggcatcaagcagctggcggctgtgggtcccaacggcgagatcatcatggactattccattcatgacgcgatcgaggccggttttgacaagatcgtctttatcatccgccacgacattgaggatgccttcaaggaggccatcggcgaccgcattgagaaaatctgcgccgaactgggcgttgagatcgactacgcctttcaggcgctggagaatgttcccgcagggtattccgtgccggagggacgctccaagccttggggcaccggtcaggccgtgctggcctgcaagggcatcatcaaggagccgttcgccgtcatcaacgccgatgactactacggcaaggaggcctttgtccggctgcatgactttttgcagggctacacgcccgacaaggccggtgatctggccatggccggctttgtgctgaagaacaccctgagtgacaacggcgccgtgacccgcggcatctgccagatgaacgaggcccattacctgaccggcgtgctggagaccagcggcattgaaaagaccgccgacggcgcagccgcaggcggcaagagcatcgacgttgagagccttgtctcgatgaatatgtgggcactgacccccgagtttgtcgatctgcttgacgccggttttgtagagttctttgagaaggccgcgcctgccaacccgctcaaggctgagtatctgctgcccatctatattgatgagctgctgcacgcggacaaggtcagcgtcaaggtcctgcccacccacgacaagtggttcggcgtcacctacgctgaggacaagcagaccgtcatcgacagctttgccagactggtcgcagacggcgtgtacaagaaagacctgttcagcgatctgaagaagtaaacagcacaccgcacctttcccccgccgtatgacgggggattttttataaggcagcactatcataaaacagcgatgtaccatcggcggcgtttggttgaaaattgcaaaaccctgacacacaatgctatggaaagcggaggcaaaaggcggtatggttaatacaacagaatacacaacacaccgctacaggagggcaatcatggcaaagaatgaagttgatcttacgaccctgaccccggagcagcgtgacgcacgccttgccctggatgtggagcgcttgctgcgcttcggccgcaagcacaagcttatcaaggatctcgatgttctggtggcgcgcaacacgctgctggatctgctggcactggctgcccccagcgaggccaagcccccgaaggaggaccccgagacgcccgccgccctgctggatgaaatggtggagctggccgcccggaaggagctttttgacggtgccgtaaatcagtaccgcatcaactttgagacccgcctgatgggcgccctgatgccccgcgagagcgaggtctgcaaaaagttcaaaaagctgtaccagaagcagggcgccaaggctgcaaccgactggttctaccgcctgtgtgtggacaccaactacatccgcaccgcgcagatcgccaagaacatccagtggaacaccgccaccccctacggcgagctggagatcacgatcaacctgaccaagcccgaaaaagaccccaagaccatcgcgctggagcgtctgcagcccaagagcggctaccccgcctgcatgctctgcaaggagaacatcggctacgcgggccgcatcaacttccccgcgcgccagacccaccgcattgtgcccatcacgctcgcaggggagcagttctacctgcagtacagcccctacgcctacttccatgagcattgcatcatgctgcatgatcagcacaagcccatggagatgaacaagcagacgctggccgagatctttgatttcgttgcccagttcccccactatacctgcggctccaacgctgatttgccgatcgtgggcggcagcatcctgagccatagccattttcagggcgggcggtatgttttcccgatgcagaaggctgacattgccgtaccgatgaccgacatccgctaccccggcgtcagggcgggcatcctgaactggcctgtttccgccgtgcgtctggtcggccgcagcagccagcagatgcagatcgtggccaacaacatcctgagcgcctggcgcgcctacagcgatgagagtgtcggtattctggcagagacggacggcacaccgcacaataccgtgacgccgatcctgcactacgatgagaccgacgggttcattcttgaccttgcgctgcgcaacaaccgcaccagcgaggagttcccggacggtatcttccacccgcataaggaataccacaacatcaaaaaggaaaacatcggcctgattgaggtcatgggtctggccatcctgcccgcccgcctgaaggagcagggggcgcagatcgccgaaattttggcgggccagcgcctgaacaccagccgtatcgagggcgatgcactggctgtccatgccgactggatcgatgaactgattgccaagtacggcaccggcatgaagcccgaggccgccaacaaggccgtcaaggccgagattggcacggtgttcagccatgtgctggagaatgccggtgtctttaagcaggacgcccagggtcaggccgcgttcgtcaggttcatgcagagcgtaggctttaagaaggcgtaaaatcgcataagaaacagggacatcgacccggaagggctggtgtccctgttttcgttgccttgtaggggccgggcatgcccggcccgcagccttccgggagacagccgtttgccgtacacatcccgcggagcggtcaagaccgctccctacaaagcacccgttatcgtcatcctgtagggaggggtcttgacccctccgtgcggctttcccgcaagcgcctgtttgccttacgcgtgcgggccgggcatgcccggcccctaccgcgttgcgttctcctgatacccgcactcccacagcacgccccaatccagttcttcatctatcccggcttcataccgtgccaaattcacatcaatgacccgctgctttacattcacgcagcagagcagtgtaaagctgaccgctgccgcaaaaatggcaagcttcgctgccgggatcggcctgaacacccgcaccagcgccagcaccgcacagacagccagcacaaacaggcaccatgcagccgtgaaccgccggggcgtcagggcacagagcgtcacatagacggccagtttgcccgctgccagcgcagcaaaagccacaccaaacccgcagaacacggcggccaacgctttaggcagcggcgcacggccaaagaactgtatgcccgccagcaccgaaaagtcgagcagcaggattttcagcagctcccagaagccgttcaccgcgaaggcagcggtgtccggtgcatccagccccagcggcgcagcggcaagccactcccctgcctgcacggcaaaaaacagcgcgtagacaccgcacagcgccgttacggccgccaccgctgtggtacgcggcacaacgcggcagttttccagcacagcggcacactgctgcgccgtggcgggcggtgctttgcggcgcagggagccgcccacaagcccatacagccacgcccccaccgggagtgagagcaggatatacatcagccggtcgatgaatctcacattgttcagcagcctgttccaccagccggacatctgctgtcccagcgcggcaaagttggcatcggccgctgaaagcaggccccatgccacaccgcacagcgccagcgtcaccgctgccgtaacgatgaggcgcagaattttttgtacccccgtgcggtcctgcaggcgggtgcgcagcgcagcaaagacagtgcgcgcccgcagaaagaaattcccgaacggcagaaggccgaacccggccagcgcgtccagcggggccagactgccgctctgcccctgcgccagcatcccgcaccgtgccagcacataccagacggcgaacagatgccataccatccactgccagctgcccagcggctccggctggtagccgtacagcgggtacgccacggccagcgccatccagcatacggcccagagcggcgtctccttagcggcggtgcggtgcgcggcacgggcggcacagtccacatacacaatgaacagcgccgcaaaaaccggcattccccagccggggtactccgccgggaacatcactccgcggatgtacagatacgccagcgggtacatcagaattgcatacagcatagcgaaaccaccttcccgtaggggccggatatgtccggcccggtcgtgtaaaattgcgcgggcgtttgcgggtaagccgcgggccgggcatgcccggcccctactgattctcgtccggcacaaactccaaaatgtcccccggctggcagtccagcgccttacacagggcctccaaggtagagaaccgcactgccttggccttgttgttctttaagatggacagattcgccggggtgataccgatttcctcggccagctcgcccgccgccttgtggcggcgggccatcatgacatccagattgaccacaataggcatcgtgacgccccccttacacggtgtagtccagctcgtccttcatgcggacggcctgcgcaaaggcgtttttcagcacccggacgatcagcgccataaaccctgccgccaccgccaaaaacaggaacggcagatagatccccgctgccaacaggcagaatcccgctgcgccagcacagcaccagctgatgcgccgcaaagccgcaacattggtggagacaaaaacctcgcccgcttcaatgcggcgcaaaaactgatacaggctgcacagcatgaccagcgccagcgcggcgcaggcatatcccatccccagcagcagggggccgctgcgcggcggcagcccatgtgccgtaaccatccaatgcgtgaccttcgggccgcataccgtcataaccacgctgcccgcaatcgccagcgccacaacggcgcgggtcaaaagtatgcttctctgatcgttccaaagctgcttcatctgtatccacctcccggtttattgcctgcagtatagcacatcgcatatcgttttgcaagtattttttatcgtttttcaataattttgtaaaaccacttcgtttcgtttgcgtatctcgaaaaaatggtgtatcatagaaacaactacaaacttttgtgcgaggtgcccttcatgaaagtatctgtcctgcttgctgcgcttgggttggccggctgcctgaccgcctgcgcccccaaaacgcccgacaccctccgacagcccgccacggcggaaagtgccgcccccaccgccgcgcctgcggccaccgcgcagcctgcggcagctgagcccgccgccgcagtgggcaccgtgctgcccgcaggcgcagacgccgggcgcagctatctggatgaaacgcttttcatcggggattccaacaccgcgcgctacctgctgtatgccgatgatacaggcaccgcttttacaagcctttccaacaacatcggtgttgtcagcatgggagctggcgcgatcaccacgctgaaatgcgaaaagttcaagggctcctcgaccatgtacaccgtgccggaatcggttgccatgctcaagccgaagcggatcatcatctgctacggcacaaacaacctctccggtgcctccaccgatgcgacccggttcatcgccacctatctgcaggggctgcaggccatccggcaggcgtggtcctactgcgacatcatcgtaagcgccatcccgccgctggacaagcagcgcgaaaacacgaacctgacgatgacgcaggtcgatgcctacaatgccgctctggtacagatgtgcgaggaaaacggctttaagtttctgaacagcgccgaggtcctgcgggacgatgccaccggctgggccaaaaccgactacaccctgtcagacggcgtacacctctccaaaaaggccgttgaagcgtattttacttatgtacgcacccacgcataccagactgaggaccgccgcccgcagccgctggggagcatcccgcagccggacggcgtgcccgcaaaccttatcacaaaggaccccatcgccgtgcgcggtgccaaggtcccgctggaatttgtcgctgaacacggcggcaagctgtccggcaccaccagccagcttgtcaaaaagggtgcgaccgccggggccgtgaccgccgtgccggacgcaggctttgtctttgcgggctggaccgccagctcaggcggcagctacagcagcgcgaccatcagctttacgatgccccagaacgccgacgcgggcggcgtggtgctgacggcccacttcaaggccgatgcccacgagcacgagtatgttgaggtcgagggcaccaagactgccgccacctgcctgaaggccgggtccgccaagtacaagtgtaaaatctgcggcgaggtcattgagaaggacatcaagccgctgggccacgactgggatggtggggtgcagaagggcgcggaaatcatctacacctgcaagcgcgagggctgcggcgagacgaaggtcgaggccgccaaggccacgccgcagcccaccgcaacaccggtcgtgacgatggcaccaacggc

SEQ ID NO: 14101 - DNA, 18174 bp, Unknown
  gut microbiota DNA sequence
ccgagccaacggcagtgccgacaccgacaccggaaccgcacacccatgatttccagctgatcagtgacaccgccacctgcacggcaggcggcacaaaaacctaccgatgcagctgcggcgagacaaaaacggaggaatctgccgcactggggcacagcggcgttacacagcccgacggcagcgttgtgtgctcccgctgcaacgcggttttgcaggccgcacctgcgccagaaccagttacgccgagtgaatcaacaacggaaagtgacacccccaccgagtaaccaccatgtaggggccgcacatatgcggcccctacaaatctaattgaaagaggtccccatgtctgaaactaccaccccgcagcgcccgaaaaacagtgcgctgatccgacgctttctcccctatctggtcaagtaccgcggcgtgctggcctttgatctgttctgtgccgcactcacgaccctgtgcgacattgccctgcccaaaatcatgagcaccctgacaaacacggtcacggcggcgtccctgacggcagaaaccgtgctgaagctggcggcactctactttgtgctgcgcgtcattgacggtgcggccagctactttatgtccggcgttggccatattatgggcgtgcatattgagaccgatatgcgccgcgatgcctttgaccatctgctgcagctcgaccatacctactacaacaacaccaaggtcggccagatcatgggccgcatcacgaacgacctgttcgatgtgaccgagtttgcccaccactgccccgaggagtttttcattgcaggcataaagatcgccgcctcgttcgtgatcctctgtcagtccaacataccgctgaccctcgttgtctttgcctgtgtgccgctgatgggcgttgtctcggtcaagctgaaccacaagctgcgcgagcggttccgccagcagcgctttcagatcggcgagctgaacgccaccattgaggacagtctgctcggccagcgtgtggtcaaggcctttgcggccgaggatctggagcgcgaaaagtttgagcagggcaaccgcgattttgaaaagatcaagacgctgggctaccatgccatggcggccttcaacacgtccacccgcctttttgacggcctgatgtattttgtcgtcattctggccggcggtctttccctcgcgtacggcgccatcagcgcgggcgatctggtggcctatgtgctgtatgtctccacactgatcgccaccatccgccgcatcgtggaatttgccgagcagttccagcgcggcatgaccggcattgagcgctttgccgagatcatggacacccccattgccatcgccgaccttcccggtgcggagccgctgcaggtgcgggagggcggcatcgacttctgcgatgtcagctttgagtaccctgatgaccacaataaggtcctgcgccatgtcaacctcaagatccgccccggcgagaatgttgcgctggtcggcccctccggcggcggcaagaccacgctctgcaacctgattccccgtttttatgatgtgacgggcggtaagatcctgatcgacgggcaggatgtgcgcagcgtcacactgcgcagcctgcgcgaggccatcggcgtggtgcagcaggatgtctacctgttcagcggcaccgtagcggagaacatcgcctacggccgccccggtgcgacccgcgccgagatcgaggaggccgcccgtctggccggagccgacggctttgtccgcgcattgaagaacggctacgacacctatgtcggtgagcgcggcgtcaagctttcgggcgggcagaagcagcgccttgccatcgcccgcgtatttttgaagaacccgcgcatcctgctgctggacgaggccaccagtgcgctggacaacgaaagtgagattctggtcggccagagccttgacaagctggccaagggccgcacgaccctgacgattgcccaccggctgacgaccatccagaacgccgaccgcatccttgtcttaggccgggacggcatcgaggaggagggcagccatgcggagctgcttgcccggcagggtgtctactaccggctgtggaacggccttgtgagcgcggaaacgctgtgacccgcgccaaaggcttctcctctgggggagaagctgtccgcgaagcggactgatacggggagagcctgccgtacctccccgttcacggaatacctccgtaagcctcccctcatccggcctcggacggggcctcggccaccttccccctagggggaaggcttttttatttgtaccatcatccttctcatattcaatccgcatgtcatcacatttgatgcgatcatgatccacaggaagcctgccatgccgtactgcggcagcacaagccggatggctgtgatgcggaacaccgaatccagcagcgaataccggaaggtagccagctgctcccccagccccttgagtacaccgtccaccatgctttccagatacatgaagggcgcggccagccccaaaatctgcacatagcggcccaccatggcatcgcggtagacaagctctgccagcggcgcgcccagcagcacaaaccctgcccccgccagcacagaaaacccgccggtgaagcgcagcatggtaaacaccagccgccgcgcagcagctgcatctccccgggtgtgggcgcgggtgatctccggcatcagcaggccggacagggcggtcagcaccgaaaacggaaaaaacagcagcggcagcgccatccccttgagcgcaccgtactgcgccatcgccgcagtgcggctgccggtgcagagggtgagcgtataagggatcaggctgctctcggcggcctgcagggcgctggccagcaggcggctgccctcgaccggccagaggatgctgtacagctccagcgcggtgtaggggtgcagtggggcaccggggcggggtgcaaattccggtgttcgggcagcaaaaagcagcataataccgcaggaaacgccctcgctgactgtgttgcccagcatgacagccgcgcagccgtagcctgcaccccactgcgccagcaggcgcagccccgccgccgctaccgccatccgcacaagctgctcaacaagctgcgctgtgatgttgggctgcacccgccgcgccgccagaaagcacccccgcaccgcccccgataccgccataaacggcaggctcggtgccaggatcagcagcgccgtctcggcacggatgtcatgcagcagataccgcgcgcaggggcctgccagcacagcctgcgcagccatagccgtcgtgccaaagcccagtgccgtgccgcatagcccgcgcagcgtctgtgccataccgctgccgcgggccagactttgggctgccagacgcgccgaggccacatggatgcccgccgtggcaaaggagacgaacaccatgtaaagcgccagaatcagctggtacagccccatcccctcactgccgagggacgctgccaccatgacccggagccccatgcccagcagccgcagcaccagccccgacccggtaagcagcgctgcattgtgcagataattcctgcggttgttcatacgccgcccccttcccctgctgatggatatgcggaaggcgcagcgggtataccagcgcgtgaagccttcccccttgggggaaggtggccgcaggccggatgaggggcgatgttatcgcggccacccgttaccgggcaatcacggaaagtctgcccctcatcagtccgcttcgcggacagcttccccctctgggggaagccttttcgctgcgcagcatcttgcaaagctgcgcgaattttggtacactgttataaaagcatttttaaaggagcatttacaaatgagcgaagcatgtacccatgattgcagcagctgtcaggctaactgcgatcaccgcgcgccgcagcatgagccgccgcacgcaaaaagccgtatcaaaaaggtcatcggcgttgtttccggcaagggcggcgtcggcaaaagcatgaccagcgccatgctggccgtctcgatgcgccgccttggctacaaggccggcgtgctggacgccgatattaccggcccttctattccccgcctgttcggcgtaaagggtcctgccaccggtgacggcgagagcatcaacccgatctgcagccgcaccggcgttgagatcatgagcatcaatctgctgctcgatgaccccgaggcccccgtggtctggcgcggccccgtcattgccggtgctgtcaagcagttctggcaggaggtcgtgtgggatgttgatttcctgttcgttgatatgcccccgggaaccggcgatgtgccgctgaccgtctttcagacgctgccggtggacggcatcgttatcgtgtccagcccgcaggagctggtcggcatgatcgtcggcaaggccgtccagatggcccagatgatgcatgtgcccattttgggtctggtcgaaaatatgagctacgccgtctgccccgactgcggcaagcacatccatgtgtttggcgacagccatgtggatgagattgccgacaagtacagcctgccggtgctggcaaaaatgcccattgaccccgagctggccaaggaggccgatgccggcatgatcgaggtctttgcgggcgactaccttgacaacgccgcccagacggtggccaagctgctgaaaaagtaagacagcaccattgcccgcctgacggctgcggtattacggtaaatttgctgcggcgcggaacaacaccgcgccgcagtttttggaaagaggggggtccttatgaagaagttctgggaagaattcaaatcctttgccctgaagggcaacatgatggatatggccatcggtgtcatcatcggcggtgcgttctcaacgctcgtgacctcgctgactgataacctcatcagcccgattctgggcattctgggcaaggtcaactttgacgctatgatgtgggatgttttcggcgatggcaagctggttttcaagtacggtgccttcatcacctcggtcatcaacttcctgatcatggcgctggtgctgttcctcatcgtcaagggcatgaacaagctgatggcccttggcaagcacaccgaggagacacccgcggagccggaagcccccgccgcccccacgcaggaggagctgctggcagacatccttgctgagctgaaaaagcagaacgaggaaaagacggcgtaactccaccctgctgcagccttggcggcagcggcaagggtcccggtcggacatggaatccgcccctgtttgtacggatcggtacttaattttattaggttttaccctctcgaattaaatttaaaaagatttttcgcttaatttctgtaaaatcttttgctttagcattgtaaagcgcctgtatctatggtatgatgcagataagaacaaagacgttcccacaaggggcctgtgcgccctgtgggggcgtcttttttgtttaccccgagagctgcagcgttatgtgcgtagctgcgatgttttcggcatttaggaaggagcgattacaaggcatggaaaactttaccgagcgcaagtccctcgccgggctgtacagcccccaatttgagcacgacaactgcggcatcggtgcggtcgtggacatcaagggccgcaagagccaccagaccattgacgatgcactgcagattgtagagcatcttgagcaccgcgcaggcaaggacgccgagggcaagaccggcgatggcgtaggcattctgacacagatcagcgacaaattctttcagaaaattgcggctgaactgggcatcacactggggaaagagcgcgaatacggcattggcatgttctttttcccgcaggatgagctgaagcgcaaccaggccaaaaagctgtttgagatcgtctgcaaaaaagagggtctgccgtttttgggctggcgcgaggtgcccacctgccctgcgatccttggccacaaggctgtagcctgtatgcccagcatctggcagggctttgtaggcaagccgccgcgtctggacgccggtattgcctttgaccgccgcctgtatgtggtgcgccgcgtttttgagcagtccagtcccgatacctatgtctgcagcctgtccagccgtaccatcgtgtacaagggcatgttccttgtcaaggagctgcggctgttctaccccgacctgcaggacaccgactacgaatctgccatcggcatggtacacagccgcttttccaccaacacagcccccagctggaaccgcgcccatcccaaccgctttattttgcacaacggcgagatcaacacgatccgcggcaatgtggatacgatgcttgcgcgcgaggagaccatcggctccaactacctaaaggacgatatgacgaaggttctgcccatcgtcaatcaggggggctccgactctgcccagctggataacacactggaatttatggtcatgaacggcatggatctgccgctggccgtcatggtcacgatccccgagccgtgggacaataacaaggcgatggaccccaagcggcgcgatttttaccagtattatgccacgatgctggagccgtgggacggccctgccagcatcctgttcagtgacggtgatgtcatgggcgcggtgctggaccgcaacggcctgcgccccagccgctactacatcaccaaggacggccgcttgattttgtccagcgaggtcggcgtgctggatctgcccgctgaggagatcgtccgcaaggaccgcctgcgccccggcaagatgctgctggtcgataccatcaagggcgagcttgtcgatgatgaaaagctgaaggccgactacgccggccgccagccctacggcgagtggctggaccgcaatctcgtcccgctgtccgacctgaaggtccccaacaagaaggtgccctcctacaccaaggagcagcttgtccagctgcagaaggcgttcggctaccggtatgaggatgtctcgacgatcctgctgcctatggcgaagaacggcagcgagcctgccggggcgatgggcagcgataccccgctggccgttttgagccacacccgcccgtccctgagcgaatatttcaagcagatgttcgcgcaggtcacaaacccgccgatcgatgccctgcgcgagaagatcgtcacctccaccaccgtctatgtcggtgcgcagggcaacctgctggaggaaaacgccgacaactgcaaggtgctgaagatcgagaacccgatcctgaccgagaccgacctgctcaagatcaaggcgatggatgtgcccggcttcaaggttgtgacgctgtccatctgctactacaaaaataccgatctggaaaaggccatcgaccggctgtttgtcgatgtggaccgcgcctaccgcgacggcgcaaacatcctgattttgtccgaccgcgacattgacgagtaccatgtcgccattcccagcctgctggctgtcggcgcggtcagcaaatatctggtgcgtacccgcaagcgcaccgccatggccctgatccttgagagcggcgagccgcgccttgtgcatgactttgcgaccctgctgggctacggtgctgccgccatcaacccctatcttgcgcaggaaacgatcggcgcgctcatcacggacggcctgctggacaaggactactacgccgctgtgcaggactacaaccaggccgtgctggccggtatcgtgaagattgcctccaagatgggcatctccacgattcagtcctacgccggcagtcagatctttgaggcactcggcatctcgaaagaggtcgtggacaagtacttcacgaacaccgtctcccgcgtgggcggtattaccattcaggacatccagaacgatctggaggcccgccatcaggaggcgtttgacccgctgggactggacatcaaccgcgagctgccgagtctgggtgcccacaagtaccgcggcggccccgctgccgagcagcacctgtacaatccgcagaccatccacctgctgcagcaggcgtgctggaccggcagctatgacatcttcaagcagtacacggcggcggccgccaacgaaggcggcgatgcgatgcatctgcgcagcctgctcgacttcaactaccccgaggccggtgtcccgctcgaggaggtcgagagcgtggactccatcgtgaagcggtttaagaccgccgccatgagctacggcgcactgtccgaggaggcgcacgagtgcatggccatcgccatgaaccgactgggcggcaagtccaacaccggcgagggcggcgaggccgagaatcgctttggcacagagcgcaactccgccatcaagcaggtggcgtccgcccgcttcggcgtcaccagcaaatatctggtatccgccagtgaaattcaaatcaagatggcgcagggtgccaagcccggcgagggcggccagctgcccggcggcaaggtctacccgtgggtcgccaagacccgcaactccacgaccggcgtggggctcatctctcccccgccgcaccatgacatctactcgatcgaggatctggcgcagctcatctacgatttaaagtgtgccaaccgcaaggcggccatcaatgtcaagctggtcagtgaggccggcgtcggcacgattgcagccggcgtggccaaggcgggcgccgaggtcatcctgatttccggctttgacggcggcaccggcgcagcgccgcgcaactccatccacaatgccggtctgccgtgggagctgggtctggccgaggcacaccagtgcctgattatgaatggtctgcgcagccgtgtgcgcatcgaggcggacagcaagctgatgagcggccgcgatgtggccatcgccgccctgctgggtgccgaggaattcggcttcggcaccggccccctcgttgcgatgggctgcgtcatgatgcgcgtctgcaaccttgacacctgcccgatgggcatctgcacccagaatcccgagctgcgcaagcggttcaagggcaagcctgagtacatcatgaactttatgcgctttatggccgaggatctgcgcgcctacatggccagactgggcgtgcgcaccgtggatgagctggtcggccgcaccgacctgttgaaggtcaagcccgcacccacaggctcccgcgccggtgagatggacctctcggcgctgctgcagaacccgctcatcgaaaattccaacatccacttcgacccgaaggctgtctataacttccagcttgaaaagacccccgatatgcgcgttctgatgaagaaattcaagaagagctttgattccgccgagccgaagccgatgaccgtcgcgctggacgtcggcaacaccgaccgtgcgttcggcacgatcttcggcagcgagatcaccgccaagttcggcaatacgctgcccgatgacaccttccatgtggtctgccacggctatggcggccagagcttcggcgcgttcctccccaaggggctcacgctggagctggtcggcgatgcgaacgactacatcggcaaggggctgtccggcggcaagatcatcgtctacccgccgaaaaacgccgcctttgaccgcagcgagaacatcgttatcggcaatgtggcgctctacggtgccacgggcggcaaggcgttcatcaacggtgtcgcgggcgagcggttctgcgtgcgcaactcgggcggcatcgccgttgttgagggcgtgggcgaccacggctgcgagtatatgaccggcggcacggtggtagtcttaggcaagaccggcaaaaactttgcagccggcatgagcggcggcatcgcctacgtgctggacgaggactgggacttctaccagcgcgtcaacaaggacatggtcagtctggagcctgttgagcataagtacgatgtatcgctgctgaaggatcttatccgtgagcatgtcgagctgacaggctcgccgcgcggcagacacatccttgacaacttcggcgaatacctgcccaagttcaagaaggtcctgccccacgattacgacaagatgttgcgccttatcgcccagatggaagaaaagggcgaggacagcgagcaggcgcagatggaagcattctacgccatgaaaaacgcaaaataagggaggcagactaccatgggaaaaccgacaggatttatcgagatcgcacggcagaccagcctggagctgccgcccgaggagcgcatccagaatttcaacgagtttcatcttccgttgcacaccgatgagcagcaggcgcagggtgcgcgctgcatggactgcggcgtgcccttctgccagagcggcgtccagctgggcgggatgttcagcggctgcccgctgaacaacctcatccctgaatggaacgatctggtctatcagggcaagtgggatctggccgtacaccgcctgatcgccacaaaccgctacccggagtttaccagccgggtctgccccgccctgtgcgaggccgcctgcacctgcggcaatgtcacgggtgatcccgtgaccgtcaaggagaacgagcgtgccattgtggaatacggctatgagagcggcgctatccacgcggttccgcctccggcacgcaccggcaagacggtggctgtcatcggcgcggggccttcggggctttcggtggcggacctgctcaacaagcgcggccacaaggtgacgatctatgagcgcgaggaccgcgccggcggccttttgatgtacggcatcccgaatatgaagctggaaaagtgggtcatcgaccgccgggtaaaaattttgcgggatgagggcatcgagtttgtttttggcgcggatgtgggcagcaccgtcagcgccgaggagctgaaggcccgctatgatgcggtcgtgctttgctgcggcgccaagcaggcccgcgacatcaatgtccccggccgtgatgcgcagggcatctgctttgcggtggattaccttaccagcgcgacccgcagtttgctggattccgactttgccgacggcaaggctgtgaatgccgcaggcaagaaagtattggtcattggcggcggtgacaccggcaacgattgcgtaggcacggccattcgtcagggctgcgagagcgttacccagctggagatgatgccctgcccgcccgccgcccgcgcccccggcaacgactggccggagtggccgcgtgtgctgaaaaccgactacggccagcaggaggccatcgccctgttcggcaatgacccccgcgtctaccagaccaccgtgaaggagttttataaaaacgaatccgggcaggtctgcggtgcgctggttgccaagctgaagagcgaggtcgtagacggccgccgccagatggtccccaccggcgaggaatacacggtggactgtgatctggtgctgatcgcggctggctttaccggctgtgagccgtatgtggcggatgccttcggcgtagagctgacggcgcgcggcacggtggccgatgtgaagtacgccaccgccgacccgaaggtgttcgcctgcggcgatatgcgccgcggccagagccttgtcgtgtgggcgctgcgcgagggccgcgacaccgccgccgtggtggatgaaaaattgatggggtatacgaacctgtaaataaatagggccatcctgtaggggcggatgcttgcattgccccccctgcagcactagcacaaaaaggcacctgccgatcccccggcaggtgcctttttatatcgtattatcgttcacatttccagaaatgacaactgtatggctccaatgtgctgccgccgccgaagtcgtggtcggccccggtgatcaggtctaccgcgcggccgcagccggcgtcaaagtgggcgtcaaacggattgccgtccgcattgatggccaccagcacgcgctcaccgtcggcatagcgctcaaaaatcagctgcttcggctgcaccagcacattgcggtagctgccccggcacagcgccttgctgcctgtgcgggcatgggccagcgcggtgatccatgcggtcaggccgttctcctccggcttttcgatggccgggcgcagcgtcgggtcgccgtttttcttgtcgccctccatgccccactcactgccatagtagaccgccggcacgccgggcatgccgaacagcagcccgtagaggggtgcaaggcagctcttgtcggtcaggatcgtagcaatgcgcgttacatcgtggttatccacaaagctcagcaggtgcttacccgtgtacaggcaccactgctccgcgccgaactggcggttcaggctgtagctgatctcgtgcatgttgccggtgttgaagctggaatacagccccttatagcactcatagttcgtcacgctgtggcaggcgtggtcgttcatccagcggttgtaatcgccgtgcagcgtctcacccaccagcacaaactccggcttgatgctgtttgccaatccgcgcagctctgccaaaaagccgagatcgaggcagtaggccacatccagacgcagaccgtcaatgtcatagtcgcgcacccagccgcgcacggcatcgaacaggtagtttttgacctcggggttctgcagattcagcttgaccagctcgttgcagccctcccacgcctcataccagaagccgtcattgtaattcgtgttgccgtcaaagctgatatggaaccagtccttataggggctgtcccagcgcttttcctgcacatcgcggaacgcccagaagccgcgccccacatggttgaaaacaccgtcaagcaggacccggatgcccgccgcatgcagcgccgcacagacctgcttgaggtcatcgttggtgccaagacggcagtctaccctgttgtagtcgcgggtatcgtagccgtgggcgtcactctcaaacagtgggttgaacagcacgcaggttgctcccagccgcttgatatgctccacccagtccagcacacgcagcaggcgatgctccccggcctgggtctggtcaccgctgttctgcagcggcgcaccgcaaaggcccagcggataaatctgataaactaccgcttcatcgtaccacatgtttttctccttccaaaatcagaacttctttttcagttttggcttgaccaccagatggtaataccgcgtcagcgcggccagcgcccggtcgcacagccagaaggacaggttgcccgcggccaaaagcaccgccagcatggccgttccatcggccaacagctcgtccagcacagcaggccccagcagcgcgaacagcagcaaatacaccagcaccgtagccgcattgaacaccgcaaattttataacccaacgcagtaccgtgttttttagtgcattgagcttcacgcgcagcacggggtaataccccatgaccagcacatagaaaaacgccagctcggtctccggcacaagcagcacggccaaaatcgacaccgttgcgtagagagtcagcgcatagcgcgggccgtagtcctccagcaccggaatgagcagaaaagccgcgagcatcggcgcagcgtaggtgccgatctgtaaggcgctgccgatgagcagaagcgccaccgacaacgcccccagcataccgcagagcgcgatcttctggctttccgttttgcgcatggtttttttccctcctgccttagctcttcacgcgattcttgtacattataccccgttttgttccacattgcaaggatttgctgtttattttgtacaattttacataggcgtgccccttttcttaccagaataaagcctctggcaaatgttatgccgacctttcgtcagacgcgccgcctgtgttacccggctgcctgttcattcggttggcttacctcatccttgacagcctgcatctgtgcgaccgtacagaaggtatagccttcctcccggaaccattgtatgatgtccggcagggccttcacggtctggccggtcgctctggtatcgtgcagcagcaccacgcagaggtcgtgcccctcggcatcgcggcggatattgcgcaggatctgcgccgcatcggggtggctggcggtggcatcctccgcgcagacattccagtcgatccagtggtagcccttctgctcggcctgcgccttgagcgttttcataatgccgcgcccgccatagcggtggctgaccgtgtttgtgctgccgccgggaaagcgcagccagtcaatgccgccaacatcaacatagggctccagcgcctgccgcagcgccttgatgtcctgccagaaggcatcggtgcttgcgtaaatttttgaatactgatgtgtcgcgctgtgcagcgcaatttggtgccccgccgccgcaatgtccgccaccagcggcagatagcgctcgttggcgtcctgcgcacagacaaaaaaggtggccgggacctgctcccgatcaaggatttccagaatcggcacggtatttttgctcggtccgtcatcaaaggtcaggcagaccattttgggcagcgctgtctccccggtggcagccgacacggcaaaacagtcgttgggggtgtcggtatcggtatattcacagtggtacagccgatgaataatgccgagcagcagcgtcagcagcaccgccgcagccagcgcggacagcagccgcccgcctcgttcctcccggtttgcattgcgccgcattacaagcccctcccctgttatggtctggtacaaggtatgcgggcgcggcgggaaatagacataggcagcggtgtatggtataatagagaaaacgctgtgggaggcctgccgcatgaagctgaaaattaccaaatccgacaagaaggcgctgctggcggcgctggccgtctgcgggatcggcatactgttttccatccttattgtgctggggatggatatttaccgcaagcatacctacaccagcgtgattttgccggacgcctatcgcattaccgacatgaaagcgacggcgcacacctcctactctgtcaatgggagcaacaccgattacgtctacatcatcacggtcaaatatgagatcgacggcaccagctacacggacacactgcaaattttgcagggcacccatttcgccaccgagctgcacgcgcgctacctggccgacaacgccccggaagaagtgctgggcaatttgtattattccgagaaagacccatcctatattgggcggtatggggacgattcgctattcgtagagtaagtaacaaaacgcgggaaactgcccttttaccggcagtctcccgcatttttctttatttgtttggagttcttttcggctcctttttttgcaagaaaaggaataaaactctcgtacttatttcgctctcgcctcgtgcatcgcgctgttgcgcttgcgccacaggcgcggggcaaacagtgtcagcatcgggtaaagctccaagcggcctgccagcatgtcaaaggccagcagcagcttgaccggggcggaaaattccgcaaagctgcccatcgggccgaccagctccagaccggggccgacattgttcaggcaggtcgcaaccgctgtaaaggtcgtgaccagatcaaagccgtccagtgagacaagcagcaccgacagcgtcagcagcaggacataaatgttaaaatagttgtgtacgccgcgcagggtcttttcgtccagcggcttaccctcaaaccggaccgtggtgacggcgtggctgtgcagcatcttgttcagatcctgccgtgctgccttgaagaggatgataacgcgggagaccttcaacccgcccgccgttgagctggcgcaggcaccgataaaggtcagaataaccagcacagtgcgggaataggttggccagagattgaagtccgccgtggcgtagcccgtggttgtcacgatggacgacacctgaaagaacgccgtgcgcagcgccgtgccgacagagtcgtacagccctgcgatgttcgccgtgatggtcagggtcgagaacgccacgatgcccagatagacatgcagctcctccgaggcgagagcctcgcggaaatggcggagcagcaggaaataatacaggttgaagttgatgccgaacagcagcatgaacacgccgatcacgacctcaaaataggggtcgttgtaggcacccacgctcagcgccttgttgctgaagccgccggtgcccgccgtgccgaaggagtgaatgagcgcgtcaaacagcggcataccgcccgcgcagagcatgaccgtctcgataacggtcatggcgagatagatggcatagaggatcttggcgctgtcgctcaatttgctcgagatcttgccgcaggtcgggccggggacctcggcgcgcatcaggtgcatggcgcggccgtccgtcatgggcagcaccgccatcgcaaaaacaagaacgcccatgccgccgatccagtgggaaaagctgcgccagaacaggatgccgtggctcagcgactcaacatcggtcaaaattgtggagccggtggtcgtaaagcccgagaccgtctcaaaaaaggcgtccacaaaggacgggatctcgccggtgatgacaaagggaagtgcgccgaaaactgacagcagcacccagaccagcgccacgatggccagaccatcgcgggcgtagatcctggtgtccttggggcttttcaggctggcggcaaggcccagcaccagcaggatcagcaccgggatcaggaatgcggggatcgaggcccactcgccgtagatcgctgcgcaccccatgggtaagagcatcagcgccgcctcgatcaggaagatgcgccccagcacaaaccctaccattttataattcatgccgccgccctcactttacaatgtcacgcagcgcgtgcagcgtcgtgtcggtggtgacgatgacaacatcgtccccctcctgcagggcgtcattgccggagggaatgaccgtctggccgctgcggcgcacgatgcctgccaccagcaggcccttgcgcagcgtcagatccttgagcggcacaccgatgaagggcaggcccggggccacattgaactccagcgcctcgacccggccgcccacaaggcggtgcagcgtcttgatgttctccgactcaaagctgttctgcatggcgcggacatatagggcgatggactccgatgtgaccgatgccgtggagaccacactgtccaccatgcccttggctgtggccagatctgcaaaggagctgcggttgatctttgccaccaccttgcaggagttcatctgggaggcatacattgccagaatgatgttcgtctcgtccagaccggtcagcgccacaaaggcgtccatctcggtgatgcgttcctcgctcagcagctcggcgtccgcgccgtccccgtggatgaccagcacgccggggaacttctcgctcattttctggcagcgggccgcatcgctgtcgatgacggtgacacgcttctggatgtcctgcagctccttgacgaggtagtaggccatccggcttgcgccgacgatcatgacattgtttgccttctccttaaagaggttcagccggcggaagaaggactcaaggtcccgggccgaggcggtcaggtagattttatcccctgcctgcagcgtaaaggcaccggtgggtatgatcgtctcactgccgcgtgcgaccgcacagatcaggatcttgacgcggatgttgcggtagaggtctgccagctgcaggccgaccagcgggttgtcctcggccagacggtattcgaccagctcaaaccgctggcggcagaactgctcgcgcttgatggccgaggggaagcgcagtacccgcgcaatctcgcgggcggtggtcttttccgggttgatgaccatcgacaggcccagctcatcgcgcataaagcgcagctgcttctcatactccgggttgcggatgcgggcaatggtgtgctgcgtaccgagctttttcgccacaaggcaggcaaggatgttgatctcatcgctggaggtcgtggcgatcagaagatccgcgccgtcctcgaacgcctccttctggacctcatagctgccgccgttgccgggcacgccgcgcacatcatagatgtttacaatatcctcgatcaggtcagggttctggtcgataacgacaatgtcattgttttccgccgtaagctgggcggtcaaggcacggccgactttgccaaggccgacgaccacgattctcatacgaacgctccatttcttttattgcaaaccggggacaggggcgctgctgcaggggcggccaatggccgcccgcgcagtggttt

SEQ ID NO: 14102 - DNA, 4352 bp, Unknown
  gut microbiota DNA sequence
ccttatgccgcaccggctcccctcttattatattctgttctgcctcagatttttcgctcgtcctttgtcatggtgcggggcagcacggcaaagtacagcaccgcgccaacgatgatgataaggatgaccgacaggataccgtagggccctgccgccctgttgatggcgtccacctgttcagcggtagcggtggcagcggtcaggccctgcgcagccatcatccggtttgcggcaagggcgctgacggcacccaccagcgccggcccgatgatagaagaaaatttgccgaagatgtcaaagaagccgaagaactcaccgctgcgagccttgtcggggatgagcttgccgaacatcgagcggctcagcgcctgaataccgccctgactggtggcgcaaagcacggccagcatccagaactgccacaggctgttcatgaaaaaggcaaacacacagataaacatatagacgcagatgccgacaccgaccatcgtgcgggcaccgaattttgccgccagcttcatgtacagcaggcagaacggcaggcccagcacctgcaccagcagcagcgccagcagcataccggcggagtccagccccagattggtgccgtagctggtggacatgctgatgatggtatgcacgccgtcaatgtaaaagaagtaggagaggatgtagacgagcatcggcttatctgcgccgatctccttgagagtgacaaagacatttttgacgctggcgccaaggtcgcccttttgataaggcttgccggtggtctgctcgcagtttttcagcagcggaaggctgaataacagccaccacaccgccgtcagggcgaagataaaggccagacaggtcagcatcggcacgccgaccgcattcatgatcaggaagatcagcagcgggatcgtggagccgccgatatagccgaagccataccccagcgttgataccgagtccatccgctcctcggtcgtcacatcggtgaggaaggcatcatagtagatgcaggatgcgtcaaagccgatggtgctgaggatgtacagcaccagcaccatcgccgccacccggcccgctgcggcggtcgagacagtgaagtccatgagcggggtgaacgccagccctgcgaccgagaccacgcccagcagcataaacaccgtgaacagctttttgcgcatgccgcgtatgtcgccgaacacgccgaggaacggcgcgctcagcgccacgatggccatagccagactggtggcaaagccccatgtggacatgctggagacactgtcggcggtgtagcctgccaccgtgtcgaaaaagatcggcaggatcgtcaccacaatgaccgagtgggcgctgttggcccagtcatacatcatccagctgatttcctgcttcgtgaattttttcaggaatcccatgtaagaagctcctccgttcgttgggcggtgcgccccagatgccgcacattttttacaccgttttttctattgtagcaccctccgcgcctaaaaacaacacaccccgctgctcttttggtcagcggggtgtaaaatttccgtcattttttcggcagcttaccgcttgcgcagctcccagaaagccaccgcaccggcggccgccacattcagcgaatccacgccgtgctgcatcgggatcatgaccgtgtagtcgcagcgggcgatcgtgctgtgcgccagaccgtccccctctgtgccaaggacgatggccagcttttcctcctcctgcagcgccgggtcgtcaatgctgacggcgcggtcatccagcgccatggcggccgttttaaagcccatcgcgtgcaggcggtccatgcccttttcgggccagtcggcgggggtgtcccccagcgtggcccacggcacctgaaacactgtgcccatgctgacccgcaccgcgcggcggcacagcgggtcgcagcaggagggggagagcagcacggcgtctacaccgagcgctgtggcgctgcggaagatcgcgccgatgttggtggagtccacgatgccctccagcacggccacccggctggcgctgcggcacagttcctccgcccggcgcggtgcagggcggcgcatggcgcacagcacgccccgggtcagcgcgtagccggtcagcgtctgcagaacgctgcggtctgcggtgtagaccacagccccggggcagcgggccagcaccccggcggccgggccgtcgatctgccggcgctccatcaaaaaggagagcggctcgcacccggcatccagcgccgtgccgatgaccttggggctttcggcgatgaagatgcccttttccggctccagcctattgcgcagctgggattcggtcagcttagtgtaaggagccagctcgggggcggataaatctgtgatttcgatgatatggggcatggggatagctcctttgtgggagaatttgtatataatataaatgatacaacaaacattgacgcagtgcaagccccaagccttcccccttgggggaaggtggccccgcagggccggatgaggggcgggtatgtgggggagctatccgtaaacaggcaattgcggcaggtcgcccctcatccgtctgcgggcagagccgcagacaccttccccctagggggaaggctctctatgtaaacaaaacccgccgcccatggggcttacaacccacgggcggcggtattctatataatccctatttcctctaaaagtctttacaagttactcgactgcgttcagcgcctgatcgagatcggcgatgatgtcatcgacatgctcagtgccgatggacaggcggatcgtgttgcggccgatgcccacatcggcaagctccgcatcggagagttggccgtgggtcgtggtggccgggtggattacaaggctcttgacatcggcgacattggccagcagagagaagatctgcagatgatcaatgaactcaaaggcctccttctggccgcccttgatgttgaaggtgaagatcgacgcgccgccgttggggaagtacttctcatacagggcgtggtcggggtggtcgggcaggctggggtggttgaccttctccaccttggggtggtgggtcaggaactcgacgacctttttggtgttctcattgtggcggtccagacgcagggagagcgtctcggtaccctgcagcagcacccatgcgttgaacgggctgatgcagccgcccagatcgcgcaggatcacggcacgcacataggtcacaaaggcggcggggccggcagcctcggcaaagcagacgccgtggtagctggggttcggctccgagaaggcggggaatttgccgctggccttccagtcgaacttgccggagtcaacgatgatgccgcccagagaggtaccgtggccgccgatgaacttggtggcagaatggacaacgatgtcggcaccatgctcgatcgggcggatcaggtagggcgtgccgaaggtgttgtcgatgacaagcggaatgctgtgcttgtgggcgatagcggcaatggcgtcaatgtcggggatgtcggcgttggggttgccaagcgtttcaatataaacagcgcgggtgttgtcctgaatggcagcctcgacctcggccagatcatgggcgttgacaaaggtcgtctgcacgccgaacgcgggcagcgtgtgggccagcaggttggaggtgccgccgtagatggttttttgcgccacaatgtgcccgccgttctgggccagtgcctgaagggtgtagtcgatggcagcggcgccggaggcaacggccagcgcggcaacgccgccctccagagccgcgatgcgcttttcaaaaacatcctcggtggagttggtcaggcggccgtagatgttgccctcggcccgcagggcaaagcggtcagcggcattctgggaattggggaacacataggaggtggtctggtagatcggcaccgcgcgggaatcggtgacgggatcggcctgctcctggccgacatgcagctgaagggtctcaaagtgcaatttacgctcgctcatgataaaatcctcatttctgttttatttctgtttttttgtaaaagaaaagccgggggtcgttttggtacaactcccgggcagaatatgcagtgcggcgcgaaattttacaggcagtgcaaagcaatgccccgcgcccggactgctgccgcccgggagatgggcattcggccgcagcggaaattctgacgcagcagactgccaaagacatgagccattgtgctttgcacctcctctttttcgtgataaacctatgtgctttgtaggttgactatatcgtaacacggattttaccgcatgtcaatagggttgcagggatttttttgccgcaaattttgaatgatgcgctgt

SEQ ID NO: 14103 - DNA, 6879 bp, Unknown
  gut microbiota DNA sequence
taccacaaaaaaggctgccgcacaaggtaaaaccccatgccgcagcctctcgccataacccgttcccgggaaaaaatattgaaagttcctttgcttacttttctttcaagaaaagtaagacttacttctcgatgacttccttcgtgtcgcgggcaatcatcagctcctcgttggtctcgatgatcagggtgcggacacgggcgccccaggcagtgacctcgacgacatcttccttctgcttgtgtgcatcgcggttcttgtcagtgtcgatgcggatgcccagccaatccatgtggtggcagatcttggcgcgggagtcggcgtcatgctcgccgatgccgccggtaaagacgatggcgtccacgccgcccatagcggcaatgtagctgccgatggtctttttgatctggtagttcagcatgtcgctggccagctgtgcgcgcttgttgccgttcatggcggcttcctcaacatcgcgcttgtcgctggacacgccggaaacacccagcaggccggacttcttgttcaggatctcgtccagctcgtggccggtgatctcgaggttatacttcaggtagttgaccacagagggatccagatcgccgcagcgggtgcccatcatcaggccggccagcggggtcatgcccatcgaggtatcaatgaccttgccctgatcgacagcggcgatggaggaaccattgcccagatggcaggtgatcagcttcaggcgctcaataggctcctcaaggaactcggcggcgcggtggctgacatacttgtggctggtgccgtggaagccgtagcggcggacgccgtacttctcatagtactcataggggatggcgtacatataagccttcgggggcatggtggagtggaaagccgtgtcaaagaccgcaacattcggcttgtcctgaccaaagaccttgtaggaggcctcgatgcccaggatggcggcagggttgtgcagaggagccagcgggctcaggtcgtggatggccttgacgacctcgggggtgatcaggcagctctccttgaacttctcaccgccgtggaccacgcggtggccgacggcgtcgatctcggaaacgctctcaatgaccttgccctcgccggtggtcatcttcttcacgacctcggtaaaggcctcggtatgggtggggaagatggcgggcgtggttgccttatggccgttggcctcatgggtgatcatgctgctttccatgccgatgcgctcgcacagacccttgcagaggactttctcgccctccatatcgatcagctggtacttcaggctggaagaaccgcagttgataaccagaactttcatggaatatcctccttaaatttggcagggcagatttgccctttcccaatcgttgattttattatataatggaagatatgaattttcaagcgcaagttctgcaagatagcacaatttttgcacagtacgggcaaagtacttttttaacaatctgtcgggagattttttctatgaaatttgcaggtatcatagccgaatatgacccctttcacaacggccatgcagcccagcttgcggcggtcagggcagcgggcgccgactgcgtggctgtctgtctgagcagcggcgcagtgcagcggggcggcgtacccatcctgccggaatcggtccgggtgcgcgctgcgctgggcgcaggggccgacatcgtcattgcgctgcccgcgccctacgcctgcgccacggcggagcaattcgccgcggcgggggtgcagctgctggcggcgctgggctgcgatacgctggccttcggtgcggaaacacccgatgccgccgcattgctggacgcagcgcagctgctgctgaacggtgaaataaacgcgctgatccgtaaaaagcttgcgaccggcatgacctatgccgccgcccgggctgatgctgccgagaccctgcgccccggcatggggacgctgctgcgcacgccgaacaacattctgggtatcgaatactgcaaggcgattctggcgcagggcgcagcgctgacgccccttgcgctgccccggctgggggcggcccacggcggcggggcaggggaacacgggggtacgccgatggccagcgccagctacctgcgcggcctgcccctgccggagtggaccgcctttgtgcccgccggtgcagcggcgctttacgcaaaggcggccgccgaggggctgctgctcgacagtgcaaaatttgaggtggctgtcctgacgcagctgcggatgcagccaccggaaaattttgcgcagctgcgcggtatcagcgagggactggagaaccgccttgcagcatcggtgcgtcaggcagacggtctggacgacctttacacccggctgaaaaccaagcgctatccccatgcacggctgcgccgccttgtgctggatgccgcgctgcagtttccggcagaattgccaatgccgccctacctgcatgtgctgggggcaaaaaaaagcgcgctgccgcgcttgaaatacgccgccctgccggcgggcacggcgctggcagagctggtgcaaatcggcccgcaggcggctgaaatcggcagactgcatagccgcgctgtggatttttcgtcattatgcagagaaaaaattcagccgatggggcttgcgtttactgctaagccggtggtaatataagcgtgatatggagaaaacatgcgcgtgatacaacattgttgcatttttaacgcgcaaaatcggtacgaaatgaaggagcaaaacatggcgctgcatgtaatggacgaagcgaaccactgccttggctgcaaggtgccccgctgtcagcaggggtgccccatccacaccaatatcccggaggtcatccgcctgctgaaggacaacaagctggacgaggccggccgtatgctgtttgaaaacaaccccctgaccaccgtctgctctctggtctgcaaccatgagaagcagtgcgagggacattgtgtgcgcggcatcaagggcgcgccggtccacttctcggtcattgaaaactatatttcctctacctacgccagccagatgacgcagggccctgcgccgtccaacggcaaaaaggctgccatcatcggctccggcccggcggggctgaccatcgcagtcattctggcgcgctatgggtatgatgtcacgatctttgagagccacgacaagatcggcggcgtgctgcgctacggcatccccgagttccgtctgcccaagacggtgctggacgattttgagtaccgccatctgcgcctgaagggcatcaaggtccgccccaacaccgatgtgggcaaggcgcttaagatcgaggatctgttccgtgacggctacaaggctatcttcatcggcaccggcgtgtggcgccccaacacgctgcacatcaagggcgagagcctcggaaatgtgcattatgccatcaactacctgcaaaaccccgatgtctaccatctgggcagccgcgtcatcgttatcggtgcgggcaacgcggcgatggatgtcgcccgcaccgccatccgccatggcacacggcatcttgagtgcttctcgctctcaaagacgatcagcgccagcgagtatgaggccagctatgccaagctggagggcgtcaacttcatcttcaacaaaaagcccgtcgagatcaccgacaagggtgttgtgttcattgacctgaacgaggccgaggacggcaccctgaccgagctgcccggcaccgaaaagctctacccggcggacagcgtgatcgtttcaatcagccaaggcccctgcaccaccatcaccgacagcaccaaggacctcaagacgaccccgcgcggcctgtttgagaccgatgaggtcggccgcaccagcatccccggcatcttcgccagcggcgatgccgtcaagggtgcccggacggtagtcgaggccgtggcctacagcaaaaatgtggccgaggccatgcacgagtacatgcagaccctgccgcccgacctgcccgatgcgtacgcaaatgtacccgtggcagagtacggggagggaaactaagtaaataaaaacacccctgcgccgatttaacggcacgggggtgttttgctgcactgcgcgatgaaatatttccgggacgcatgtagggcggccagccctctggccgccgtgcccgtttacggcagtgagaaactttgtgttttacccctccctacaaaatcaaccgtaaaaggggaatgccgtaaaccagcgggccgggcgtgcccggcccctaccgcgcggcttaccttttccttgcaaactcccttgcatgcttcacaaactcccgcgcggcgggggagagcaccccgcgcgacaggcacgccagcccgatggtgcgcttggcggccggctccagctgcaggacctgacaccctgcgctggcggcaccctccttgaacatcagctcgggcatcagggcaaggccctgcccgcaggctaccatggcgatcatgctctggtcatcaacaatgtagcagcggctcgacacatgcaggtcattctttttgaaatagctctggatgtcggcgtccacatcggactgctgactgacaaagggccggccgcgcagctcctcggcccggacaacaccggggcggcggggcttgtagtcgggcggcgcaaggcagatgagccggtcatcgtagagcggctcaaaatccagatcgcgggcgctggagttggacagaaagcccagctccaccgcgccggttttcagccagccggtaatgtcatcataggagccctgatagatctgcacatctatgccgggaaatgccgcgcggaagcccggcacgatcttcggcagccatgtcacgcaggccgagttgaacactcccagccgcagcgcacccttgtgcataccgttgatctgggcaatggactgctccagcgattcgctgcttgccagcatctgctggatcgcgggcatcaggttctcggcggcagcggtcagcgtgacgccgctttttgtgcgggtgaaaagcggaaagccgcactcggcctccacgccggatacggcatggctcacggcggagggggtaatgtgcagccgttcggctgcggcggcaaaggtacccagctgcgccacgatgctcagcagctggcagtcggtcagggtcatgatcacatctcctgtggtgaatttgattcatgctttgtatgaaaaagtatagctttacttcatgtctataatgtactattatgatagcagaaagtcaatgcctgcggcgcacaacgcaggcaatctatgactcctctccctccgaccttgccccaccggcccgcacaccggtggggctttttttattggccggtttgtggtatgatactaataaagccttcccccaagggggaaggtgccccgaaggggcggatgaggggtggccttcccgcggcaaaccgtgaatggatggctgtggcagaccggcccctcatcaggccgttgcacggccagcttcccccaagggggaagcctttaatgtaaaggtggaaaattacatggcaaaatcacgcggggtgcggggcgcagcgggcgcctgtgcggcggcatcccttgtctatctgctggggcgcagtctgctgaccctgctggtcagcgcccttatggggctggcacatccgggggccagtctggcaaagcccttcggcttcagtgatgtcagcatagcgctgtttcagctgctggtcggcattggggccatcgccctgacgctggcctttctgctcaagctgacccgcctgcggcaggcggatctgcgcatcgccctgccggccccctggagcccgggcttctgtctgccggtctttctcggtgtggccaacctcgccaaccttgccggggcgctcatcaaccatatcacagacaacccggcaacgagcgagctgctgcccagcggcggccccgagctgtttgtctgctttataacgctctgcgtcatgcccgctgtggccgaggagctgctcttccgcggggcgtttcagggtttgatgcgcccctgcggcagcgcggcggccatctttgcaccggcgctgctcttcggtctgctgcatctcaatctggcgcaggggctgacagcctttgcctgcggggtctttctgggctggctgaccgagcggtcgggcagtatcctgccgggtatgctgctgcaccttgcaaacaacacgctggcgtttttgacgatctacctgcggtattacgccccggcggagctgtctttcggcgttgagctgttcatcctgctctttttcccggtgttcggcggctggatgatctggaacgcccggcagcagggctttcgattttcggccggtctgcgccccggcgtggatgtgctggcggtgttcaccagcccggcctacagcgccgctgtgatctttctggtcgtatatgcggtgttttttgtgcattgagggggagctatgactgatgaagaactgatgcgcgccgcgctggcagaggcaaagcttgccgccgcactgggcgaggtcccggtcggggcggttgtggccaaggacggggagatcatcgcccgcgcgcacaacctgcgcgagagcggcaaaaacgccacctaccacgccgagctgctggccattgatgcggcctgcaaggcgctgggcggctggcggctctggcaatgtgagctgtttgtgacgctggagccctgccccatgtgcagcggggccatcatcaacagccgcctgaagcgggtcgtctacggcgcgcgcgaccccaaggcgggctgctgcggcagcctgaccgacctgtttgcgctgcccttcaaccatcacccggtcatggaatcgggcctgctggaggaggaagcacaggcattgctgcaggacttttttgcgatgctgagagagaaacgg

SEQ ID NO: 14104 - DNA, 8364 bp, Unknown
  gut microbiota DNA sequence
gcgccgggtatgatgttgcctttacctacaacgcccatccggacgacgccgaggcggtgctgcgccgcgccgcagccgccgcgcagggcggccgctttctggcaatacaggccgatgcgggggattctgcacaggtgcaggccgccgtggagcaggcacagcgggagctgggcggcctgcaggtgcttgtctgcaatgcgggcattgcgcaggtcaagctgtttaccgacaccaccgatgaggattggcaccggatgatggccgttgatctggatggtgcgttctacgcctgccgcgccgtgctgcccggcatggtacaccagaaatacggccgcatcctgctggtcagcagtatgtgggggcagaccggcgccagctgtgaggtggcctacagcgcagccaaggcggggctgatcggccttggcaaggccctcgccaaagaggagggccccagcggcatcacggtcaatgtcattgcgccgggcgtcattgacaccgacatgatggcgggctttaccgcagaggaccgcgccgctttggcggaggagaccccggtggagcgccttggcacggcggacgagatcgcccgcacgatggtctttctggccgatgaggccagcggctacatcaccggtcaggtgctgggtgtcaacggaggactggtgatctgatgcgcaccgaataccgcgagggagagcgcttttcgcgccttgaatttacagaggaaaccttttacgactgcgacttctccgactgcgccttcatcgactgcacctttgaaaactgcaagctggaccacagcgtgctgagtgagtgccagttcatccgctgtacaattacaggactgaaaaccacgatgtcccgtgcaaagtttacggaccttcaaggctgcaccctcaacaatatcgactggatgtccctgcagggggacggctcgtttgccgacccgattgaaaaattgcagggctgccgcctgaaatacaacaccttcaccgagatgaactttacaaaattcaactttgcaggcaacgagatccagcactcgatgttcgccaagtgcaatctcgtcagcgcagattttgaaaaatgtgacctgctggacaccgaattttaccagtgcgatatgcgcaaagcaaacttcaaagaggccggcgggtataaagtcgatattttcggctgcaagctgcaggacgcaaaattttcactgccggaggcggtgtcgctgctgggagatttgcggatcaaattgctatgaaaaatatacggattgaaaagttatcctatgggtatacaattcgctgcctgacggacgccgatgtgccgatgctgtacgcatggatgctgcgcaatgaccagtactttaagtattgcggcggcagtacaacgcccgagcgtgtgcggcaggacctgacgctctgcccgccgggcactacaccggcgcagaagcactatgtcggattttttgacgcggatacgctggttgcagttatggatctgatcgacggttacccggacgcagacacggcgttcatcggctttttcatgatgaacaaggacctgcaggggcagggaaccggcacggcaatcgtccgcgaagtgctggccgcgctgcgtgcgctgggctatacggcggtacgcctcggcattgacaaggaaaacccgcagtccaatcatttctggcgtaaaaacggctttgctgtgttaagagaagccgcgcaggagcgcggcattgtcctgcttgcggaacgccgtctggcgtaaatgccccctcactgccgcccccgcagcgggagcaggatactacacaccccaccccctctttgcatactataccgcaaaggggggctttttatggctgtgtaccagtacggcattgatgtgtcgcgctatcagggcaatatcaactggggccgggtggcggcggccggtaagcagtttgccatggtccgcgtggggtccagcaacagcggcggactgtatgtggacccgtatttcctgcagaatgtcaacggagccaaggcggcaggcctgcgcgtgggggtctattactatacctacgcgcgcacacgggcggctgtggccaatgagctgacgaccttcttgaatgtcatgcaggggctgcagctggaatatccggtctttgtggatgtcgaggacgccagcctgaccagccttggccgtgcaacgctgaccagccttgtgcagtacgccatggatatcctctaccagcgcaagtggtacgcgggctggtacagctataccaactacatcaacagcaatctcaacgcagccgccctgagccgctacccgttatgggtggcagactaccgcgccacccttggctataacggcagctatgccatgtggcagtacaccggcagcggtgtggtcaacggcatctccggcgcgtgcgacctcaaccgcagctaccgggattttctgccggagatacaggccggaggctacaacaactatggggcctccggcccttctatggaaacggtggcgggacagcggcttgtggtgttcaacgcccggtgtgagtatttttactctgccaacttcaacgatgtggtcggctatctgccgctgggcaactattgcgttgtcaagcagagcacccggaaatataacggctatgattgggtcatcttccgctaccgcggcagcgagtattggaccgctgtcatcggcgaccgcaaccgggtcgaaccgtgtaattgtgactgtaattcataaacacaacttgacaacaacagtttgttgtattacactgggtttgcaggagcgggtgcgggcatcgacccctacaaacctgcccgcagagtgcaagtcgatttgacaaacacttccaaactgtggtttaataaaaatatatgtgcaaaaactaccactgtttcaatatacatcagggggaaccgccgcatggcaaaaaaacaacaggaatacggcaatgacagtatccgccagctgaaaggcgccgaccgtgtgcgcaagcgcccggcggttatcttcggctctgacggcgtggagggctgcgcccattccatctttgagatcatctccaactccatcgacgaggcgcgcgatggccatggcaaccgcatcaatgtcacgctgttcccggatcatgtcatcgaggtcgaggacttcggccgcggcattccggtcgattataataaggctgaggagcgctggaactgggacctggtcttttgcgagctgtacgccggcggcaaatatgccgagggcagcggcaactacgatttcagcctcggtctgaacggtctgggcctgtgcgccacccagtacgccagtgagtggatgacggcggatgtctaccgcgacggcttccactaccacctcgatttcaaaaagggtgagaatgtgggcggcctgcagaaggagccgttcaagggcaggcgcaccggctcggtcatccgctggaagcctgacaccgaggtgtttaccgacattgccgtcccggcggaatccttcaaggatatgctccgccgtcaggctgtcgtcaacgatggcgtcacgctggtatttaccgacaaatccggcagtgaggctgaaaagtttgaatatctctatgagcacggcatcaccgactatgccaatgagctggtgggggataaggctctgacgccggtatacttctgcagcggcgctgccaccggccgcgaccgcgccgaccagccggactatcaggtcaagatgaatgtggcgttcgcattctccaacaccgtgcagtgtctggagtactaccataactccagctggctcgagcacggcggcagcccggaccgcgccgtgcgcacggcctttgtcagccagatcaacgcctggctgaaaaacaagggtctgtacaaaaagaacgagagtgcgatcacctttgccgacgtgcaggactgccttgtgcttgtctcgtccagcttctccacccgcacgagctacgagaaccagacgaaaaaggccatcacgaacaagtttgtggcccaggccatgaccgagttcctgaagcatcagcttgaggtctacttcatcgagcatcccgatgaggccgagaaggcctgcaagcaggttcttatcaataagcagagccgcgagcacgccgagaaggcgcgcatcacgattaaaaagacgatgacccagcagatggatctcgccaaccgcgtgcagaagtttgtcgactgccgcaccaaggacgccacccgccgtgagctgtatatcgtggagggcgattccgctatgggcgcggtcaagcagagccgtgactcggaatttcaggccatcatgcccatccgcggcaagatcctgaactgcctgaaggccgactacgcccgcatcttcaagtcggagatcatcaccgacctgatccgcgtcatgggctgcggcgttgagctgggcggcagccacaataaggatctggccagcttcaatctggacaacctgcggttcaataaggtcgtcatctgtaccgatgccgatgtggacggctaccagatccgcaccctcgtgctgacgatgctctaccgcctgacgccgaccctcatcaataagggctatgtctatatcgcagaatcgccgctgtacgagatcaacacgaagaataagaccttcttcgcctacactgagccggaaaaggccgatatcctgcgccgcatcgagggcgaaaagtacacgatccagcgctcgaaaggtctgggcgagaacgaccccgagatgatgtggctgactacgatgagccccgagagccgccgtctgatcaaggtactgcccaccgatgccgagcgcacggccgcagtctttgacctgctgctgggcgataacctgcagggccgcaaggagcatatcgccgagcacggcgcggagtatctggacgatctggatgtaagctgagaaggatagattatggcaagaaagaaagaaaaaaaactgacccccgcgcgcccgcagctgggggataatgtcgaaattttatcggcgggtgaggtgctggaatctgccatcaccgacacgctggaaaccaactatatgccctatgcgatgagcgttatcgtttcccgcgcactgccggagatcgatggcttcaagcccgcccaccgcaagctgctctacacgatgtacggcatgggcctgctgaagggtaaccgtaccaaaagcgccaacatcgtcggcagcacgatgcacctgaacccccacggcgatgcagccatctatgacacgatggtgcgcatgggccgctccaacgagagcctgctggtgccgttcgtggactccaagggtaacttcggcaaggcgtacagccgcgatatggcctatgccgccgcccgttataccgaggccaagcttgagccggtctgtgatgagctgttccgagacatcgacaaggacaccgtggactttgtgccgaactatgacggcaccacgaccgagccgaccctgctgcccgtcaccttcccggcaattctggccaacaatacgctgggcatcgcggtcggcatggcatccaacatctgctccttcaatctggaggagctctgcaatgccacgatcgccctgatgaaggacccgcaggctgacctgcgggagatcatccccgcaccggattttgtcggcggcggcacaatcctgtacgatgccgccgagatgcagaatgtgctggaaaacggccgcggcagtgtccgcgtccgcgccaagtggagctacgacaaggcgaacaactgcattgatgtcacccgcatcccgcccacaacgacggtcgaggccatcatggacaagatcaccgagctggtcaagctcggcaagatccgtgagatctccgacatgcgcgatgagaccgacctcaacggtctgaagctgaccatcgacctcaagcgcgggcaggaccccgacaagctgatggcccgcctgtacaaggccacgcccttggaggacagctttgcctgcaacttcaatgtgctgatcgcgggccagcccaaggtgctgggtgtgcgcagcatcctgctggagtggatcgccttccgcgccgagtgtgtgcgccgccgcacctactacgacctgcagggcaagcagaagcgtctgcatctgctcaagggcttgaaggcgattctgctcgacattgacaaggccattgagatcgtgcgcaacacggccgaggagaccgaggttgtgcccaacctgatgatcggcttcggcattgacgaggtacaggctgaatatgtggccgagatcaagctgcgccacctcaaccgcgagtacatcctcaagcgcaccgaggagatcgaggagctcgaaaacgccattgccgatcttgaggatatcctcaagcgcccggcccgcatcaataagatcatcatgaaggagctgggcgatgtagccaaaaagtacggcaagccccgccgctgcgagatcatgtacgagattccggcctctgaggccgaggagcctgagcagcagatccccgactacccggtgcatctgttcttcacgcgggacggctacttcaaaaaaatcacgccccagagcctgcgcatgagcggtgagcagaagctgaaggacggtgacgaggtactgtttacctgcgaaagcacgaacagcaccgagctgctcttcttcacaaatcaccgccaggtctacaagtcccacgcctatgactttgccgacagcaaggccagcgtgctgggcgattatgtagcctccgccctcggcatggaggagggtgaggtgccgctgtatatggtggtcacgcccgactacaagggctggatgctcttcctctatgagaatggcaaatgcgccaaggtcccgctgtccagctatgagacaaaacagaaccgccgcaagctgctcaaggcgtacagcgataaggcggatcttgcctttatgcgctttatccccgaggagaccgagctggccatctttaccacaaacaaccgcctgctgctggtcggcagtgcgctcatccctgaaaaggcgacccgcgataccgccggtgtcaatgtggtgacgctgaaaaagaacgccggtatctcccgcctgacgctggccgaggggctggagctcaacgatgccccgcgctatcgtgtgcgtaccctgcctgccgccggcgccaccctcaaggaggatgaccgcatcgagcagctgacgctgtaaggtgataccgcacgaagctccgtaggggcgcattccatatgcgcccgcaaggtgtctgccgtctgacgggcggatatagaatccgcccctacggtgtcaaccgaaaaaagtgcttgacaatcttgatactttgtgctaaaatatttcagcaatcgttcagatggctgctccgtccgcacaggatggcgaacgctggtagccgcaattcggagattgtgatgagcacatatatcaagtatggctccttttatcatgatcgagaaagaggtgaatttaaccatgaagcagggcatccatccgaactatgtggactgcaccatcacttgtgcctgcggcaatgtgatccacacccgtgacaccaagccggagatccacgtcgaagtttgcagcaagtgccatccgttctacaccggcaagcagaagctggtcgataccggtggccgcgtcgagcgtttcaagcgccgtttcgccaagtctggcaagtaattccgtttttgtaccccggatgttctttcatccggggtatttttgctatagagtgaggtttgcgccatggccgactataaaaccatacgcggcacttccacatttgaatatgaggaaaagcgcagccgctttatcgccacggccgcctttgccgataccgaggaaaaggcgctggccgtgctgaacgcggtgcgcgccgccaaccgcacggcgcgccataatgtctatgcctatgtgctgcagaacggccgcgcgcggtattctgatgacggcgagcccgccaaaaccgccgggaccccggtgctggagacgatcggccacgcaggtgtggccgatgtgatcgttgtggtgacgcggtatttcggcggcattctgctcggcaccggcgggctggtgcgggcgtatacggcggcggcctccggtgcgctgcagcaggccgagcttgtcagcatgcgccttgtggtggactgcagcgtccgcgtgagttatgcccagtttgaacaggcccagcgcatcattgcggcggcggaaacaagactggacgagccggtctttgacgatgccgtgaccctttgctggcgtatgcccgcagggcaggagggggcgctctgcaccgcactgaatgagctgacgcgcggcggggctgaggtgcagatttccaaaccgcagtacgcggcgttttgaggaagacagcttgcggcggccagaggactggcc

SEQ ID NO: 14105 - DNA, 4846 bp, Unknown
  gut microbiota DNA sequence
aaccagtttctttcaatgcagcagcagcggtatgagagcctcaggaccgccattgaggaagcgcggcaagcacggcacgatatgcgccaccagttacagcagatttccgcgctggccgaggcgggtgatttggaggagctgaaaggctaccttgcaaaaaccgtctcccgcatcccgaatcttgatatgtgcttttgtgaaaaccgtgcggcggacagtgttgtcggctattactgcgccatggcaaagcgcgataagatccccttccgcgccagactcgacctgccggaagcactgccgatcgatgagatcgatatgtgcatggtgctgtccaacctgctggaaaatgcgctggaggcgagccttcgcaccgcaccgggcaggcggcaaatcgagatgaccgcctatgtacatgccgaccggattctgctgatcgaggttgaaaatgcgtttgacggcgaggtcaacgaaaagaacggcgttttccgctcatcaaagcggagggaaaacggtatcggtatccagtccgtcacccatattgcagagaaaaacggcggcacaagtacctttacccatcagaacggcaccttcaccgccaaagtcatgctctgcgggtgttagtaccgcccggcatgtcaggttggcaaagaagcagggggcgcacatcgtgcgccccctgccaagtatttatagttaggcttacgctttaccgcgctcttgttgctgcttctcccccggcgtagtcaaacaggccgtcatttttttcttccatggccttgatcatgtggtaggtgtactcgttatacggcgtagggatgccaagctcctgccccatgcggatgagcgcaccggagaacatctcgatttcagtgtggcggtgggcatccagatcctgcagggtcgagtaccgcgcagtcggctttacaaggctgccatagctgatggcactgtccaccagactcaggtcaatgccctttgcggcggcgatggtctccagctcgcggcgcagaccgtcactgatggcctgcatgtgggcgctgtcacggtagcagccgacgcccgcgcctaaaatcgcctgcggcaggttgttgcagacattcagccggaacttgctccagatctcctcgcggatatgcgctgtggtctggtagtgcagccccgtgccgtcaaacaggtcggccacggcctgcatgcgggggctgtcaaagggcggctgcggctcgccgtaaatgatcccgatcgtagtgtccggatcaaaaaagacaccctcccctgtacggtgggacgccactttaataagcgcaggcagcacatgactgtcgccgattgccgccccgatgatctcctcgctgtcaacgccgttcatcaggctcatgacggtggtgttatcgcccacaatcgcacggatatcatccagcgccccgcacagggcaccgtatttcagcgcaacgatgagcaggtctgcgccgtgggcctgcgcggcggtcaggacctgcgggcggtaggtcttgccgttgatcgtacaccctgcgcggcgcagccggtcggcgcgtgtaccctcggccacaacgctgaccgtcacccccggcttgtcggtcagcccccacagcagatagcagccaacagcaccggcccccagaatcgcaacagaacgaattttcatacttaccctctcccctgtttttacggcttgatgatgcggatcagcgttttatccagctgcagcgtacagtgccacggattcaggatgataccctgaatctcctgtgcagccagcgcggcgtcaaacaggctgtttatgtcagcccagaatgtggatttcacggcatcggggcttttcatctgctcgtcaaacgaggtgaaggcataccaccagtgcccgccgtcggcggtctgcacaattttggggcgcagctcggcggacgcgccgggcgttgtctccacggcggcaatccactgcccaccggcctgcatggcacggcgcacaacggtcaaagtgtgggcaagctgctcctgcgtgggggcctgctgcaggccctgcacggcatcctcaagcgcttggttgagccgccggttctcatcttcttgcatcttcatggaaattcctcgctattcatggtgtattatgcggtattgccttaacgattgtcaggatattttgattgtctgctgcttgccgtgcaaagtgtagtgtacggtcaggccgtcgtctgcatctacagtacaattttccgcgtggtcggtcaattcccgcagggcattgtattggcggcgcatcttatccgtatagcggctgggcatatcggaggtgagcaggatgccgctgaacagcgcgttgacccgggccagggtctgcttttgctgtgcggtcagcttgcagttttcctcgcgcaggaaaaagacatcgggatcgctgccgtaggcgcgcccgttgagctggcggcggaaaatcgtgttgctgatggactgctttgtagagactcgctcgcggtggaaaagccgcatataccatacatcatcccagtccagccctacatcacacccaatgcggcaatagtcaacgataccaaaggcaggcatgaccggcacgccgcagccgagaatcagcttgtcaccgcaccatgagcgcagcagtgccatggcgcgctgcatccggcctgcgcgggattcccggtcgttgccgaacggtgctgcgccgtagagaaagtccagcttgacaaggtcgaagtcccaatcccgcagaacgcggtcaaagacctgtttgaggtaggtttgtacctccgggtggtcaatgtccagcgcataaaagctgctccagttgcagccgcagcaccaaggctgaccgtccacctgcagcagccagtccgggtgatttttgcagagcagcgattccttttcacagacaaacggtgccagccacagcccggccagaaaaccgcttttatgggctgcatctgccagcgggcgcagtccgttggggaatttggcaggatcaggctccagccagtcccctaccttgcgctcccagccatcgtcgatctgaaagagatcccctgcgcggaaaagcgttttgcagccgttgagatcttcctgaatcgaggcctcatcaatattctggtagcggttataccagctggaatacccggccagcctgcgcgtggtgcgggggcggcagcccagcgccgcaaaccatgcgtcaaatacctcgtcctcggtgccctcggcaaaaaagagggagaacgcaggaaagctgccaccggtatgctgtaccccggcgcagtcacgctcaatgcgcagctgtgcggcgcggctgtcataggaaaagatcgtgtagcccggtgcctcgtccaagctggccaaaagccggtaggtctttccgcgccggaaatagcagtaggaaaagccgtggctctgtccccttttgccgctgtagggaacaaaatgataatcgccgtaacggtcaaagctgtatttttccaaaaggaatttcggaacatgctccacaccgtgctgccggtcccatttgcccagctccgggcaggcggtccatgtctgatagccgttcatgaagatcttttcctcgcgcgccatcgtccacggcagcacagcaacagcattttgcaacaccccggcgggcagctctgccctcaggcagacggcaccgctgcgcggggtgatggctgcagtgccgtcaaaccggccgctgtctgttgcggcataccactgcatctcagccattttggttttcctccccatgaagcgcggcgctgatttcggctgcgcggtcatccgtcagggtgaacctacggcggaacagtacaagcgccgccgcaaggatggccatgggcagaacggtcatcatgagtcgcagcccgagcagtgtgccggcgctctgggcagcgatggggccggtctcctcggcattgccggccagcccgatcagatccagaccgatgccggtcagaaaaaccgcaacgccggacgcagcctttacaacaaaggtctgcatggagaagatgacgctctcctcacggcgtcccgtcttgagctggccgtaatccacactgttggagaggaaaagggttgtcagcacgctgagcatgccgttgcaggcaaacaccaccacgcccggcacgcagagcagtgccagactgccggaaaggcctgtcaggcagagcaggagcagcacggcatagccgcccagcgccaatcccagacttaccgtaaatacggcagtattgctgagctttttgcgcagcaccggatagagaaccatcatgccgagaatctgcgctgcgccgccgatggtcgagaacagcgtgtagctggccttccagcctgtgccgccgaaatcgtacttgaagaaatagatgataaagttggaggtcagatacagcgccgagttgattaaaacgatgctgcctacgaccacaagcgcctgatcgttggagaacagcgccttgaacatctcgccgacggtggcggtttttatctcggcactgccggtctccttgacgctggcgcagcagatcgcctcggtaaccacaaagatgacggctacgagcagtgctacccagcggaagccggcgcgctcgctgtcgccgcccagaataccaaccagcagcatggtaaacatcgcaatgagcgccgagccaacgcccgcacaagtgcggcccacgaccgacagattttctcggtcggccggggtgcgggtcacggcggggatcattgaccagtaaggaatatccatcatcgtgtaggtgacgccccacaggatgtagatgacgctgaagtagaccatcatgccggcaccctccagcaccggcgcggcaaacagcgcgtagag

SEQ ID NO: 14106 - DNA, 4462 bp, Unknown
  gut microbiota DNA sequence
caatacaaggatgccgtcaccacgccgagcacaccgactcctaccaaaacacccgcgccggtcagcgcaccgactcctaccaaaacacccgcgccggtcagcgcaccgactcctgccaaaacatccgcgtcgaacagaacaacggcacctaccaaaacaccaacgccgaacaagacatcggctcccaccgctacgcccgccgccgaaagtacggcgacccctacccccgcacctaccgcaacgccgagttctacgccctcgccaacacccgaatctcaggacaccattccgcaggacagccatacaagcagccctgcgttgtggatcatccttatccttgttatcggcggtgcagtctttgccatagctgtttttggcaaaaagaaaaagaacaacagataactgaacagccccctcgctccatcttccgggcaaagcaaaagcgccgcagcgatgcggcgcttttctattgccaaaaacatcaggaagtggacttcactgtccaccatacggaaagcatttcgctacacggcggcttttgtgttactgctccaaaaattcgcggatctccttttcgaccgcgttgacctcctcctcaaacgcgcgggccgaaacgcgcagcgcgccgtggcccatcacgatgatctgctctgcgccgtcactgctgaccacgcgggtgcgatgctcacgggccagctcatgggtcgcgcgctcaatgtacatatcggcggtctcggcctcccgggtgtagacgacatagaggttgtggtatttttcgacctcccgcgcgccgccccgcaccttgtaggcgtcaaacaccagtatcggcacacagcgcttatagcctgcgtagttgcacagaatgtccatcagcctgcgccgcgcggcgtcaaggctgccgtccgccagcctgcgcagggcgtcccacgcaaagatgacattgtagccgtccaccagcagatagtccggcccggcgggcacaggcgcagccggcacgctcgctgccggggcggtgtgcagggccgcgcgggcggcctttttggcatcgtcagcgccgccgcggcgctttatcttgccgtaggtgcgctcaaaaattgccagcagctccttatcctgttccagcgtgccgcagtaggcggaggcccggcggcggcgcgcgttggcctcgtcctcctcctgcgtctgcccggcggcgggggcagtacccagccgccgctccagcccgctggacacatgggcgcgggcggggacctcgtcccatttgacaagatacccggccccgtgggagcagaacactgaatccgccgggttgtcggtatcggcatcggggtcataccctgcggcggccagcacctcatcggtgttgtggcaggcatcgtacccggcgggcagcacagcccaccggcccagcccgtgggtgtaggctgcgacctcccgcgcataaccgcgcgccgcagcaacgggcaggcggccggtcagccgcaccgtgttttcggattccgggagcgtttcaggcgcatggaagctgccgcacatccgctgcacatcggccatggcgcggcccagcgcatcggcgggcagctccagcgtaaaatcgtaccacggctccagcagctgcacgccgtccctggccgcagccatccgcaggccctgccgcacggcgcggtaggttgcctgccggaagtccccgccctcggtgtgcttttggtgggcgcggcccgccgccagcgtgatcctgacatcggtcagcggtgcgccgatcagcacacccgggtgggtgcgctcggccagatgggtcaaaatcagccgctgccagttttcggccagcgtgtcgggcgggcagtctgccgccagctggacgccgctgccccggggcgcaggctccagcagcagatgcacctcggcatagtggcgcagcggctcatagtggccgatgccctcgacagccgccgtcagcgtctccttatacaaaatgccgccctcgctgaatgtcgcatccagcccgaaccgctcctgcaggatattctgcaaaatttccagctgcacctcgcccatcagctggacatgcacctcgccgaggtcgtcccgccagttcacatgcagctgggggtcctcgtcctccagcgtctgcaatgccttcagcagggtatgggggtcggctgcgctctcgacacggtagttcagcaccggctccagcagcggggtatcggcgtcagcctccgccccaaggccctgcccggggcgggtggcggccggtcccgccgccgccacgaccatgccggggtatgcctcgctgatcaggcggaattttccgccgttgtacagccgcagcgcatcggccttctcgccgccgggcagcacagccttgaccggcagcacgccgccggtgatcttgagccatgtcagccgtgtgcccgcgtcctcgctgatcttgaacacccgcgcgccgaactccggccagcgcggcggggtgcgggtcagcgtctgcagcccgcgcagcaggccgtccagcccgtccagccgcagtgccgcgccgaaaaacaccgggaacacctgccgccgcgcaatggccgtcaccacggtctcgggcgaggccgcgccgttttccagcacctcgttcatcagcggctcactgcacagggccagtgcctccgggtcgggcacggcggaaaaatccacgcacccgtctccgaaccgcccgcgcagctcccgcaggcggacggcggcatcggcacccggcagatccatcttattcacaaacacaaaggtgggcacccggtagcgggccagcagcttccagagcgtctcggtgtgggcctgcacgccgtccgtgccggagaccaccagcaccgcataatccagcacctgcagggcgcgctcagcctcggcggaaaaatccacatgtcccggcgtgtccagcagggtcagctcgcacgcctcggctccatcggcggcgggcagcgccagcaccgcctgtttggcaaagatcgtaatgccccgcgcccgctcccggctgtcggtatccagaaatgcgtccctgtgatccacgcggcccagcttgcgcagcacccccgcgcggtaaagcagcccctcggccaatgtggttttgccgctgtccacatgggccagcagcccaacgaccagtcgtttcatacaagttcccctcaaaaaatcaagatcttgtccctattgtacaatttttcctgtcatttggcaaacgctttgctgcaccgccgcccttgcgaccgcgcacaaaacgcgctataatggccgcggagcatattttagcggccgatgctcatcatcggccgcttttattcaggaggcaattcagatgacctatcccgaagttttacaggccgcgcgggggcagatgggcccctgccatgcctgcccggtgtgcaatggccgcgtctgcggcgccacgatccccggccccggtgccaagggcagcggcacggtggcgatccgcaactttgacgcctggcgcaatgtgcggctgaacatggacacgatccacgaaaattttgagccggacaccgcactccgcatcttcggccgcacctttaagtaccccttctttgccgggccggtgggcgctatgacgctgcactacggcgacaaatacaatgaccttgactacaataacattctggtccccgcctgtgcggcggccggcattgccgcctttaccggtgacggcacgaaccccaaggtcatggaggccgcgaccgctgccatcgccgccagcggcggcgcgggcatcccgaccgtcaagccgtgggacaacgcgaccgtggcgcagaagatggcgatgacccgccagtccggctgctttgcgctggccatggacattgacgccgcagggctgccgtttctgcagcatcttgacccgcccgcgggcagcaagaccgtggagcagctgcaggagattgcccaaagcgcaggtgtgccgttcatcttaaagggcatcatgaccgtcagcggtgctgaaaaggctgttgaggccggggctgccggcatcgttgtatccaaccacggcggccgcgtgctggacgactgccctgccacggcggaggttctggccgacatcgtggccgcagtggacggccgcgccaagatccttgtggacggcggcatccgcaccggcagcgatgtgttcaaggcgctggccctcggcgcggacggcgtgctgatcgcacggccctttgtcacagccgtctacggcggcggggcggacggcgttgccgcctacaccgaaaagctcggcagcgagctggccgacacaatgcgcctgtgcggcgcgccgaccctcgatgccatcacccgcgatatggtgcggatcatcaagtaaaaatcgccatgctttaagattgggtaacctatccttaaagcatggcatttttattgccgtgcagcggcaaaggcaaaactcccgggcggatatggaatccgcccctac

SEQ ID NO: 14107 - DNA, 2154 bp, Unknown
  gut microbiota DNA sequence
attatgcggtattgccctaagaaggaaatgattttgcaagctgacaagagtgcgattattgcagcccctttggtgcgcaatgaaatcaaaacggggttagaaaaggctaacaatctattattttacagattttttcacatttgtcaagcggaaatatttgcatgtgccgtattaattgtcaggctgcgggaagaatcgtcggatgtgacaaaatagtggttgagtgacaattaaatacgaaagaaacagtataaagaaaatgaagcggtgatgcctttacagctgcggctataaaaacacaggctgtaacatgaacaaataacgcaacagtgttttaaaatgggcacgggcaaaaatcgacacaagaataacatcgctatatcgaacaaataaatggatgcaaaaaatgtcacatcaaatagaagctgtctgtttacattgacacatcggggtgataggatgagggtgcagtgaaaaacttcccccaaatggcgaagatgaacggcaaagaggagtgagcagaaaatggagcaggcagtggtaaagattctgctgctggggatctgcgggtatggcagcaactatatcaaggagatatcggaacgcaacattcccgatataaaaatcgaaggcatctgtgaggtcgttcccaatgcggcagatttgtatcccattattaaagaacagaacattccgatttatcaaacgcccgaggacttctataaagaacataccgccgatctggctgttgtttcaacgcccatccatctgcattattcgcagatcgtcacctgcctgacgcacgggtcgaatgtgctgaccgaaaagcccgtctgtacctcggtagaaggtgcacgcaagctggaacagctggaaaaggagaccggtaagttcatttcggtaggttatcagcttaattattcccgcgatgtattagccctgaagcaagacattctggatggccgcttcggcaaacctatctacatgaaagcactgcatgcgatgcggcggggtgataaatactacgcccgcaacagctgggcggggcacattgatgtaaagggctgtgctgtgaacgacagtccgtttaacaatgcctgcgcacaccaatttcaagtgatgactttcctgctgggggaatgtctggagcgcgctgctgagttggccgatgtacaggccgaaccctataaaggaaatcccaatgtcgaaaatttcgacacggttacagtacaggcgcatacgccatcaggtgttccgctgtggtacggcacaggccatgccattgtggacaagaagctgggtcctgtagccgaataccgctttgaaaagggcacggtttacttcggcaaagacttcggcagtggcccaatagccgaatatgtatacatcggcgataatggcgagcgcatcgactatggccgcatccccaagggggagcgcctgcaaaaattctacgatgccattgaagctgtgcgcacgggggcgcatcctgtctgtactgtgcaatgcgcaatccctcatttggaggcagtagaaaaaattgcaaagctgccgattgtacccatcccgcccgaaagtgtgaaggacatcagggaagatgatgacacattccacacgatcgttgggctgcacgacgtttttatcacttgttacaaaaaccgggaaatgctttccgatgaaggacttcccgggaataaataagaaggagaaacactatgaaaaagcaaagcaccctcaagcgcgcactggcgcttggcatgtcggccacaatggtcggcgcaacgctggcaggctgcggtggttctgcatcctctacggcagcaacctctaccgaaaccgcatcctctgcagccactgaggcacaagcaaccacggacagcgacaaaccctatgcgggcactacgctgacttggtacaccaccctgaacggcaacgtgtccgacaacttctccaacctcagcgagacgccgtgggccaagtatgtgcaggagcagaccggcattaccatcgagttccagcatccgacgcagggctctgaggccgaagaattcgccgttatgctggcctccggtgagtaccccgacatcatcgagtacacctggacgacctactccggcggcgcaggcgctgccgtcaacgatggcgttatcatct

SEQ ID NO: 14108 - DNA, 2906 bp, Unknown
  gut microbiota DNA sequence
gtggtataatcagcggtaagaggtcgtacatttgaatttcaggaggttgtccgtatgaacagcgaggctttaaaaggcatcgcactgcttctctttggcattctgctctgcgcaggcagtggggaaatcaacgccacgattctgtacaatttcggtgatttcccgtttgccgcgataggcgtcattgtaggagccgtggggctgtatatggtgttctctgatatgccggagtaggcggcgcgggcggccctgctcgtttatgattatctgaaaccttccggcttgacactgtagggggcggcgtcctcaacgccccgcgggagggataaatccctcccctacaatgtaacccgtgaaagagtgctgacatgaggctgcgggccgggcatgcccggcccctacagtgcaagcaaattaaaaagggagcctgctgattcacggcagactcccttttcttgttttatttgtttggaatttcttcggttccttctttgcaaagaaggaacaaaacccccgtaatcactgctgggcggcctcggcgcgcttcttggcgatggcggcgatggcgtccttgcgggacaggttgatgcggccctgctggtcgatgtcggtcaccatgacaaagatgggatcgccaacggcaacgacatcctcaacatgctcaacgcggtgatcgtccagcttggaaatgtggaccagaccctccttgccgggggcgatctcaacaaaggcaccgaagttcatcagacgggtcacgcggcccttgtagatagcaccgatctcgggatcctcgacaatggtcttgatggtcgcaatagcgcgcttggcatcgtcctgatcgacagcggagataaagacatggccgtcctcctcaatgtcgatcttgcagttgaagttcgcgcacatttcctgaatgaccttgccgcccttgccgatgacatccttgatcttgtcaacggggatcatcatgctgaacatcttgggcgcgtacttggacagctcggcgcgcggctcggcaatgaccggcttgatgatctcatcgaggatatacaagcggcccttgcggcacttctccagcgcttcctcgacgatctcataggtcaggccgtccaccttaatatccatctggatggcggtgatgccgcggcgggtgccgccgaccttaaagtccatatcgccgtggaagtcctcgacgccctgaatgtcgagcatcgtcatccagcgaccgccgtgcagggggtcaccgtcggtaatcagaccgcaggagataccggcaacgggtgccttgatgggcacaccggcgtccatcagtgccagcgtggagccgcagatggaggcctgagaggtggagccgttggaggacaggacctcggacacggtgcggatggtgtaggggaactcggcctgatcgggcagtacggggatcagggcgcgctcggcaaggttgccgtggccgatctcacggcggccggggctgcggggtgcgcgggcctcgccgacagagtacggcgggaagttgtaatggtggatatagcgcttgtacggggtgtcggacaaatcatccatcagctgggcatccttggtggagccgagggtgcagatggtcagcacctgcgtctggccgcgggtaaacatgccggagccatggacgcggggcagcaggccgacctcggcagccagcgggcggatctcattgatgccgcggccgtcaacgcgcttgccgtcctccagcagccatgtgcgcacgaccttcttctgcagcttgtagctgatgaggtcaaggtcggcggcggtcagctcgggatgctcggcagcgatggcgtccatgatgggcagcatagcggcatcacggacattcttgtcatcggtgttcatggcgttcttgacttcgtcaaggtgcttggcatagacatcggccagcagggcatgatccagctccacaggggtaaagctcttcttcggcttgccgatctcggccacaatgccgttgatgaaggcgagcatcttcttgatctcctcatgaccggcacggatggcgcgcatcatggtctcctcatcgacctcgttggcaccggcctcgatcatgacgatcttttcctcgctggcggcaagggtcagggagaggtcgctgtgctcgcgctgctccttggtggggttcagcacgatctcgccgtcgaccagaccgacgaagacgcccgcgatggggccgccccacggaatgtcggacatggcgatggccagcgacgcgccgttcatgccggaaatctccgcagagcagtcggggtcctgactcatgacggtcatcgtcacgcagacatcgttgcgcatatccttggggaacagcgggcggatgggacgatcgaccacgcgggaggagaggatggcatgctcgccggggcggccctcgcggcgcataaagctgccggggatgcggcctgcggcgtagagcttctcctcaaactcaacgctcagggggaagaaatcaacgccgtcacgcggtttgtcgctcatcgtgacattgcacagcacgcaggtctcgccgtagcggatcatcgcgctgccgttggacagaccgcacattttgccggtctcgaccacaaaggggcggcccgcaaaggtcgtctcgaacttgcggtacttggggaaggtttccagtctggatgcgaattcgtaagccatagggattctccttctgatatgatttactttcagcgcgcccagccccgattctgtacaataaagccagcagccaagcctgttgcttgggtgctcgatttactgcacaaaatggcggtggggcagctgtaaaatacaggtgcagtggggtttcaggtgtgcattgccggaaacgggcacgggcggatacggaatccgcccctacaaatggcggttacttgccttttccg

SEQ ID NO: 14109 - DNA, 6960 bp, Unknown
  gut microbiota DNA sequence
cggactaaatggcgataaggtcataggactatccaaggatcaggcagaccggtacagccgactactttttctcccgcaagtcgaggatatggcaagcggtgaactgcccgccgcaaaggtacgcccgcaggatgaacgctacgggaacaaactatctttttgggaaaggttggaaagataatggaagaaaagacagataaagtagtcggctacatcgaatatctcggtgcaggcgggatgatcggtgaaatcgttccttacacaagcgtggaaaaattcaaggatgaaattctggattccttggattgtgggcggccagtgacaccggttgtattctcagatgaactggatgagccactccaatttgattcagacacctattttccgtggggatttcgcagcgaaaagcgagtgcaaatcccttatgaaatctatcaaactaacaggcgagaccttgtttttatggagtattctcctgagaggctcgctgccggagcaaaggactacgaactcgtgtacaaggggcagatggagcgttgggaaacgctggacagcatttattcacggcataatcgggatgaccgtccaaacgccaaaagtatgcgttccgtctctgtcagcgatattattgtgacacacaaagataacgagacacacgctttttatgttcagccgattgggtataagcaggtagataacttgttgccggaacttgaaaatgccacactgtcaaaagcagaacagcacgagcgataaggagcagcctatggctaaatacgaaaatatccgtgcgcttgccaaaaagcaactgcaagccgtcacggagagcagcgaccgctggaaagcatttttgcagacagcggccattgcttataattatagtttcccgaaccagcttttgattcacgagcaaagccccaccgccacagccgtggccgacatagcttactggaataataatgcgggtcgctgggtcaagcgcggcgcacacggtatcgcggtatttgacactcgcgccaattcttcccggctgcggtatctgtttgacatttccgataccatcccccgtgcagagattcccgaagcgctgccgtgggtcattacagaccagaactggcggcctgtttgggataaaatcgtagcggataatcacgccgacagcatccagagcgccctcctcatgctctctacatcctgcgttgcccagcgcagcgccatgttcacaaccgcactgggaaaagcgatagacggcagcagcttacagtgggccaagccggacgaacagcggcagctatttttacagcttatcacccaaagctgtctgtatatggccgcgctgcggtgcggcgtggatactgcgcggctggacctgtctgcccttgagtccgtgaaccagtttgatacaaaccgcatcactctgtgtttgggcagcgcttgccaacaggcggcacggcctctcatgcagcagatcggtagcatcacgagagaaatcgacagtgttgcacgcgccgaaaaagtccgctattatggtgacaaacaggaagaaaccaataacaccaaggaggtcaacaatggagtacatgatggtgaacggctaccaaatcccggcgctgacgctgaacgagccgccgatgccggaaatcggcaagtacggcagcctgcggcggaattttctgcgagagaacgcgccggtggtgttcgacgagatgctgctggagggaacgctgtacccgcatctggcggagatggacaacgcggtacaccggcaaatcgaacagacgatgcagacgctgatgcagcagagcaccgccccgaaccggcagacagaccctatgggctggacgcagtggatgaacgccttgcagagccaagccgaggaactggcgatgcagcagatttacagcctgtaacacaagaaccccaagcggagagcgataccacgccctccgctttttctgtacccatttctgatttgccgccgctgagcgatgaactgattctaggcttactggcgaaagaatcctccagccgtgccgacaatgcggctattctggaatatttcaatgagcatcccgaccttgccgagcgcagcgccttttgcaagcactgttacaagcaaatttatacatatttgttcgtggatgacaataccgtgggttttatccggcatgatatgtaccttgaactttgggagggcaactatcttaccaaaacagcgcaggtcaatctgacatgggatgctgttgccgcaaagattgcagacctcatcgagcaagggcgtctgatggttcccatcaaggcagcacccatgccgcagcagatggagcagcttactcttactcccgaagattctgaaaaggcagggctgccgagccatgagcagcaagcaaaaagcatcgaccttgcggcggaagtcaaaaagtggaacaagcccatcattgacgcatccggcaagtacattacggagcaggacattaccgatgcactgtgcaaaggcggcgggtttgaagatagcaaatttcgcattcagcaatatttctctgcacaggtacttcctatcgaggaagatcaagcccgctggctgaaaaaagaatacggcatcggcggcggcacatggttcttccgtgatggtgggcgcggctttcttaaccacatgggcaaaaatcttgagatcacccgacgtacagaggacggcgagtatcgccgcgttttgaagtggaaagaggttgcccaacgcctgcggcttttagtttacaacgaccagtatctgaccgatgccgaaaaagccccctatcaggcatgggcagcagaacagcaagccgctcgtgcagcgaacgatgccgcactcgctcatgcaaaacacgctatcgcggatttctgcgagaatgaggggctaaacgagccgaatttctccgacttgacccgcgtggagtttgcttactctaccaccgaggacgatgagcacgagatccaagtgtatgccaatcttctgcggaacgaaatccgttatgaggttgacggtaacattgtccatatcgactacttccaagataaccacgagcttgctgcgcagggcattgaaaacagcgccttctcggattttatcaataccgccgaagcagagtttgaaaagcatcatccgactacaagaaaagtcgaaaaatcacctgtaactatcgacagcacggtttatctggaagatgacagaccttttaccgtggaggaaatcggcagagaaaacattcatctgcgggatgaaagtttcccgctggtaggccgtgccgtcagccacgaggagtttgcgcggctgcttgctgccaaccccaaaaatgcagcactatccgccccggaagttccaagccgccaagcgcagcaggaagaaattgctgaatccatcgtgggcgaagtcatcgaagaacccagcccctttgtggagcaggttatggcggacgcagaacggctttcggcagaagaggaaccttaccaccgtgaaaccattacctatgaagctccctatctggataacctgccgacagcaccgcgcgaaaagtttgcagccaacattgccgctatccaaaagctgaaagaaattgagcagcgcgtagcgaacggcggcagccctgcttttgaggatgagcagaaaattttagcgcagtacacgggctggggcgggctttcggatgcgttcgacccgaacaaaagtacatggtcgaacgagtacagccagctgaaagcagcattgtctgaatccgaatacgaagctgcccgcagcagcaccctgacggcgttttatacccctgccaccgttatccatcccatctaccgcgcactggaacgcttcggcgtaaagggcggcaaaatcctagaacccagcatgggcacaggcgcatttctcgcacacggacattttggcagcagtgatgccaaattctacggcgtagaattggacagcatcacaggccgcatctccaagcagctatatcaaaaggccaatatccaagtaaccggctatgaaaatgcgcttctccccgacaactattttgactgcgttattggcaatgtccctttcggcaatttccaagtcaatgaccctcagtataaccggctgcattttcccattcacgactatttctttgccaagagcatcgacaagttgcgcaccggcggcatcatggcgatcatcacctccagcggcacattggacaaaaaggatgaccgcgcccgcaagtacattgccgagcgctgcgacctcatcggtgcggtgcgcttgcccaacaatgcgttcaagggcagcggcactaaaattatgacggatgtaatttttctgcaaaagcgcgatacgctgcgccagcaggacgagccttggctgcaccttgcagaagatgccaacggcattaccatgaaccgctactttatggagcaccccgaaatgatttgcggtaggatggagatagtctcaggtccgtatggccccacttccacctgtcagccgatagaccccgatgcggtggaccgtttcggaaagccgttgctggaaacgcaaattgacactgccatgcagcacttgaccgccacgctgacaagagccgaaattcccatacaggaggaaagcggcgaggacaccaagtacattgatgccgatccctttgtgcgtaatttcagctacacggtaaaggacgataaaatctattaccgcgaaggcgcagtcatgcgggaatgtaatcccaacgcagcatcggccgagcgtatccgcaaactggtggaactgcgcgataccacccgcgctttgatcgatgcgcagttgcaggacttgtcggacgaggaaatccaccgtctgcaagcccagcttaaccgccagtatgatgccttccgcgccaagcacggcctaatcaacagccgcagcgcggagttgtctttccgggatgacagcagctactatttgctgtgttcacttgaaaatgtcgatgaaaaaggaaactttatcagcaagtcggatatgttcaccaaaaggactatccgctctgcacagatacccgaccacgccgacacggcatcggacgctctggcactgagcatcggggaacgtgccaaggtcgatatgccttacatgatgcaccttaccgggaaagatgaagcaacgcttgccaaggaactggcgggcgttgtttttgtagagcctttccgcaaacaggaggacggcagccctgtttaccttatggcggatgagtatttgtccggcaatgtacgcgaaaagctgcgtattgctcatgttgcagccgaccaagacccggcgttccgcatcaatgtagaagcgttggaacaggtgcagcccaaggacttgacggcgggcgagataacggttcggttgggtgtcacatggatcgggccggaaatcatcaagcagtttgccgatgaactttttcagtcaacctaccgcgaacagaaaatagctgtccgttacaatgaatatctgaataactggtatatttccaacaagagccagggcaacgataatatccgcgtcacgaacacctacggcacaaaacgtatcaacggctatcatttgttggagaacgcactcaacctgcgggctaccaaaatttacgatacaatctatgacgaaaacggcaaggagcaacataaactcaatggtcctgccaccgaagaagcacaggccaagcagcggatgatagaagatgcttttaaagactggattttcaaggaccgtgaacgccgggaaagtttggtagcgctgtacaatgaaaagttcaactgcatccgcccccgtgagtacgacggcagccacatccagtttttcggcatgaacccggaaatcgcactgcggccccaccagcgcaatgccattgcacatattttgtacgggcacaacacactgctggcgcacgttgtcggtgcaggcaagacctatgagatggtcgccgccgcgatggagaaaaagcgattgggattatgcagcaaaacacttgtcgccgtgccaaatcatctgacaggccaatttgccagtgaagcgctgaagctataccccaacgcaaacattttggtgacaacgcagcgcgattttgaaaaaacgaaccgcaagcggttttgcgccaaaattgccaccggcaactatgacattgtggtaatcggtcacagccagtttgaaaagattccactttccgatgccagaaaagccgagtttatccgcaagcaaattgacgagctggagatgcagttggagagcatggacaacagcgacagccgtctgaccgtcaagcagttggaaagtaagaaaaagcagttgaaaaccaagctgtcaaatttgctggacgccccgaagcgggatgatgtggtgacttttgaggaactgggtgcagactccctcatggtcgatgaagcacacaatttcaagaacctcatgaccgttacaaagatgcacaacatcgcgggtatcagcaccaccgaaagccaaaaggccagtgacctgtttatgaagtgccagtaccttgatgaaatcaccggggcacgcggcgtaacgtttgccacaggcacccccatttccaacagtatgaccgagctgtataccatgcagcgctatttgcagcagtacaccttggaacgcaacggccttgcaaactttgacagttgggcggccacctttggcgaaaccgtcacagccatcgaacttgcgccggagggctatgctttaataggacgataaagttaactgtcctaaattgaaaatacataaggaaggaggttaagagaatgtcaaggacttcaaagattacagcactttatgagagattatcaagagatgatgacctgaatggcgagagtaattccattaccaatcagaaaaaatacctcgaagattatgcccgtaggaatggttttgagaatatccgccattttactgacgatggtttttcgggtgtaaatttcaatcgccccggcttt

SEQ ID NO: 14110 - DNA, 1173 bp, Unknown
  gut microbiota DNA sequence
catatagattgtagtatcaaacattatttttagcaagggttaaaatgaaaaatatgaataaatacgaaaattgcttattgtgtcccagaaaatgtggcacaaacagaagaaccggacaaacaggcgtatgtggcgtttcatctgaaataaaggtggcgcgagcagcacttcattattgggaggagccatgcatatcaggaaaaagaggaagtggggcagtttttttctcaggttgcagcctgcactgcgtgttctgccagaacagggagatttctgacggaaaagagggaaaggtaatcagtaaagagaggctgagtgatatctttatggaactggcgggcaaaggcgcaaataatatcaatctggtcacaccggggcagtatatccctgatatagtgtgggcggtaaacaatgcaaggagccgtggcatgaagcttcctattatatataatacgagcggatatgaaaatgtgacagagctaaagctgcttgagggcatagtggatgtgtatcttccggattttaaatatatggacagtacgctttcggcaatgtattcaagggcaaaagattatccgtctgtcgcaaagcaggcgctttcagagatggtcaggcagcagccggatgtcgtgattgacgatgcgacaggattcatacaaaagggagttattgtgcgacagcttctactgccgggacatgtgaatgatgcaaaggctgtacttaagtacctgtatgatacatatcatgatcacgtatatataagcatgatgagccagtttacgccgattgcactaaaggattatcctgagataaaccgtacagtgacaaggagagagtatgaaaggcttgttgactatgccctcgaaataggaatcacgaatgcatttatacaggaaggggacgtggcaaaggacagctttatcccggcatttgactgtgagggagtatgatatttaccgtttttcttaataaaatagtaagaattggcaggcaaaaatgactggattttgtgacgccggtgtagtactatggttatgtgatattttttaactgtgaaggtactgaacagttacgatattttgttattactcacatcccggtgtgacagacgataatatttttaatcacacaggatacattattcaatagaggatacagtgatgaaaaatatag

SEQ ID NO: 14111 - DNA, 1027 bp, Unknown
  gut microbiota DNA sequence
atcgttgtattttttaaagctgaaaagaaagaccgcccaatcggacgagttttttatatattgcaacatttttacattgcaacagctttgacataggtcgaacatgtgtacaaaaaaagcgatgcgcccgcgcggggcgcatcgccgtgtacctattatataaggatgccgttgcagtggtccacctcatgctggatgatttgggcggtccagccggtgaaattctttacatgggtctgcatcgcgcggtcctgccactggaccttgatagtcctgtggcgccgcgccctgcgctgcccctgcagggaaaggcagccctcctcagcgaggtaaggccccttgcggtagacgatgacgggattgaacatctcgcagggtgtgccctcgttgtcaaaaacaatgatagccttgttcacgccgatcatattggcagccatgccgacacagccgtccttgtgggcggccagagtatcgagcaggtcatcggcaaccgacaggtcaccggcgcctgcaggcagcgccttctgcgccagaaagaccacatcggtcatcaggggacaaaccatagaaaaacctcctgcggaatagaatgatatacctttattatagcgcagggcaggcacaaatgtaaatgtcagtaaggcaggggacctaagtatccgccaacctgccgacattggagcagtaccgtgcggcaggattcatcggcccggcgcagatattccttcttgcgggccagatcgcggcgctgctgctcctgcatcgcgcggaaatgcgggcaggatttgtggcacccctggcagtacgaatgacagttcttctggcatggaagcatggaaaaaacacgctcctttcagtggatcaggtaacagaatcagaaatcagctggtacaagatatagtagaaaagaaccgttcttatgcctatagtatacaccattccgcatgtcacatcaaggggaaacctgtaaggatactgtaaagctttgtaatgccctgcctatagtgcttgcgaatccaccgccacc

SEQ ID NO: 14112 - DNA, 11796 bp, Unknown
  gut microbiota DNA sequence
tctgttccggcttttctttttatgattatacctgttggaatgatttacggaataataacgataaaaacaaaaagtatttggcctgctatctttttgcatgcagctcataatacttttgaccagttgatttttggaacagtaaccgttgctaataacaaaatgttttttgtgagtgaaacaggtatatttactattatttttgcatggatcgtagctgtttttctttataaaaaatgcaatgactaaatggtaatttatagattaggattaccctattacaaagaatttgacaatttccagtttgtcgggctgcggggcggggcgggtataacggcagctttggcttccccctctgggggaagctgtcaccgcaggtgactgatgagggggcaacttccggatatttctccctcatccggcgcgttccgcgccaccttccccccaaggggaaggctttccccgccatccgcattgacaccttgcgccgatgcgcttataataaaactacttacgcaacttagaaaaaggggaaatcactatggcaaatgttcgtacccgctttgcgccgtcccccacaggctatatgcatgtaggcaacctgcgcacggctttgtatacctatctgcaggcgcgccacaacggcggcacctttatcctgcgcattgaggacaccgaccaaggccgtctggtcgagggcgctaccgatatcatctacaatacgctgaaggccaccggcctgacctgggacgagggtcccgacatcggcggtcctgtcggcccctatgtccagagcgagcgcatgggcatgttcaagcagtatgccgagcagctggtcaaggccggtaaggcatactactgcttctgcaccgaggagcgcctgaacgaaatgcacgaggcacagcgcgccgccggcgaaatgacccactatgacgggcattgccgcagcctgagcgccgaggaagtcgccgccaagctggccgccggggagccgtatgtcatccgccagaaaatccccgagagcggcgtggccggctttgacgatgttgtctacggccacatcgaggtcgatgtcaaggagctggacgaccagattctgatcaagactgacggtatgcccacctacaactttgccaatgttgtggacgatcacctgatgggcatcacccatgtcatccgcggcagcgagtatctttccagcacgcccaagtacaacctgctgtacgaggcgttcggctgggagaagcccatctatgtccactgcccgcccgttatgaaggacgcgcagaacaagctgagcaagcgcaacggcgatgccagctatcaggacttggtggccaagggctacctgcccgccgccgtgctgaactatctgctgctgctgggctgggcgcccgagggcgagcaggagattttctctcttgatgaaatgatcaaaatctgggaccccgcgcgtatttccaagtccccggcgatttttgacccgctcaagctgcgcgccatcaacgccgcctacatccgcgccctgccggccgaggagttccgccgtctggccgacccgttcatcgacagtgccgtgcattgcgacatcgaccgcgacctgctttgcgccaatttgcagccccgctgcgaggtgctggaggatattcccccgcagctcgatttctttgatgccgtgctgcccattgatgcggaaatgtatcgcaacaagaagcaaaagaccacaccggaatccgcaaaggaggcactgaccgcgctgctgccggtgctggaggcccagaccgactggacccgcgatgcgatttttgatgcctgcaagacgctggccgagcagctggagaagaagaacggctggctgctgttcccgctgggcatcgcgctgtccggcaaggcccgcacccccggcggcggcaccgaccttgccgccatgatgggccgcgaggagaccctcgcccgcgttaaggccgctctggaaaagctgtaaatggacagtagttcacccttgccccggcgaaagatcgttcgcttgcccgactatgattatagtcaatgtggcgcgtattttgtaacgctgtgcacggaaaatcgtgcagaaatcttgtcacagatcggtaggggcggggctctgctccgcccggtcgggcgtatcgctgagcagctattactggatttaccgcagcattaccctgtgcaaatcgacaagtatgttgttatgccgaatcatctgcattgtatcctgcgtattactgtgccatcctctgcggtttctttgagcggcattgtctgtgcctacaaatcacttaccacaaaggccgccaatcaagctatgcagacaccaggccgcaagctctggcagcgcagttactatgagcacatcatccgtgatgagccagactatcaagagatttggcaatacatagacgaaaatccgcaaaagtgggaaattgaccgcttttatgggaaaggcacgcgataacggcaaggtgccacgggcggagcagagccccgcccctacgatgcaataaagtaaagaggagttatacccggcagatgggtataactcctcttttttcaaatcacataatcgtttcccggctgggaggtgttgaccagatcggcaagggtaatgccgtcaaaatagtcattgatcatcgtgttcagcttgcgccacatcggcagggtgcggcactcgctcatgcggcggcactcgatcgggttctgctccagacaggccaccggggccagacctccctcggtcaggcgcaggatgctgcccacggtgtactcctcgggcgcacgggtcaggcggtagccgccggacttgccgcgcagcccctgcagataccgctccttgacaaggctttttacgattgcctccagatatttttcagaaatttcctgtcgtgcggcgatctccttcaagggaatgtagccgtcgtgctgatgctctgctatgtcgatcatgacacgcagcgcataacggcccttcgttgaaatcatcatggttggctgctcctttgggcatagggcacagcccccggcctgcaatgcgcaggggcggcgggctgcccttgtttttcttattcctattatataggttggttaatgggaaagcaagctgttttgcagaaaaatatttgcaaaaattccctattcccctattgacaaacggggaaatatgttgtacaatcctatcaacctacaagaaaggtatgaatagatatgcgaaagggttttgcaccgtacccgcgatgtcgccgtcagacgctgtgactgcatgtttgccccgatttataaacagaaatgacgatggaggaacctatcatgagcaagatctacacttccgctgaccagctgatcggccgcacgcccctgctggagcttacgcatatcgaggccgccgagggcctacaggccaagatccttggcaagctggagtatttcaaccccgccgggtccgtcaaggatcgcatcgccaaggcgatgatcgacgacgccgaggcctccggcaagctgaagcccggctcggtcattattgaaccgacctccggcaacaccggcatcggtctggccagcgtggcggctgcccgcggctaccgcattatcatcgtcatgcctgagacgatgagcgttgagcgccgccagctgatgaaggcctacggcgctgagctggtgctgacggacggcgccaagggcatgaagggcgccattgccaaggcggacgagctggccaaggagatccccaacagctttgtacccggccagtttgtgaacccggccaaccccgatgcccacaagcgcaccaccggccctgagatctgggaggacaccgatggcaaggtcgatatttttgtggctggtgtcggcaccggcggcaccgtgaccggcgtgggtgagtacctcaagagccagaatcccgccgtcaaggtcgtggctgtcgagcctgccacctcccccgtgctgagcaagggcgtggccggtgcgcacaagattcagggcatcggcgcaggctttgtgcccgatgtgctgaacaccaaggtctatgacgaggtcatccccgttgccaacgaggacgccttttccgccggcaagctggtcggccaccgcgagggcgtgctggtcggcatctcctccggcgcggctgtctgggccgccattgagctggccaagcgccccgagaacaagggcaagaccatcgtggcgctgctgcccgacaccggcgaccgctacctgtccaccccgctgtttgcagactgattgcaatagcgcaaaaaatttgctataatgaacgcggtaggcgtgtgtctgccgcgttttttgtggtttttaatacatgtaggggcggggttctactccgcccgggagccttgccgctgcgggaatgttccgggcggagcagagccccgcccctacgctgtaatctcttttgggaggacactcttatatgactactaccccaggtgcgctgatcgctatgagcggcggcgtggacagcaccgttgccgcctacctgatgaagcaggccggttatcgctgcatgggcgcaacgatgcgcttataccagaacgaggaccttgggcaaagcggtttccacacctgctgctcggccaaggatgtcgaggacgccgccgaggtggcctttgatctggacatcccgtttgaggtcgtgaactacacagaggatttccgcgagaaggtcatcgaaaagttcattgcgacctatgaggccggcggcacgccgaacccctgcatcgactgcaaccgcacgatgaaatttgacaagatgctggattttgcccgggcgcacgggttggattacgtcgtgaccggccactatgcccgcattgagcaggaccccgagacaggccgctggctgctgaaaaaagcactgtacaccgacaaggatcagagctatgtgctgtacgcgctgacgcaggaccagcttgcccacacaaagttcccacttggcggcatggacaagccttccatccgcaaaattgccgaagagcagggcttctgcaacgcccgcaagcacgacagtcaggacatctgctttgtgccggacggcgattatgtcggctttatggaacgctacaccggcaaatattacccggacggcgattttgttgaccttgacggcagggtcgtgggccgccaccgcggcgcggtgcgctacacctgcggccagcgcaaggggctggggctggcgatgggcgcaccggtctatgtctgcggcaaggatatggagaaaaacaccgtcacagtcggccccgagagtgcgctctttacgaccacgcttgtagcgggggatttcaactggatctcgatccctgcgctgaccggcccgatgcacatcaaggccaaggcccgctaccgccagaccgagcagcccgccaccgtgcgcccgctggacaacggccttgtgcaggtcgtgtttgacgagccgcagcgcgccatcacccgcggtcaggccgttgtgctctacgatggggatgtcgttgtcggcggaggcacgatcttataagcaccaacataaaagacgcagccgaggaaaactcagctgcgcctttttggttttatgaaatcagacgatctcgaccttctccatgacaacgggggtcttgggcttgtcgttccagtcggtcgcaacggctgcgatctcgtccacgacctcaatgccgttcacgacatggccgaaggcggcgtagctgccgtccagatgcggggcatcctgatgcatgatgaagaactggctgccggccgagttggggtccatcgagcgggccatgctgatgacgccgcgggtgtgcttgatggggttggcaacgccgttctgcaggaactcgcccttgatgtgccagccggggccgcccatgccggtgccctgcgggtcgccgccctggatcataaagccggagataacgcggtggaaggtcaggccgttgtagaagccctgcttgacgagcttctcaaagttctcgcaggtgatgggagctgcgctgtggtccagctcaaggtcgatggtcttgccgttttgcatggtgatacgaatcatacgatgttctccttttccgttggttgattttgtgtttccgggtcactctccggtgtggcgatgcccttggtatagctcatgctgccgagcttctcggcaaattcagcgggggtcagcttatccatccagtaaagcagcgccgcccccataaactgctcactgcgcagggtcgcgcggggcagcagggcaaacaggccgccgtcccgcaccgtgccggtgaaggggtcggtccattcgtccggcaggcgggcatccagctgccggggcgacacatggcccgtgatgaaaccgcgcccgccgaacagcggctcgatgagccagaacagcaccctgcgcacgccgtggcggctggggaaaagcccgcgcagccggtaggtgtgccagaatgcgtccgccagatattccacgggaatatcctcgccgtaggtttccagcaggcaggtgtgcagcagcgccgtgacatcggccagctctgcgccggtgggcagcgggctgacatcctcgaccgggaccagactggagccggtgtcctcggcatggagggtggaatccagcgcgatctccaaataaccgtgcccgcccttgccggcataggggcagccgggcttgcacatggcataaatgaagggatgcaccacggtgtcggcggcatagtggcttaaaaagccgagcgcgtactccacctgcgggcgggtcttgacattggcgcaaaggctgcgcagaaacgcgcccgtcttttcctcatgcatacggttgcccagccccggcaggtcgtagtggcgctttgcgcgctttttccagacttcgtagcaaaaaaagctgtccgggccgttggccccggccgcaaacgccgccgggcactggatcttataatggatcgcctctgccgccttatgggcggtgcgcacatgggtatagccttccggcataaagtgtcccctttccatggatgagcttaccagtaattgtaccgcgcggcagggaaaaagtcaaattggaaaacaccgcgcggatgccgtcatcttgacatttttacgcaaatctgatataataaaatgtatctatagccttacaggggggaatttcagcatgccgcagccgtttgtgttgtttgacaatgtgtgtaaatattatcagatgggtgaaacacggatcgccgcgtccgaccatgtcagctttgagatcgaaaagggcgagttctgcgtcatcctcggcccctcgggcgcaggcaagaccaccgtgctgaatatgttgggcggcatggacacctgcgatgagggcacgatcctgctggacggcgaaaaggtcagcagctttgataaaaagcggctgacgacctaccgccggtatgatgtgggctttgtctttcagttctacaatctggtgcagaacctgaccgcgcgggaaaatgtcgagctggccgctgagatctgccgcgacccgctggacgccgacaccgtgctggacgaggtgggactggctgaccgaaagaacaacttcccggcgcagctttcgggcggtgagcagcagcgtgtttcgattgcccgcgcactggctaaaaacccgaagatcctgctctgcgatgagccaaccggcgcgctggactacaagaccggcaagcaggtgctggcgctgctgcaggccacctgccgcaggcagggccgcacagtcatcgtcatcacccacaacagtgcgctggccgccatggcagaccgggtcatccgcatcaacagcggccgcgtggtagaccagacggtgaaccctgcccccacccctgtggaaaggattgaatggtaaatgacacgcagctatcgcaaaaacaccctgcggacatttaaaaataccctgagccggtttgctgccgtgtttgccatcgtagcgctgggtgtaggctttctggccgggctgaacggcacccccatcgacatgaaggagtcgatggagcgctatatggacgatgccgatttctacgatctgcgcgttgtctccacgctgggcctgaccgatgaggatgtagccgcactcgggcaggtggacggcgtgcgcgaggtgcagccgggctactcggccgatctgctggtcgaggcagacggcgacaccatcgtcagccgcgcccacagtctgcccgcgccggacaacaacacgatcaaccgtctgcgccttgtggatggccgcctgcctatggcctccggcgagtgcgtggtcgaggccggtgccacggagctgaaccccacctaccccatcggcacccaactggtggtaagcagcgcgaacgaggcgctggacacgaagctggacaccaccgtctacaccgttgtaggcatcgtgcataacgcgaactatttcagctttgagcgcgagcctgccagcgtgggcaacggcacagtcaagctggtattctacatcccgcagcaggattttgcctttgaggcctacaccgagatctacctgaccgccgagggcgcccttgcgcaggacagcctcggcgatgattaccgcgacacggtggacgccgtcaaggcccgggtcgagggcattgccgaggcccggtgcgaggcgcggtacagcggcatcgttgccgaggcccgcgccgagctggacgatgcctgggatgaatacaacgatgccaaggccgaggctgaccagcagctggcagatgccgccgcagagctggccgatggcaggcagcagctggccgatggccagcgcgaggtcgatgacggtgagcggcagtatgcggacggcctgaacgagctggcgtccaacgaagcgctgctcaataacggcgcggcccagctggccgaggccgaagcgcagctgcaggccgccgaggcacagctgcaggcgggcgaggaggagcttgccgccaacgccccccggctggaggctgcccgcaggcagctggaggacggccaggcccagtacgaggccgggctcaggcaatacaatgacgggctggcgcagttggatgccgccgaaaagcagctggccgaggccaaggcccagctggacgccaacgctgccgcctacgaggacggcatccggacaatggccgatgccatgggcgtggatgcagagcagttggatgctttcatcggctggctggcccaaagctgcgatgcaaacggcacgcagccgccccagaatgccgaggagctgtggcaggccctgcaggagtacggcgatctgaccatcatccccgccaacatgacgcaggagcaggtcgatgccatccgcacacaggccggtgatctgctgaccgtgatcgatgccatcccgaccgacaccctgcctgaggagcagaagcagcgcctgcaggaggcacgggcgcatatcgctgcgatagccgatgccgccgacccggccgccatgcagacggcgctgcagagcgccgctgactgggtgcagcagtccgccccggagctgcccgatgagatccgcgacaggctgaatgccgccatcgaggcatggtgggccagcctgccggaggacagcaaaaagcagcttgatgagtttgtggccggtgtggggcagctgacccagtaccgtctggggctgctgcagtacgaaaagggcgccgcccggctggccgcaggccgcgccgagctggaggccaatgccccccggctggccgaggctaaggcccagctggacgagggctggcagcagtacaacgagggccttgcccagtatgaggccggcaaacaacagctggccggtgctcgcgcccagatcgaggacggctgggccaccctgcaggacaaaaagctgcagatggccgatgcgcgccgccagatcaatgacgccaagggccgcctgcgcgatgcccgcagccagctggacgatgccaaggcaacgatcgctgaaaacctgcagaagctgcgtaacggcgagatcgagtacgaggacgccaaggcggaggccgaccggcagttggccgatgcccgcgcccagctcgaggatggcgaagccgcgctgcgcgaggtggagtacccgacctggtatgtctgggaccgcagcaaaaatgtcagctatgcgtcctttaccgccaatgtggataagctgaccgccatcaccacgatcttcccggtgtttttcttccttgttgcggcgctggttgtttcaacgacgatgacccgcatggtcgaggaggagcgcctgcagatcggcaccttgaaggcgcttggctattctgacgcagccatcatgcaaaagtatctgctctacgcctttacggcggcggcagcgggcacggtgttcgggctggcggtcggtttcaaagccttcccgtccatcatctggtccgcatattcgatgatgtactacatgccgtccatcgccacaccatggcggctggggcaggcactttttgcaggcggcacccttatcgtgctgacggtcggcatcacggcgctgacctgccgcaccaccctgcaggagaatcccgctgccctgatgctgccccgcgcccccaaggccggcaagcgcatcctgctggagcgcatcaccccgctgtggcggcggctgcccttcagctggaaggtcacctgccgcaacctgctgcgctacaaaaagcggttctggatgaccgtcatcggcgtaaccggctgcacttcgctgctggtggctggctttggcatctctgattcgctgaacgccatcatcaccaagcagtacagcgatatttaccactatgacctgctgacgatcgtcaccaaacaggaggccaccgagagcggccccgtccacgattacctttataacaccgacaacgccgttgaatcgctgaccgttgcgatggaatccacccggcaggacagcccggacggcgagatggatgtttacctgatgatccccgaggacgcggaccgctttgccgattttgccgacctgcatgagcggctctcccgcaaagaggttccgctggggcagcagggcgtggtcgtaaccgagaagatggccaaaacgctgggcattgctgcgggcgataccctgaccctgacgaacagcgatgaccgcaccgccgacttcaccgtcagcggcgtttgcgagcattatgtcagcaactatgtctatatcagcccggccgtctacgaggccggctttggcgtggcaccgcgctacaacgccattttgagcatcttgcccagcgatgatgaaccggcccgcgatgccatctcggccgatctgctggcgatggagcaggtggccagcctgagctttacgcaggacagcgtggcgcaggtgctgaacatgctgaactcgattgatgcggtggtcgtgctgatcatcgtctgcgcggcctcgctggcgttcgtggtgctgtacaacctctccaatatcaacattgctgagcgcgtcaaggagatcgccaccatcaaggtgctgggcttctatgaccccgaggtctacgcctatgtcaaccgcgagagcgttgttctgacgctgatcggcacactgttcggtctggcgggcggcattttgctgcacggctttataatacgcacggtcgaggtcgatgccgtcatgttcgggcgggaggtcagcggcatgagctttgtatacgctgctgcgctgacgctgctgttcagcacccttgtcaaccttgtcatgcagcggctgctcaagcgtatctcgatggtggaaagcatgaaagcgccggaatgacagggcttttcagcaaaacagccagacaaataacggggagccggtgcggccttatgccgcaccggctcccctcttat

SEQ ID NO: 14113 - DNA, 4431 bp, Unknown
  gut microbiota DNA sequence
tgtgcggtgttgccttaggtatgtgatgaacgccgcacgctgcgcgtgcttgcaggctgataatttttacaatcaggttagataacgctaatccgtaaatctgcgcccttgtaccggcgcaaacaagctataagggagtatcgcatgatagacaaggatcttctccgcctgctcggcggcaacaaaaagtatatcgccttctgtgtaggcttgatggtgctggggctgtttgcgaatgtcggcatcactgcatccctgtgctgggccattgctcttgccgtccggtacaacggcggcgcgggtgtttttctggcaccggcggtctgtgcttgtatcggattggcggttcgctatgccaccacccgccttgtcggggatttgaaggacacactggggcgcagcgtcaagaaagacctgcgcgaacgcgtctacaacaaaatcgttcgtcttggcgtgcgttctaccgatgatatgagcatggcgggtctgacccagatcgctctggagggtgtggagcagttagatctgtactattccagctacctgccgcagttcttttacgccatgcttgcaccgcttttgttgtttgccattaccgtgggcatttcgtggcgcgtggcgcttgtacttttgtgctgcgtaccgctgattccgctatccattattgcagtttccaaatgggcgaaaaagatttttgccaagtattggggcaaatacacctcgatgggcgactcctttttggacagcgtgcagggcttgaaggagctgaaaattttcggtgccgatgccgcacagcaccgcaagatgaacgaaacaagcgaggaattccgcaaaatcacaatgaaggtccttgtgatgcagcttgccagcacgaccattatggatctggttgcctacggcggtgcagggcttggcatcgcaatggcactgctctccgtgacaaggtgggggctttcccccattgcggcactgttcctgattctggttgccgtggactttttcctgccgctgcgcgcgttcggctcggcgttccatattgccatgaacggtgtctctgcggggcagaaaattctctcccttctcgggcaggacgaccctgtctgggggcaggaggctgtgacggataccgagctgaagcttgagggtgtcaccttctcctacgatggcaagcgggatgtccttgaaaatgtgacgatgaccttcccccgccacggcatgaccgccctggtgggtgagtccggctgcggcaaatccaccgttgtgaacctcttgttcggcgcgttccgcccgaatgccggtgctgtcacagtcggcgggaaaaaattggagagcctttcccgcgcatcttactattcccacctcgccgttgtcagctacaacacctatatcttcaacgaaacggtgcgggcaaacttccggcttgccaagccgcaggtcaccgatgaggaaatctgcgccgcgcttgaaaaggtcaacctgctcaccttccttcagaagaacggcgggcttgacaaaattattaccgaggatgcggccaacatctccggcgggcagaagcagcgtctggcgctggccgtgagccttgttgccgacaaggacatttacatttttgacgaggcaacgagcaacattgatattgagagcgaagccgtcattatggagaatatccgtgagttgtctaagaccaaaagcgtcatcgtgatctctcaccggctggccaatgtggtcccggcggatcttatttattatatggagtcgggccgtctggtcgaaagcggcacgcacgccgcgcttatggcgcaaagcggcggatatgcccggctctacaccacacagaaaaatcttgaggaaggctatgcagaggtgttgaaatgaaacaggattccaagcttcgccgaagcggcgccgtgattatggcgaaccttattttgcttttgggcagccttgcctacattatgcttttggcggtcataaacggctccgttggctttctctgcgccatgggcgtaacgctgtgcggtgcggtcggcgttgccaaagccttgggtgaaagcatctctctgtcctatggcacaatcattgcccttgccatctgctgcggcgttttgcgcggtattctgcgcttttttgagcagtacagcaaccactacattgcattccggctgctggcagtgctgcgcgacaaaatcttcggcgcactgcgcgcgctctgccctgcaaagctggagagcaagcaaaagggcgctatcatcgccatgattacctccgacattgaaacgctggaggtattctacgcccacaccatctcccccgtctgcattgccgtcctcgtgtccacctgtgttttctgctttgtgggcgcagtctcctcgtgggcgatcgctctggtcgcaatgttgggctatcttaccatcggtatcgttgtccctgtcatcgcatcgggccgcttaaaagcctccggcgtgcgataccgtgcggaatttgcaggcttcaactccttttttctggacagcattaaaggcatcaaggacatcgtgctcaataacgccggtcagcagcgggaaacggaggtcaacgcgcgttctgaggcacttcttaccgagaccaaaaagatgaagcacgacatcacaaaaactaccgccgcgactgaactctgcgtgtctgtttttattctggcaacgcttgcagtctgcatccttcttgtggcaaacgggcgtctttcggccgggcgcatgatcattggcgttgtcggcgtgtttggctcattcggtccggtcattgcgatctctgcgttgcccggcaacctgacccagacctttgcctcgggtgaccgtgtgctgaaccttttggcagaaaaacccgcggtaacacccgtaaccaacggcaggcggaccgattttgaaagccttgccgtaaacaacctttccttctcctacaatgaaaacgccgaggttttgcaggatattacgatgcacgccgagaagggcgagatcatcggcattgtcggtgaatccggctgcggaaaatcgaccttcctcaaattgctgctgcggttctggcaaaaagacagcggtgaaatcaaatttggcggcgttgatgttgacagcatcaacaccgacgagcttttgaaaaatgtaacgatggtcagccagacaacctacctgtttgacgaaaccattgaggacaatctgcgcatcgccaagcctgacgccacgcaggaggaaatcgaggcggcctgccggatggcctcggtgcatgagttcatactctctctgcccgatggctacgagacgcgggtcggggcgctgggcgataatctgtctgccggcgaaaagcagcgtatcggcttggcgagagccttcctgcggggaagtgaatggatcctgctcgatgagccgaccagcaatgtggacagcatcaacgagggtatcattctgaaggccctgcaggagcagaagcgcaaaaagagcattttgcttgtgtcgcaccgcgaatccaccatggccattgccgaccgcatttaccgcgtaaaggacggcagaatggccgaaatttgatgaggaagctatgaatcaaaacaacatcgccgccaagcgcgagcaggaaaaacgcatcgtttcactgatgatacgcacctactgcagggggcaccacggcacaaggcaggggctttgcccggaatgtcaggccctgcaagagtatgcgctgctgcgcgccgaccgctgcccgtttatcgaaacaaagaccttttgctccaactgccgggtgcattgctacaagcccgctatgcgggaaaaaatccgtgctgttatgcggtattccggaccgcgtatgctgttcagccatccggtactggtcgttcggcacggtatagaaactattcgtgaaaagaaacgcttggagaaagaaaatcatgaagattaaaaagatcgtatggctgctgctcggtttggtcgggctggggcttggcgcactgggtgcagtgctgcctcttctgccgtctgtgccgtttttgatgctggcgctgttcagctttggtaaaagttccgaaaaactgcacagctggtttaccggcacaaagctctacaagaataatctagaatcctttgtacaagggcagggcatgacgcggcgcgcaaagctgaaaatcatcggcacggtcacgcttttgatggcgttcggcttttgtatgatgctgcgcgcggggcttgttctcccctgctgcattctggccggcatctggctggcacatattttgtattttgtgttcggcgtgaaaaaatacaaccctgagcaagaatcctgacaaaagactgccttgccgcatttgacggcaaggcagtttttgttacataatttcgagcatcgcctgcacacacgcagggtcaaaccgtgtgccgctctggtcactcagctggcgacgaacccctt

SEQ ID NO: 14114 - DNA, 29044 bp, Unknown
  gut microbiota DNA sequence
atgaacaacctgaaaagaggagcatcacttcccggtgacgctcctctttgtttttacatactatggcttgcggttactccaaattcccggtcagcagcatggcagcggtcagggcggccagcggcgcggtctcacagcgcaggatgcgcgggccaaggcccaccgtcacggcacctgcggccttggcggcagcggcctcctcgaccgaaaagccgccctcactgccggtgacgatggcgatgcgcttatactgcccgggatgcagcacctcccgcaggggggcaccgccgccctcgtaaaagaacagcacaaggtcaaaatccttcatggcggcgcagacggcggcaaaatcgggcagcggcatggccacatggggcagcatggcgcggcccgcctgcttggcggcctcggcggcaatgcggttgtaccgctcgttcttggcgtcctcttttttgggtgcggccacacagtaacggctgaaaaacggtacgatcccggttacgcccagctcaacgctgtggcggatgacctcctcaagcttgccctgcttggggtaacccgcaaacagcgtcacggtgcagtccggctcggccttgctggtcgtgccgtcagtgaccgagaactcgacccgccccggctcgatggcggtcacggtgccgaggtattccagcccgtcagggccgcagagaacgacctcctcgccgagcttggcgcgcatgacatctgccagatggtgggcatcgctgccggtcagcgcagcgcggccgtccgccagctcacgggtaaaataacggtgcggcatcgtttacgcctctttcgtctcggattttttgcagatgatgcagacccagccgcgcttttccttgacctcgacaggcgcaagccctgcggcgcgcagaccggccagaaccttgtccttgcgctcgtcaatgatgccgctggcgataaagcgggcgtccggggccatcagcaccggcacatggggggccagagaaaggatggccgccgccacgatgtttgctgtgatgatgttgtactggccgctggccttgtcggacagatcgcctacaagcaccttgaaccggtcggccacaccgttgcgcgcggcgttctcgccggcggtgcgcacgcacatggggtcgatgtcaacgccctcagcgctgccggcgcccagcttgagcgctgcaatggccagaatccccgagccggtgccaatatccagcacccgctcgccgcccttgacaaggctgtccagcgtttcaaggcagagggaggtcgtctcatgcgtgccggttccgaacgccatgccggggtccatgatgatcttgatgcggtcggtgtcatgctcctcccacccggggacgatggcaaggcgcttgccgatgtccatggcgtggtaatatttcttccaggcgttctgccagtcctcctgctcaacgccggttgtgttgagctggtagtcgatgccgctgtttttcagccgctcctcaaacagaggcagtacctcggcggggttctcatcgggggcaaggtacatgtgtacgatgaccacatcgcggggcttatcgagcagctcctgctcgataaggtcaacatgcgcgatctcccacgcctgctgctccagatcgctgtaatcctcgatataaatgccgccgttggcgaccatcgtagcgatggcctcggccgtgtcggcgtcgcgcttggcaacggtgatgctgatgtcagtccattccatgtgagtggctccttgtttataaagtgtgtcgcaaatggcggcggtcagaggactgaccgccctacagggccgccgcatggtagggcggccagtcctctggccgccgttgggcagcacccgtgatgcgtaattttacctattataccgtattttcccccacaattcaatcacagaaaggagaaatctccatgcaaatcaagcgtctgtcccctgccggctgtgaggaactgtaccgcaccgccctgccgcgggatttccccgccgccgagtgcaagccctttgccgaggtacgccgcctactggaggcaggggtgtatgagccgctgctgctgaccgatgatgccggtgcgcggctggcctacgcatggcaggtcgtgctgccgggccagcggacggcgctgctggactattttgccgtgcggtgtgatttgcgcggcagtggtgtgggtacggcggcgctgcagctgatccgtgactactacgctctgcgggtgcaggacctgctgctggaatgcgagcaccctgccgaggcccccgaccccgccgttgcgcggcggcgcatcgggttttacctgcgggccggggcgcgcgccactgcgctggagagccgcgtgttcggcagccggtatgcggtgctttcactgccgtgcggcggcactgcgcccgatgctgtgctctgcaaagagctgcgcgcgctctacaaggtcatggtgccggagccgtattgccgcggccgggtcatattttacggcggctgagcacatactatcccccaaaaggaggaatggagtgtgaagctgaatcccaaacaatatgatgagatgatcggccgcgcctcgccgccctcccccgttgtgcgggactgcgtttgggcgttctgtgtcggcggggcgatctgcaccgtcggggaagggctgcgccagctctttctgatctggtatgacaaggcgctggcaggcacgctgacgagtattgcgctgatctttctgtcggcgctgttcacgctgcccggctggtaccagaagctggccgctaaggcgggcgcgggtacgctggtgccgatcaccgggtttgccaactcggtcgtaagcccggccatcgagttcaaggccgagggctgggtcaccggcgtgggggccaagatttttacgatcgcggggccggtcatcgcttacggcacactggcaagctttgtgtggggcgtggtctactggctgctgggaaaggtggggtgagcgatggcacgcaaaaaggacaccctgctgttcgacaccccgccggtcgtggcggcctgggccgcggcgggcggcaaaaaggagagtgaggggccgctggcctccgactttgattttctgacgcaggatgcgggcttctgtgaacagggctgtgaaaactgggagcaggccgaaagcctgctgcagcggcgggcagcggagctttgcctgcgcaaggcagatctgccgcgcaccggggttgacatcgcctttgcaggtgacctgcaggcccagtgtacagccagcaactacacgatgcgggagctgggcattccgtttgcgggggtgtacggtgcctgcagcaccatggccgaaacgctggcgcttgccgccgtgtttgcggcgggcggcatggcggagcgggcgctggcattgacgagcagccatttctgtgcggcggagcggcagttccgcacgccgcttgaatacggcgccaagcgcgcccccaccgcccagtggaccgccaccgctgccggggcctgtctggtgcgggcgcacggcaccggcgtgccggtgcgcagcgtgaccttcggccgggtgcaggactatgaagtgcatgacatcaacaatatgggggcggccatgatgccggcggcggcctcaaccctgctgcggtattttgcagccaccggcgcgcgcccgcaggactttgatgcgatctttaccggtgatctgggcgaggtcggctccgccctgctgcgggagcagatggcacgggaggggctgccgctggacaaccaccgggactgcggctgcctgctgtatgacacgcaggggcaggatgtacaggccggcggcagcggagccgggtgcagcgcggcggtgctgtgctgcaaaatcctgccgatgctggcggcagggcagctgcggcgggtgctgtttctggccaccggtgcgctgatgagccagactacctttttgcagggggagagcatccccggcattgcccactgtgttgagctgggaggtgcggtatgaattatctctgggcgtttacggtgggcggcggcatctgcgttgtggggcagctgcttattgattacacgaagctgacccctgcgcgcatcctgaccgggtatgtggtcgcgggcgtgattctgagcgccgttggcctgtacaagccgctggctgattttgcgggggcgggggccagcgtgccgctgctcggctttgggcacctgctggcgcagggggcgcagcatgcggtggacgagtgcggtctgccgggggccttcaccggcgggctgacggcagcctcgggcggtattgctgccagcctgattttcggcgtggcggccgcgcttgcaggaaaaagcagggaccagaactgaagctgccctgcaaagggcataaaaaggcgggctgcagatcgtttggatctgcagcccgccggttgctttttactggttggtgccaagcgtgacagtcagggtctgcaccttgccgttgcgctcgacctgcaggttcacggaatcaccgatggccttgtccttgaggtaattcttcagggcggaggaatcgctgacagcggtatcatccacagccagcacacggtcaccggcctgcacaccggcggcctcggcgccgctgcccttggtgacctcgaccacatagacgcccatcgtggacacacccagctgctgggcggtctgcgcatcggtcacatccataatcttgacgcccagtgcggggcgcgcgaccgagccgctctcgatcagctggcggctgatctccattgcggtgttgatggggatggcaaagccgatgccctcggcctcactgtagctgctcttggcattgacaatgccgatcagctcgccgtttgcgttgaacagaccgccgccggagttgcccgggctgatcgaggcatcggtctggatcagcgtcatatcgttgttttgtacggtaacttgacggttcagcgcgctgacgatgccgtccgtgacggtgttggacagcgtgccgagcgggttgcccaccgccacagcgacctcgccgacggccagcgcgtcactgtcaccgatgaccgccggggtcagaccggtggcgttgatcttcagcactgcgatgtcggaggcggaatcctgcccgacaacggtggcatcgtaggactcatcgctgccgttcagctggaccttaacgctggtggcaccgctgacgacatgcgcgcaggtcaggatgtagccgtcctgactgatgacgacgccggagcctgcgccgctctgcacatagtggccgccgaaccaagtctggctgctgctcatctgctcggtcgtgatggcaacgacgctgggcgaaacgacagaggcaatctgctggacgctcatgctgctgccgtctgtgctgcctgccgccgtggcatcggtgctgcgctgcacctgctggaccacgacctgattaccggtcaggccggtgcggctggcaacgatcgcgccgccgaaaccgccgccgaagcccagcgccaccgcgccgacacctgccagtacgcggagcagcaccttgcggggcttctttttctggggcacggggggctgctgcggtgcgctggaatagctgtagccgttatagccgccgttgttcccgctgccgccgctgaagctgctggtgtagccgttggggtcctgctgcgggttggggcttgcgccgctgcccgaataatcggtgcgggcggtgttggcagtgttcataccgctggagcctacattggggtagccgccctgttcaggctggctgctctggggctgtgcgggctgaccatcggatgtatggttatagagaccggagtaatcatattcattgctcataggggtcgtctcctttcgctttgtatgcctacagtatacccgctaattgtgaaataggtttcgtcagagagtgaaaagtgtgtgaaaagcggtgtagattgtgatccgtaaaaaactgccgccgccctgctgctttttacaaatcatatcgttgcgcagcgcggcaagatatggtatactcaaattacaaaccacacttagggcaataccgcataattctaatgtgcgccgaagaacggttataaatcggcggcgctgacggcgcagattgccctgcgccgccactgggatgatgtgacatactatgacctgaacacaaatacgattggcgggtaatatatatgcagatcaaacaggaaaaaggccactatactttatataaggagagcgaagccatcggtacggctgtggtggacggcgctgcgatcctgcgtctggagattgtacctgcgtggcgcgggcgcggctacggcagctatctggtaaaggagctgctgcggcgcggcggcgggctggacccgaagcaggccacacgcttcaccgctcccctgccccgggatgaggcaggccgtgcgctggcgcggcggtttgactttgtggcggagggcgggcggctggtgcgccgccgtgtgccggatctgtccgctgtggagctgtgccatgagtttctggagctgcatgtgacccccggcgggctgtatctcgatgcgacctgcggcaacggaaacgacacgctgtttttgtgccgtctggccgggcagaacggccgtgtgctggccatggacatccagcaaaaggcggtggaccgcacgaacaagcgtctggtcgatgccgggtatgagaaaatggggcgtgcggtgctctacgaccatgcgaagctgggtgagctggtgcagcccggcaaggtggattgcgtgctgttcaacttcggctggctgccgggggccgagcataccgtacattccacggcgcagggcagcctgtccgccctgcgcgccgcgctggatgccctgcgccccggcggcgtgctggcggctgtgctgtacagcggcaaggtcataggcgatgccgaaaagcaggaggcgctggcgtttttccgcagcctgccgctgacaaaatacacggtgctggtctgtgagtttgcaaactgggcggacaccgccccgctgccgtgctttgtgatcaaaaaataagagtaccccgtatccgtgtggatacggggtacttttttatgccttgactgcgggggcaccgccgcccggctgcgggatcgggcagtgcaggatgtaccacgcaaacagcaccgaggagatgctccatgtcagcgggtaggcccagaacaccacactgatggcgcggataaaatgcagtgtgatcgtgatataggtgatgcgcagcgcacaccagatcatcagcatgaccatcatcggcacgaccggccgccccagcccgcgcaggatgcctgcgcagcagtggctgaaggccagcaggcagtagaacagcgccgccgtgtgggcttgctgcacaccgaacgcgatgacatccggctcacggctgaacgcgccgatgagccatggggacagcgtgtagatgcccacgcccacgatctcagccatcagcaccgagcagagcgtgccgaacttcatccccttgcgcacacggtcgggctgaccggcgccgacattctggctgacgaaggtcgccagtgccatggaaaagcaggttacgggcagaaaagcaaagccctcgaccttgctgtaggcaccgcacccggccatggcctgggcaccgaacgagttgatgttggactgcacgatgacattggcaatcgagatgacagagttctgtatgccggacggcaggccctgcacaatgactgccttgagcgagggggcgtcaaatctgacctcgttccaatgcacggcccattcctctttgctgcgggtcagcttggcaaaggccagaatggcgctgaccgtctgggaggcaatcgtggcaaaggcagccgcacccacgcccatgcgcagccagccgaccaaaatcaggtcgagaatgacattgatgatggacgcggcaatcagataccgcatcgggcttttgctgtcaccgaccgattgcaggatgcttgcgcccacattgtacatgaccacggcgatcgagccgaagaagtacatccggaagtaggcgatcgagttggccagcacgctgtccggtgtgcccatccagcgcaggatctgcggtgtcagcactacgcccaccacggtgagcgctacaccggcggcaatgcccagtgccactgtggtgtggatggtgcggcgcatccggtcccagtccttggcaccgaaataccgcgccaccaccacaccggcacccagcgagacgccgttgacaaagcccgtcagcaaaaagatcaggctgccggacgagccgacggcggccaaggcctcgccgcccagaaagttgccgacgatcagggaatcggcggcgttatacagctgctgaaacaggttgctgataaaaatcggcagcgcaaacagcagcatacccttggcaacgctgccctgtatcagcgttgttttttgtttcgtttccatagtttgctttctctatacccatatcctgagcggcagagtgcgggtgcatatagaatgcgcccctacgggtgtgattcgtaggggcggattccatatccgcccgcaaagtgccgtatgtttacaccaatacgtccttaatcaataagctcagcccgccggtggctgaatggataaactcaacagcgtcatcactgctgcacagctctgcggggatcttgatctcgatgccggactcggtcttgaagctgcggctctccagctttttgatgcgcgccggggttacggtcacgcggtcatcctgctgcacaccggtctcggcaagggcctgctcaaaccgcggcgcggcaagcgggaaattctcccggatgcgctcccggacatcctcgacagagatccggttatccacagcctgattgcgcaccagcagctcgactgcggtctcggttccgccgtcaaagggcggtacatcgtccagctcctccggctcggggtaggcctccttcacagcggctacggctgtttcgcatacagccttgagcttcgccttctcctgcagggcctcggtgcagccgaaaacgcgggtcgaaagatagtagctctttttgtcatccatcgtgaactttttctcgatcagccgcaccgtgccgttggcgcggtcgatgagggccgcctcgtccgccttgggggtgccgggcagcagggtgcgctgcggcaccatgctgctgaaccgaccgttgcccagcagctcggtatggtgggtgtagccggggcggtagttcagcttcagcacgccgtagaacggtacgccgtcggcggtgaaatccaccacggccagatcaccggccggaatggcctgatactgcagcatctgctcaaagatgacgcccgcgatgcggcgggacaggtcgatgaaatcctgattctgcgccatctcctgcgcaaaggcggagtccggcaggaaccggcagttcttgacctcatcactggcaaaggcgcgctcaagggtggcggcataatactcgtacaggtcggcgtccatgtccatggcgcggtccgacagcaccggctccgatgcgccggggtccagcagatgcagcacgacctgattgatcttgacttccatagaaaaatagctcctcctgattggtgtacggatataaggcaataccgcataattctaagtgccgatacggcgagcgaggcacggcagctgctaagccaaaagcgcagataatactttgtgtattatcgagcattttggcaacgcagatgccgtgccgcagccgccggagcggtgcttaagccggcaggcgggaattgtgcggtgttgccataagtataccacgatttggcaggcttgggtaggggctgccggggcatactagggtcgaggtgatgaaaatggacagcaggcagacggacgagtttttgtcccgcattacgcccagccgccagaagcaggcgcgggagttccttgcggggcgcagccccggcacgatgcagcgctacgccccggaggcccgccccgatgcggagcagggctgggtggaggacgaggacaccgtgcgccgccttgcaaaatggcgggaggaagcgatctactgacgcggggcgggcgcggcctgcccccttacatccgggctgccggggcttacgcctcggcggtgcgcttgctgtttgccttgcgggtaaagcggtcgttgtccacgatgtagcgctcatgcgtggcggaggcgatctgggtcacagcatcatagacgcgggcggtgaaccgcaggcggcggtcctccacagcgatcagctcacagtcgcactgtacgatcattccgaccggggtgggggcagtgtgggctacggtcagcgcggtgccgaccgtgccctgatcaagctccagctcggaggcaaccgactgccagcaggccttttcgatcagggccgccacggcgggggtggccagcacaggcagctcgccgctgcccatggcaagggcggtgttttcggtggtgacacgcagcgctgcgtgccccttgatgccgggggtaagcataaacatttctcctgctatttgaaatttcttatctatagtaacacactttccgacaaaaagatagtaggggccgggcgtgaccgccccctgcacagcgacaaaatttttcatttttccgtcaatctcttgcactttgcgccgaattctgctatccttataaggataagtcaggaggctgtacagtttgcataaaacaagtcagtctcccttttttgcggccattgttgaggaggatatcattcatggcagaaaaaatggattactcgcagggcatctatgatgccaagcagctcggcacacccaagctgctcattctgggtgcgcagcacatgtttgcaatgttcggcgcaaccgtgctcgttcccctgctgaccggtctgagcgtcagcaccaccctgctgtgcgccggtctgggcacgctgctgttccacttcctgtgcaagggcaaggttccggcattccttggctccagctttgcctatctgggcggctttgccatcgtttccaacaacggtgagaaccccgagaacctgccctacgcctgcgcagctgtggcattgtccggccttgtgtatgtgctgttcagcgcgctgatctccgcgttcggcatccgcaagatgatgaagttcttccccccggtcgtcaccggtcctatcatcattgccatcggtctgatccttgcccccagcgccatcagcaactgccagagcaactggctgctggccattgtggcactggccaccgttgtcatttgcaacatctggggcaagggcatggtcaaaattctgcccatcctgatcggtgttctggtttcctacgccgtggcgctggtcaccggcgcagttgacttccaggccatcggcgctgccgcctggttcggcatccccctgcataaggattccatgggtctgttcgccattgacggcagcgagaccttcatcagcgccgtgttcactattgtgcctatcgcgctggctaccatgatggagcatatcggcgacattgccgccatcagcgccaccaccggcaaaaactacatccgtgaccccggtctgaacaagactctgctgggcgatggtcttgccaccgccatggccggcctgctgggcggccccgccaacaccacctacggcgagaacaccggcgttctggccctgaccaagatctacgacccgctggtcatccgcattgctgctgtgtttgccgttgtgctgagcttcagccccaagtttgaggccgtcatcaacaccattcccaccggcatcgtgggcggcatcagctttgtgctgtacggcatgatctccgccatcggcgtgcgcaatgttgttgagaacaaggttgatttcaccaactcccgcaacctgatcattgccgccgtcattctggtcagtgctctgggcttcaactcggtgggcggcatcagcttcggtctgggcaatgtcaccatcaacctgtccggtctggccatcgcggccatcgccggcatcctgctgaacgccatcctgcccggtaacgactatgagttcgacgagggcagcaacgagccggagagcgccagcctgcgcgtttgatttgcatttacgcgaaccccctgtaggggcggatgcttgcatccgcccgcgggtcgatgcgagcatcgacccctacaatcacccgagaggtaacaacttatgactgcttccgatttcaccaacctgcatctgcaatacaaatccgctcaggctgacggcgaggtccctgcagtcatcgagcatgacttcccgggtgggcggatggtcgaccactactttgtcaccccttcccctgccttctgggccgatgagggcgtgaaaagtctggacagcgtttccggcatcctgtttttgcagcagcccgatggtgcgccgtggaggatactcgtccacgaacagagcatgatcaaagaggttgtctttgacttccccgaggaggagttccgcaaaatgctggccgacagtagtgtcatcctgcccggtgagccgggctttgcccccatcaccgattgagattttccccggatgtgagaattttcacatccggggaatttttttgtgtttttctattgacaaagtacccgtcaggctgtatcatatgaacaaacgaacatatgaaaggacgatagcagtgtccgaaaacgaaaaaacaggcgaaaagctacctgaaaccgcccagttgggtgaggccgacatccgccgcctgcaggatgacctgcccaatgacgaagtgctgtacgatctggccgagttgttccgcgtgttcggcgattcgacccgcatcaaaattttgtatgcgctgtttgaaagtgagctttgcgtcaacgatattgctcaggtggtaggcatctcgcaaagtgcggtcagccaccagctgcgggtgctgaaaaccagcaagctcgtcaagttccgccgcgagggcaaggcgatgtactattccctcgatgatgaccatgtgcgcagcatgattgcgcttggcatggagcatacggaggagtaaaaagccttcccctagggggaaggtggccgaaggccggatgaggggcggcgtttcggcagtgacccgccaacgggcaataacggcaagtttgcccctcatcagtccgctttgcggacagcttccccctcaggggaagccttttaatccagttacccatattaaaaaatacttatttatacaaaggagaccaccaccatgcagaagaaattcaagatcgaagtcgattgcgccaactgcgctgccaagatcgagaccgccgtcaaggcactgcccggcgtcaagaacgcaagcgtcagctttatggcccagaaaatgctgctggaggctgacgatgacaagtttgatgccgtcctgaaggacgccgtcaaggcggcgaagaaggtcgagcctgatttcgagatcgagctgtaaggcaagggcggcccatccacggcggtgggccgccttttgccccggattgggaggaagctactcatgacgaagaaacagaaaaaaacgctcaagcgcatccttgcggcattggtgctgacggtgctgctggcggtggtgttccattttaccgcactgccgtggtttgtgcagctggcgctgtggctggtgccctatttcatcattggccatgatgtgctgcgcaaggcctttatgggcattaagagcggtgaggtctttgacgagaatttcctgatggcggtcgccacagtgggcgccatgggctgcggtgagtacgccgagggcgtggccgttatgctgttctaccagatcggggagctgttccagtcctatgcggtcggcaagagccggtcgagcatctcggcgctgatggacatccggcccgacagtgcaaatctcgaggctgcggacggcggcgtctcggtcgttgacccggatgatgtggccatcggctctacgatcgttgtaaagcccggcgagaagatcccgctggacggcgtggtactgaccggtgagtctacgctgaacaccgccgccctgaccggcgaaagccgcccgcgcaccgtgtgccccggcgatgaggtcatcagcggctgcgtcaacgccgatgccgtgctgcgcatccgcacgacaaagctctacggtgagtccacggtggcaaagatccttgaccttgtggaaaactccagcctgaaaaaggctcctgtcgaaaatttcatcacgaagtttgcccgctactacacccccgctgtctgcattgccgcgctggtgctggccgttgtgccgccgctgttccttggcggctggctcgactggatcatgcgcgcactgaccttccttgttatcagctgcccctgcgcgctggtcatctcgatcccgctgaccttcttcggcggtatcggcggcgcgtccaagtgcggtattctggtcaagggcggcaactatctggaggcgctgtccaagaccggcattgccgtgtttgacaagaccggcaccctgacgaagggcgttttcaaggtcacccataccaccccggccgagggcgtgaccgaggcggagctgctggagagcgccgctctggcggaaagcttctcaagccatcccatcagcaagagcctgcgcgaggcctgcccggggctggacgcccgccgcgcctccgacgcacaggagattgcaggccacggcgtaaaaacgcaggtggacggtcataccgtgctggccggcaatgcccgcctgatggaaagcgaaaaaatcccctacaccgccgccgagggcgcgggtacggtcgtttatgtggcgcgtgacggcagctttttgggctcggtcctgatctctgacgaggagaagcccactgccgggaccgccatgcagggccttcaggcgcagggcgtgcgcaccgtcatgctgaccggtgatgcccccgctgtggccgagctggtggccaaggatctgggcattgacgaggtccatgcgggcctgctacccgccgataaggtcgagtgggtcgagaagttgctgagccagaagcctgagaaaaaagagctggcctttgtgggtgacggcatcaacgatgcaccggtgctgatgcgcgctgacatcggcattgcgatgggcgcgctgggcagcgatgccgccatcgaggccgccgacattgtgctgatggacgatgatccggcaaagatcagccttgcgatgcgcatctcccgcaagtgcatgagcattgcctaccagaacatcgtctttgcgctggcggtcaaggcgctgtgcctgattctgacggcgctgggcatcacaaacatgtggtggggcgtctttgcagacgtaggcgtcatggtgctggccgtgctgaacgcgacccggatgctgcatgtgaagcagtaccagtaaaaattgcataaaaaaaggcgtgtgcccgtgggtgggtacacgccttttttggttccgggctgcgggggacggaaaaagcccctcaggcctcgcaggctcggccagctccccgcacagcggggcgccttttttgcgcgggctttgcccgcgtgaaagcctccccacttgtggggaggtggccgagcgtcagcaaggccggaagggcttttggcgtctgccgttacagcagcccctccgggtcgaggtacgcgccgtccttgatgcactcaaggtgcaggtggttctctccgctcgtctcggcggggatggcacctgccttgcccagtgtggtggtggttgtcacgctgtcccctgctttgacggcgggggaaatcaggccgcaatagcgccatgtgatgccgttggcgtcctcgacctccaccacattgccccacagcgcatcctcggtcacggatgtgaccttgccgcctttggcggggcatacgctctggccggcgggggcggcgtaatctgcgccgttgtgggtgcgccagtcacccagagtctcgctgtagaccagctcattgccgctgaacgccgcctgcggtttggcatcccagatccccggtctggcggcgggcggtgcatcggctgccggggcctgtgcggcctcgggcgcggcggtggctgcgggcttttcggttgcggccggcgtctgggtgggctttggtacatcctcggcaggcttgtcgatggcggcgtccggctgtgtccagacggaatcgtcctgcagggcctctttgcggatgcgcgtcaggtcggcaacattgcctacgatgctgcgcagtgccagaatccccgccgctgtggccgcaaacaccatggccagacagaacagatacagccctttttccttgaaaaactgtttgatatggttcatgctccccgtccctttcggttgaaatgtgtatgccgttagtttggacgggggtcgcttatttattcactgtcagcggtattttggcgcagcagatccagcagctccatcacatgcatcgtgcgcagacgggcagccgtctcggcggcagtgtcgtgtgcggcaatgatgcgggcaaactcggcgaactcataggccatgcggtggcggggcgcggcggggccgtccgtgcgcacacagtcgtcccgctgggcgcccagcaggctgtaaacagcgggcagagagttggggctgccgtccaccacaagctgcccgccggggccctgcagcaccatgccgttctggctgttggaatccttggcggccagcgcggtggcggtaaagcggccgtaatcaagcagcgccagcccggcaacatcaatgccgttctccccgcgcacagggcggtactctgcggccttgggcatacccagcagcccgacaagcagatgcaggcagtagacattcatgtcccccagcgcaccgccctgacaggccgggtcgaacacagggtggacaatgccacggcagtaatcatcgtacagacggctgtgagagcagaacaccgccgaggccgcgctgatcggcccgagctttgccgtctgctgctgcaggaaggcaaactgcggcatataagggatcgtgatggcctcaagcagcacaaggcccttggcatcggcgagggcgaacagctcccgcgcctcggcagcggtggagacaaagggcttttcaaggatgacatggtatcctgcgttcagcgcccgcttggcggcggcatagtgcaggtggttggcagtgccgatgtaaacggcatcgaagccaccggcggcgtagcaagcgtcctcgtcggtgtagacggccgggatgccgtactgcgcggcccaagcctcggccttggggcggctctggggacggcagcagagggcctgcaccgaaatctccggcatggcggcggcgttggcaagaaactcgtcaacaatgcggctggtggaaatgacagcgagggtgagaggcatagcgggacactccgatctttttattatagttgcaataaagataaggcaataccgcataattctaagtgccgatacggcgcgcgaggtgcggcagctgctaagccaaaagcgcagataatactttgtgtattatcgagcattttggcaacgcagatgccgtgccgcagccgccggagcggtgcttaagccgtcaggcgagaattgtgcggtgttgccatagcattccgcggcggctttgtagggcgggcagtcccctgcccgccgcacctacccccattaaaccccacacttttctctctgtcaagcaaatttttcattgcatttggcgggcaaaccgtgtatgatataatattagattattatagaggagtgtgcccccatgtaaagaatcgggacgaaattccgtacacacacaaatataaggagtcatcatggcatcattgcgcgaagaaatcgaatcccggcgcacatttgcgatcatctcgcaccccgacgccggtaaaaccacactgaccgaaaagctcctgctctacggtggggccatccagacggccggctccgtcaagggcaagcagagcgccaagcacgcggtatccgactggatggatattgagaagcagcgcggtatctcggtcacctcctctgtcctgcagttcaactatcagggcaagtgcatcaatattctggacaccccgggccaccaggactttagtgaggatacctaccgtaccctgatggcggcggactgcgccgtcatggtcattgacgccgccaagggtgttgaggcccagaccatcaagctgtttaaagtttgcacgctgcgccacatccccatcttcacctttgtcaacaagatggaccgcgaggcacgcgacccgtttgagctgatggaaaatatcgaggagatcctcggcatcaagacatacccgatgaactggcccatcagctgcggcaaggacttcaagggcgtctacgaccgcagcgccaagcgcgtgctggcgttctcgagcgatgggcgcgccaacggcgtcaagatggtcgatgaggtcgaggccgagctgggcgatgccgcgctggacgagctgatcggcacggtcaaccatgaaaagctggcagaggacattgagctgctcgacggcgctgccgaggaatttgacctcgaggccgtacagcgcggcgaattgagccccgtgttcttcggctccgccctgaccaacttcggcgttgagccgttcctgaaggaatttctgcggctgacccccgcccccctgccccgcaaggatgctgccagcggcgagctggtggacccctgcagcgagcagttcagcgggtttgtgttcaagatccaggccaacatgaacaagaaccaccgcgaccgcattgcgtttttgcgcatctgctccggcaagtttgagcgcggcatggaggctttccatctgcaggagggcaagaacatcaagcttgccaccggcaccagcctgatggccgatgaccgcgccatcgtcagcgaggcctatgcgggcgatattatcggtctgttcgacccgggcatcttctcgatcggcgacacgctctgcaccggcaaaaagcatgttcagtttgccggcatcccgacctttgcacccgagcattttgcccgcgtgacgcaggtggacacgatgaaacgcaagcagttcgtcaagggtatggagcagatcgcacaggaaggcgcaatccagatcttccgcgacctcggctccggcatggaggaggtcattgtcggcgtggtcggcgtcctgcagctggaggttctggagtaccgtttgaaaaacgagtacaatgtcgatatccgtatgcagtccctgccgtatgagcatctgcgctggatcttgaacgatcccgatgagctggacatcaagcatctggacctgaccagcgatacccgcgccatcgaggatatgaagggtaacccgctgctcctcttcggcagcccgtggagcatcaactgggccgagcagcacaatgagaccctcaagctctccgagttcggcaacctgacattctaagggagggcgtctgacttgttagcgcagctgaaaaagcacctgaccccgcgggagctgtggtccgatgtcaaatttttctttctgctgaatctcggccttgtggctacggcagtgggcattgccgtttttaaaacgcccaaccactttgcgttcggcggcacttccggtctgtcgatcgtactggcaacgctgttcccgcggtggaatgtgggcgcgttcatgtggttcatcaacgcggcgctggtcgcactgggctttgtctttctgggtgtgcggtcgatggggtggacgatctactcctcctttgcgctgtcgttctatgtcagcctgtgtgagcgcgtctacccgctgtcccgcccgctgaccgatgatgtctttctggagctttgctttgcggttattttgtcggctgtgggtgcggccatcgtctttaacatcggtgcgtccaccggcggcaccgacattgtggcgatgattttgaacaagtacaccagtatgccggtcggccgcgcgctgatggtcagcgatctcggcattgtgctggcaggtgcttatctctacggccccgccaccggcctgtactgcattttgggcatgatcctgaaaagcactgttgcagacagcgcaatcgagagcatcaacatgcgcaaggtctgcacggttgtgacctccaaccctgagcccgtgcgggacttcattgtcaatgacctgcaccgctccgccacgatggagcatgccgagggcgcgtacacccacgatgaaaaatgggtgctgaccaccgtgctgacccgcgggcaggcccagaagctgcgcctgcatgtccgcgggctggatgaccacgcctttatcacgatcgtcaacagcagtgagatcgtcggcaagggcttccggtcgatttgacaaaagggccgctccggccccgtataccctgcacccgcctgcgcggcgggtgcttttctgttgttacagagttgtaattcttttcaaattatggtatactttcctataagtatcgcaaggataccgctatggcaataccgcataattctaagtgccgatacggcgagcgaggtgcggcagctgctaagccaaaagcgcagataatactggatgtcttatcgagcattttggcaacgcagatgccgtgccggagccgccggagcggtgcttaagccgttaggcgggaattgtgcggtgttgccttatattacgattgacgatgggaacctctttttatgagaaatacaaaacatctgacctaccgggagcaccgattcctgcatggccatctgaaccgggtgcggcatatcacgcttgacccggacggccccggcgtggtgcgcatccatctggtgccctgccacaagcccgaccgtgagacaccgttcacagcaattctgaatgggcaggacattctgccgctgaatgtcagctgggcgatcctgctgaccaacctgatcgaagcactgaatccctacaccggcaaggagatacgcccgcaggactgggaggccattcaagcgcaggcggtgtctgccacccgcaaaatctaccgcaaggctgagtatgcccagatcgagggcgacctgcaggcgatgctggactgcctgtgtaccgttgcacggggcggcaccccgacgctggcgatccagcctatgcagctggcggcgtatgcgtcccgcatggtcggcccccaccgcatggatctgatggtcagctcaatggtcaaggacggcgcgtggcactgcaaccagaaatgcctgcactgctatgcggccaaccagccgctttccgccgtgccggagctggacaccgaccagtggctggcggtcattgaaaaatgccgcagcgcgggtgtcactcagctgacctttaccggcggcgagcctacgctgcgccatgatctgatcaagctggtgcaggcggcccagtggtttgtgacccggctgaacaccaacggccggatgctgaccagcatgatgtgcaaggatctgcgcgccgccagccttgatgcggtgcagatcaccttctattccgccgaggcagagatccataaccagctggtcggcgtggacggctacaatgataccctcaacggcatccacaacgcgctggccgcagacctgaatgtcagcctgaacacgccgctctgcagcctgaaccgcgactatctgtcggtcgtgaagctggcccacacgctgggcatacggtatctgacctgcagcgggcttatcccggccggcaatgccgataccgccgccagccgcgctgtgcggctgacccccgccgagctggaggaaacgctgcgccccgcgatggagtatgccgccgccaacggcatcgagatcagctttacaagccccggctggctgcccgaggatacgctgcgggcgctcggctttacccagatccccagctgcggtgcctgcctgtccaatatggccatcgccccggacggtacggtcctgccctgccagagctggctgaccggcaaggggctgggcaacctgctgcgcacaccgtggccgcgcatctggcacagtcatgagtgccgcgccatccgggaggagagcgcgaagatggcacagcgctgccagctgggcgataccccgatgcaggagggctgccgatgaagatgcaatttatgcgccgtctggcgcttttatgtgccgtgctggcctgcggcgcgctgctggccctgcccgctgcggcggcccagaccgaggccccctgcgccgaggacggcgatatggattatatccgcagctatgtcgtgacggtcgatccgcgggaggatggctctgccgacatcacctacgacatcgactggcaggtcattgacggcgataagaccgactatctgagctgggtcaagatcgggctggccaattccagcgtgaacgagatgaccccgctgactgatacgatctacgatctgcagtattccgatgacggcggcagctatgccaaggtcgtgttcacccagcgctactactcccccgctgtagcggcgcagaacggcggcgagagcagcgtccgttttgcgttccgcgtacaccagagccatctgtttacaaaaaatgatgacggcacggcaaccttcaacttcacgcccggttggttcgacgatttgagcgttgaaagcatgcaggtgcgctggcgcagctacgagggctttgtggccgataacaccggcgttgacggcgagtacctgacatgggatttcggcgcgctgaagcatggccaggccgccaatgtgcatgtgacggtccctgtgacgaacgccgccgcctttgcccccgatgccgccatgaccaccgatgactacgacagcggtatgaccaccgatgagattatcggggtgctggcaacagtaatcatcattctgctggcggcggccattatcatcattgcggtggcagcccagtcccctgactggggcggcggcttcggcagtgacatcgaccccgatgactggttctggtacaccaacggggtacacacgatccgccgaccctgtgcggcacccccgcccagcggctaccaccgcaccgacccgcctgcaaaataccagtccggcggcggccggacgcgcggcggcggcacggggcgcagccactccaaccatgcaagctgcgcaagcagctgtgcctgcgcgtgtgcttcgagctgcgcgtgtgcctgcgcctgtgcaggcggcggccgtgcgggctgcagcgtcaaggacttttacaccgttaaactcccccgcgattctgcaggggctgatgcgggcatcggcccggaaaaagaggacgaatcatgagtctggaagacagttacgatgcatgggtccgcggcctgatgggcggcggcaaatacgccgccaccccccggcagaccgctgaggccagcgaggccgtgcagcagatgcaggcccagctggatgccctgaccgccgcccaaaagcggcagaccgccgcagagagcgtgctgaccggtgtgcagaaggcgagtgccgccacggccgagagcgtgcgcaaaatgagcagtgacctgacaaaatcgctgaagcaggacggactgctcggcggcacggtggcggcacccgcccctgcatcggcagcccccgccaaggcggattttaccggcgtgaccgatacgatcagggcacaggtgctggggcaggatgcctttgtgtcggcgctggtcaaggcgttccgccgcccctttgtgctggggaccgcgcaggaggccgaccgcgcgcgcagcgtgatgctgctctgcggccccaatggcaccggccgccactatgcgctgggctgtgtggtcgaggagctggccgcccggggcattttgcgcagtgcgcgcattgaaacgctcgatctggctctctaccccggccccgcgcaggaaaagctgtttctgcaggatctgtacgcggcgctgcagtcggacgccgaggtgctggcctttgagcattatgagagctgcgccgccaactatctgaatatgctgtccacccttgcgatggacggcacactggcgctgtccagccggtatgtgctgcagcgcggcattctggtagatgtgggcacggcgttggcccccggtgccatcggggagctgcaggcaggcagcaagtattttgttttctactccaacaagggtgaggccgcgctggccgacagcttcggcgcgaagtttgtggacgccgtggcgggcgacatctgccgcacggaggtgttcacccccgacgcactggccgccgtggccgcccgggagctgaattatctggcgcagcgcacccgccggcagtgcgggctggcgctctcaatgggggcggatgtgcgcgacctgctggccgcccagtacggcaagaccagcggcatgcaggcaatgcgagactactgcgagaccgtctaccgcgccatcgccgagtatgtgctggatgccgacacgccgcctgcggacggcacccctgccctgctgagcgccgagaacggccgcctgtgcatggcggtggacggcggcgcgcccatcgacctgctggcgctgctgccccggcagtaccgcggcgatgtggatgcggtcgaagcggagctggatgccatcatcggtctggacgaaatcaagagctatgtgcgcgacattgccaaaaatgtgcaggcgcagcagcgccgcaaggcgcagggcctcaaggtggccgaggtcaacatgcacatgatctttaccggcaaccccggcaccggcaagaccacgatcgcccgtattctggcaaaatacctcaaggccatcggcgcgctgcgcggcggccagctggtcgaggtcacccgtgccgaccttgtgggccgctatgtgggccacacggcaccgctgacgaattcggtcatacagagtgcgctgggcggtgtgctgttcattgacgaggcctacgccctctaccgcggcggggaggatagcttcgggctggaggccatcgacacgctggtcaagggcatcgaggatcaccgcgatgatctggtcgtaattttggcgggctatacgaaggagatgcagctcttcctgagcgccaactccggtctggccagccgcttccccaaccagatcgagttccctgactataccggcgaggagctgtataagatcatgctctccatcgccaagggcaagggctacacgctggatgagggctgcaggctgccgctggtcacctattttgaccgcaagcaggccgaggatgccgccacgaacggcaacggccgtatggcccgcaatacgctggaaaaggccatcctcaaccagtccaagcgtctggtggcagacccggatgcaagtctggagctgctgctgcccggggattttgagttggaataagtggtgctaacggcacatgggtaaagcccctcaggcctcgcgggctcggccagctcccctgaaaggggagccttttaaagcctcccctcacaggggaggtggtcgagcgtcagcgatgaccggaggggctttgctgcttcgccgctgccacacacaaaaaatggacacctgacatttcatcaggtgtccattttattttataaaaccaattttatcgtgccgtataatccgaatccagctcgctcaaaatgcggtcgctggtctcgcgggtatcggtcatgcggactgcattgcgcagcggcagcaccgagcgcggggtgacggaaagctcgtccacaccgaatgccaggaaggtctcggtcagggcgaggtctgcgcccagctcaccgcagatgccgacccagatgccgttcttgtgcgcgttctcggtcacaaggcggatcaggcgcagcacagccgggtgatgcgggtcatagaagcggcccaaatcgttgttctggcggtcgcaggccagcgtgtactgggtcagatcgttggtgccgatgctgaagaaatcgacctccttcgccagacggtcgctgttgatggcggcggcgggcgtctcgatcatgatgccaatctggacctcctcgctgtaggggatgcccttctgcttcagctcgcgcttgacctcctcgcagagcttcttggcctcgcgcacctcccagacggaagtgaccatcgggaacatgatgcccagcttgccaaaggcggaggcgcggaagagcgcgcgcagctgggtcttgaagatctcgggccgggtcaggcagatgcgcagagcgcgcatacccatggcggggttatcctccttcggcagatcaaagtagccgatctgcttgtcagcgccgatgtccagcgtgcggatgatgacctccttgccgtccatgtcggacaggacctgcttgtaggcctcaaactgctgatcctcggtcggatagtcgctggtgttcagatagaggaactcggagcggaacaggccgatgccgccgccgtcattgacctgcacggcgtggacatcctcgggcgagccgatgttgcagtagatgcggatggtcttgccgtccttcgtcacattggcctgccccttcagcgtttccagcaggcgctggaggcgcagctgctcatcgcgctttttcatcaggcggtcgcgggtgtcgtcatcggggtcgatgacaagcgcaccggtgctgccgtccgcaatagcggcgcggccctcatactcgggcttgagcgcatcgcccatgccaacgatggcggggatacccattgtgcgggccagaatggcggtgtggctcgatccggagccgcccgccgtgataaagcccagaatcttggtcttgtcaagctggatcgtctcggacggggccagatcgtcagcgcagagcagcaccggcacatcggaagcaatgccgccctgtacgatgccgcagaggatgctcaggatgcgctggctgacatccttgacatcagcggcgcgggcctgcatgtaggcgtcatccatcgaggcgaacatctcggcaaactgctcggccgtgtcggaaacggcggcctcggcgttcatcttctggttgaggatgcggtcctcgatggcctcctcgtagtcgaggtcctcagccatcatctggtgcgtttcaaacagcatggcggcctcgtcaccggcctccctgcgggcctgctcggccagatcgcccagctgctcaacggcgccggtctgggcgcccttaaagcgatgccactcggcatcggtatcctctacggtatagcgcttgatctctgccgtggcgcggcggtaaaaatagagcgggccaacgccgacaccggcggaaacgcccttgccttgaatcgtgatcattgggggagcctcccttttcatcaaataaaaggccgcggccgccgtactgctgtggcggccgcggccgtaaaatcggaattacagatgctcgttaaagaacttctccatggcgggggcggcagtctcctcgtcagcaccctcgatctggacggtgacggtgtcgccgcacttgatgcccatgcccatcagggccatcaggcgggtggcgtcaacagacttgccgttcttgtcaacgatggtgacggtgctctggcagctcttggcctcttttgccagcatgccggcgggacgcgcatggatgccgacgggttctttgatggtataggtgaattctttcatagctttttcctcccataaatgcacggccgatagggtgcggtgcaattcaataagctgttattataataacatactaatccgtctgcgtcaacggaaaaagggccgaaaacgagctgaaactttggtcaaattgtcaagaatttttgtgcggcggtgtgcgtttcgtccatgcggcggcatatatgccctatttctgcagaaattcgcgcagcacatcctccggccggggggtgtgcagggggtagcgcgcacgcaggggcgcggcggcactgtccattatgtagggggtgccgacaaggtccagcatggctacatcgttgtaattgtcaccgaacgccatcacctcatcgtgggcaaagcccagcaccctgcagagcgattctacaccgacgcccttgtttgcggtcatggtgtcgatccagtaagggccggccactgcacagttggcctgctgccagcgcggtacaaagcggtcgacatagggtgcgaccccctcatgcagatagaccgacaccttgacgatctcctccggaatctcagacgggtcggcaatgaccctgtaccggttgccgatgaaccggatgcggtcgagcataccgaggccccgctccatcaggtaggcgcagttctggccggaaagcatgacctccccctggccgtcgctgcgctcccacaggtcgtgggcgatctcctcggccaaggcgcggggcattgggttttccgcaatgcactgctcgtccttgaacaggacgccgccgttctcgcacagaaaaacacagcagtcggccaccggctcaaacagcaggcgcaggctggtgtattgccgcccggaggccgggcagaacaggatgccgcggtcatgcagggcgcgaatctggtcgaaaatttcgccctccagctttttgcggccatattgcagcagcgtaccatctatgtcgctgcagatcattttgattgccatagtacaactcctttttttcacgcttttattgtaccacaggtggcggtgacttttcaatttcgatttctttttgtataataggtatgggggtcgatgagagcatcgacctgcgggcggatgcgagcatccgcccctacaaacgggagggaaaaatatggcatatatcaaaatcaagggctgctcccccgccgattgcggtgcggcgtttgtagcgaagaatgcgacgctggcgggctgtgtgcgccttgcaaaggagagcagcgtctggtacggtgcggtgctgcgcgctgacacgggctgcatcatcatcggcgagaataccaatgtgcaggataacgccgtgctgcacacaggccccgggctggatgtgacgataggacgcggcgtatccatcgggcacggggcaatcgtccacggctgcacagtgggcgatcactgcctgatcgggatgcacgccacgatcctgaacggtgcggtcatcggggacggctgcctgattgctgccggggcgctggtgccggagggcgcggtcatcccggcaggcagccttgtcattggggtgccgggcaaggtcgtgcgcccggtcagtgcggagcaggccgccggaatcaaagccaacgaagaagaatatttgcagctggcggaagcgcacaaaaaagccttcccctgagggggaagg

SEQ ID NO: 14115 - DNA, 7257 bp, Unknown
  gut microbiota DNA sequence
agatccagctccttggaaagggcgcgcaccttgtcaaagcggcccttatgctcctcatagtcgccgtgggagaagttgaaacgggcaacattcatgccattttccatcagctgacgcaggattcccggcttatcggtagacggacccatcgtgcagacaattttcgttttgcgcataaaacatatcctccataaacattctacatatttatatacttggcaaaccttaacatactttggcaaaccttagcggtattatactacaagtcagccaaaggaaacaagagggaaaaagttgcggacaaaaagatttaccatacatttattgctcttttacaggtggtgcgctccgcatttcgtgtttactttttggcagctttacggtataatagcaataataataactgtataacaccctacacaggagaaagattatggcaaaacgcgtatttttgatcgtactggacagctttggcgttggcgcagagccggatgcgccgcagttcggcgatgccggtacaaacacgctggccgccatcgccggtcatcccaatttcaagggggaaaatctggcaaagcttggccttttcaatctggacggtgtgacctgcggcaagccggaggcagcgcccgttgccagctttgcccgcctgcgcgaggcaagtgccggcaaggatacgaccatcggccattgggagatcgcgggtctgctcagcgctgagccgctgcccaccttcccggacggcttcccgcaggaattgcttgatgcattcacggccaaaaccgggtatcaggtcctctgcaacaagccctattccggcaccgatgtcatccgcgattacggcgaggagcatctccggaccggtgcgctcatcgtttacacctcggccgacagcgtgttccagatcgctgcgaacgaagcccttgtccctgtggaaaagctctatgagatctgtgccgaggcgcgggagctgctcaccgggaagtacggcgtcggccgtgtcattgcccgaccgtttgtgggggactgcgccgccaactttacccgcacgccgcgccgccatgactacagtctggtgccgccgcgcgatacaatgctggacgcgatccttgctgcaggaaagcagaccatcggtgtgggtaagatccacgacatttttgcaggcaagggcgttggggaaaccatccgcacctccggcaatactgaggggcttcgtgtgacgctggagctggccgaccgcgattttgaggggcttgccttcgtcaacctcgttgactttgacatgctgtacggccaccgccgtgacattgccggctatgccgctgccgctgcggagttcaatgactggctgccgtcctttatggacaaaatgcgccccggcgatgtgcttatggtcaccgccgaccatggctgcgaccccagctacaccaagaccaccgaccacacccgtgagcatgtgccgttccttgtgtatggcgatgagattcgtcccggtgtgaacctgcatacacgctacagctttgcgaccattgccgacacggtctgcaaggcgctgggcgttgcgtactgcccggcgggctgcggcgtctatgatgaaattgcgaagtaacgtgggcgtactgcttcttgacctgctggcggcggcgctggtgctttactccgtctcgctggtattcctttccaacttcaacatgggcaaccttatggtctggctgctcaccggctgcgttaccggctacgctgtctttcgcaaacccgtcaatgcgtggttttccgcaggtatcgggcgtgttgtttttggggtgctggcggtcttggtctgcctttatctggccgtcattgcctttgttgctgtcagcgggtatcttcacccgcccacagggaacgagcaggtcgtgatcgtgctgggggcgggcctgcacagggacaagcccagcaagctgctgcaataccgccttgacaaggcctatgcgttcgccgccgcccaccccgacacgctggtcgtcaccagcggcgggcagggccgtgatgaatggctccctgaaggcgatgccatgcgggactatctgattgcaaagggcttgccgcccgagcgggttctgtcggagaaccgctctacctccacggaggagaacttcgccttttcgctggcgctgctgcagtcgcggggcttttctcaggcaacgcccatcgtctatgtctccaatgaattccactgctaccgcgctgggcggtatgctgcaagggcgggctttaccaatgtgtctgcgctcgccgctgcaacaccgctgcgcagtgtgctgccctgctatatgcgggaggcactggcactgctttattactgggtattcaaaacctcatcctccgggccgatgcatgcaatggtcggtctgctggatctgaataagaaattcttttacaaataggaggggactgccatgcagatccgctattacaaagagtacagccgttttctgaaccgatttatggagttcaaggtctacggccacgccggacggcccatcgtgattttcccgtgccagagcggccgcttctttgactgggaggaccgcaacatgtgcaacgccgctgcccgctgggtggatgacggccggctgcagatcttcacagtggacagcatcgaccccgagagctgggacaacaacggccccgagcgcccgcgtatcgagatgcaggagcgctggtacaattatatctgcgaggaatttgtaccccgtctgcttgagatcaaccgcgagcagggcaatgaccacaccggcaagatcctgaccggcggtgccagcatgggcggcggccacgccgtcaactttttcctgcgccgcccggacatcttcaacggtacgatcgccctcagcggactgtattcctccggcatgttcttcggcggatatatggacgatctcgtctaccgcaattccccctgcgattacatgcgcaatttccccacgacccacccttacatgaagctgtttgaaaaggccgataagttcatcatgtgctgcggtcagggggcgtgggagggggacctgctggcctccacccgagagctgcaggccattctcgagagcaagggtatccatcctatcgtagacatctggggcgcggatgtttcccacgactggtactggtgggagaagcaatgggtctacttcctgcaaatgacgctggatgacaagaagtaaggatttgcgtatggatttctggcacgatgcagccgcgcaaaagcgctggctgcgccgtttcgcgctgttgaccggcctgctgctggtgccggtgtttgtactggctgtctttgcccgcccctcggcggatgattatatctacgcagcccgcacccatgcggtcatacaacagtacggcttcgatttgccgcggctgctcaaggccgcgtgggacaccaatgtctactactatcagaactggcaggggctgtatgtctccggctttacgctggcatttcagcctgctatcttcggcaaccggttttacggcgtcacactgctctgtgtgctgctgccgctctttttctgcctgtacgggctggcgcgctgtgtagtgctgcgcttatctgcggcacaaaagcggctgccctgggcgctggcactgctgctgacctttgcttttatcgagggaatgcccgccccggtcgaggggctgtactggttcaacggcgcgatgaactacctgccatatttctcgcttgcggtgctgaacgcgggccttgcctttgcgctctgctttgctgcgcagcttacgctgcggcgcaaggtgctgtacgcagccgcaggctgtttgtgcagtctggtcatcggcggcggccatcaggtagcagggcttttgaatcttcttttgctgctgctcgcggcagtgctctgcgcacggcggcgtaacttctggcagctacccgcctttgcggcggcaatccttgggctgctgttcaatgtgctggcccccggcacgcgggtgcgcacagcaggcttttccggtgcaggcttcgccgaggctgtcatcaaaagctttatcctagccgcgatggagtggattcgctggctggatgtaccgctgctttgcctgctggcgctgctggccctgccgctgctccaccttgcccgcagtgccgctctgccggaccgtgtgttccgtcatccgttttttggcgcggcagccacctttgtgctgatgtggggcatgatcttcctgccgtcctacacaatgggcggcatcggcgcaggacggcttttgaatgtcgtctggatgacctttgtgctggggctggctgctacagagtttcttctgctcggctggcttgagcgtgtgcgtggtctctccctgcatagtgcagagcagttttgtaaacaccatgcccggcgtctgccgcaggcgactgccgttctgctggtctgcatggcctgcatcggcagccacaccgttaaggaggggcaggacaaccactttgccaccagcttggaggctgcctatgagctggcagacggacaggccgcacgctacgccgcggcactggatgcgcgggaggcggttctgaccgatgccgcccagcgggatgtaacgatccgcccgctgaacggcgaggaacgcccttggctcctgttctacaccgatgtggcgcccgggccggacatgtggggcctgacgccctattttgacaagcagtccgtcacgattgctgagccgaactgaaaattttccctgccttgtgcagggggtttgcgtggtgtcaattcctattgacaaagtaggaaactgcggtatactattccggaatactatcgtaaaagagggcacacgccatgatctaccttgattataccgccaacaccccgccggacccggccgttctggacgcctttgtcgcggcggagcagcgctgcattgccaaccccaactccacccatatcgccgggcagcaggcacgggctgagatggaccgtgtgacgagctccattgcgcagcacctcggcgtgcagccggccgagatcatctacacctccggcgcaagcgaggccaacaaccttgctgtcaagggcattgcacaggccgcacggcatatcggtaagcacatcatctccaccgagctggagcattcctcagtgggggcgtcattatccgtcctgcagcagcagggctatgagatcgacctgctgcgcatcggtcgtgacggcagggtagaccttgaccagctgcgggagctgctgcgcgaggatacgattctggtagcggtctgcgccgtggacagtgaactgggcaccgtgcagcccattcgggaaattgcggagcttgtcaaattgtaccccggctgccgcctgcatgtggacgcaacacaggccgttggtaaaacagacctctggctggacggcgtggacaccatgagctttacggcccataaattttacggcctcaacggcatcggcgcgctgtataagcggcgcgggctggtgatcacaccgcagatttccggcggggccagcactacgatctaccgcagcggcaccccaacgcttgggctggcggtcagtctggatgcggcactgacccgtgcgctggatgcacaggcggcgcgcactgcgcaggtgcggctgctgcatgaccgccttgtggcagcgctgcggcgctacagccttgtgcgcatcaacagccccgaaactgcagtaccgcacatcgtcaatgtcagcgtaaccggcatcaagggcacacggttccagcaggctctcagcgagcagggggtctgtgtttcggtcaaatcggcctgttcctcggacgggatgccgtccaaggccgtgtttgccgtcagccgcgaccgccgcaatgcactgtccagctggcgcatcagtttaagccacctgacgaccgaggaagaaatcgaaggctttctgcaggccttcgatacctgctacaaaaccctgacaaacaaggagaattgaccgttggaacgccaattagaagcatatcaaaaaatcgagcgcagcatcatcaaaaaatttcgcaagcagttgtggacaccctttatcgtggccgtcaagcggtatgaactgattcaggcgggggacaagatcgccgtctgtatttccggcggtaaggattctatggtcatggccaagcttttgcaggagctgcagcgccacagcgaggtcccgtttgaactggtctttctcgtcatggaccccggctataacgaaatcaaccgccaaaagatcgagagcaacgccgcactgctgcatattcccatcacggtctttgaaacaaacatctttgatgtggctaacagcagtgataaatccccctgctacctttgtgcccggatgcgccgcggtcatctttacaaaaaagcacagcagcttggctgcaacaaaatcgcgctcggccatcatttcaatgatgttatcgagacaaccgtcatgagcatgttctacggctcgcaactgcaggccatgccgcccaagctgcacagcacaaattttccgggtatggcgctgatccgcccgctctactgcatccgtgaggaggacatcattgcatggcggcggtacaatgaccttgaatttatccagtgcgcctgccgctttaccgaggcctgcaccatctgcgacaacgggggcggcggctccaagcggcaggagatcaaggttctgctgcgccgcctgatgcgcgacaatccgaatatcgagaacagcatcttccgcagcatccacgccgttgcgctggacacaatgcccggctacaagaccgagggggaggagcattccttcttagagcggtttgaccgtatcgaggagcagctgaaaaataaccaagaatgatttgactgctatatacagggggaacctatgaaacggatcctttgcgccgctgcaatactgctgctggcaggctgcgcgtcaaggccggctgatgtgatcggcacacctgcgccgccgcctatgcccgcccagacaccggaagcagcaccgacctgccagcccggccaaacagccgaaaccgcagccggtgaatatacggccattcagctgcagcagcaggatacccgaagcggccagctgctggcgcaggacgggcttgccacagacggctactatacgatgtgcatggacggaaaatggggcctgatgaaaagtgacggcaccgtcctgctgccctgtatctccgaccggccgatcgaacgctgcgccaacggctgtctgcgctggcattttctcagcatatcggccccgatggatgatg

SEQ ID NO: 14116 - DNA, 328 bp, Unknown
  gut microbiota DNA sequence
aaaaatatcatcggtctttggctgattcaggaaagccgccgtgagtacaagcgccgtggacaggcatattctttcgcggaactggagcaacaggcacttgccgccgaaccgctgcgcagttttattgacccggatgccccggaatttgttgcccccggcgacctgccgggcagaatacaggaattttgccgcaaaaccggccagcccatcccggaaacggtgggaaccgtaatgcgctgcatttatgagagccttgctctgaaatatcgctatgcgatagagcagctctccgctgtaacaggccggacttttacgaccctgcatgttt

SEQ ID NO: 14117 - DNA, 4495 bp, Unknown
  gut microbiota DNA sequence
ctacagtttacaagccaatccagattgtcaaccgcaaaggcttcaacctgcctgtcaccggcggcttcggcacgctgctgttcagcggtattggtgtgctgctggtgctggctggcgtgagcgtgctgttcagcctgaaaaagaagaacaaccgtgcgtaagccgcacaatcctaaagccaaaagcaaaatagaggggtaatccataggggaagggccggaaacggtacttcccctatgggtggttgtggacattgccgatacccgcgcggggagaggcggctaagaatagtgcagggattttcggcagtgccctgcggagcgtcggggacgccgcccctgcgactgaaggggtatctgccgcgcagaacctgcgcatttacgcgaaaaagctacccccaaaaccattacagaaaggctctttcctatggataccactgtcaaattaaagcttggctttgcggcgctgatgatcgcttcgggcatcggcgtggccatataccccgtcatcagcaatgcggtggcgcagcgtcacgcaagctcggtcattgaaagctacaacgataccgtgcagtcgatggataccgagaagattgacaccgccaaggaggccgcgcgccgctacaatgaacagcttagcaacgccattgaccgtgacgctgcgggcgaggccgccgacaccggcacaagctatgtggacatgttggatgtgggcgagagtctgggctacattacgatcccgaagattgatgtcaatctgccgatttatgagggcaccagtgatgatgtgctgctcaagggtgttgggcatctggaggggtccagctatccgctgggcggcgcgagcacgcacagcgtgctgaccggccaccgcggtctggccgaggcggtgctttttaccgatctggacaagctgggcgagggcgaccacttttatctgcacattatggacgaggtgctggcctatcaggtcgatcaggtcaaggtggtggagccggaacgcaccgaggatctggaaattatccccggcggggactactgcacgctggttacctgcacgccctacgccatcaacacccaccgtatgcttgtgcgcggcacccgcgtgccgtataatggagaggacgaggagaccgccacgccgcagaccgtgcagtatcaggaactgcacaccggcaatgttgtgaagcgtatggtggacgcatggccgtggatcagcgtgacgggcagccttgtcatcggcggtgaggcgctgcttttgctgctgctgttgcaccgctgcaaaaagcgcgaggaggaagactgatgaaacgcctgtttttgcagatttttgcatggctggcgatactgctgggcgttgggcttatgctgcagcccacggtcagccagtatctggcggcgcggcaaagtacaaaaaccgtacaaaaatttgtgcaggctgccgaagctgccgcccccgccgtggctgaaaccacagacaacgccgagcctgcccgcgcttactccgagctgtacgatgccctgcaagcctacaatgcgcagatttttgccgagggacaaagcggcttgaaggacccctttgcctacgagacgcccgcctttgacctgaccggctacggcctgcccgatgatatgatcgccgcgctgtggataccgcgcctgaagctggagcttcctgtctaccttggcgccagtacggccaacatggcccgcggcggcgcgctgctggggcagacctcgatgccgctgggcggcacgaacaccaacaccgtgattgccgcccaccgcggctactacggcgcggagatgctgcgcaatgtgcagcagatacaacccggcgataaaatcacaatgacaacgccgtgggatacgctggtctaccgcgtgtgtgagctgaaaattatacagccggacgatataaacgcggtgctgatacagccggggcgcgacctgctgaccctgacgacctgccacccctacacccaaaatacccaacggtatctcgtgattgccgagcgcgaccccgatgccgcacccgcgacccacgcggaggatctgaccgagtgtgacgcgacatgggacgccgcgccgcgccaggtgaccgtggaaaccgacggcacgaccgcgctggaggaggttgcgcccgaaagcatcagccccctgcccaacgagggcggcagcgaggatgcgggcggcgcgtactccaactggatgatttggctggaaaacaacgccctgtgggcaggaatcgtgctgattgccgccgtcatcggctgtatgctgatctggcgcggccacagaaaggattgacccatgcagaatttcaacgaaaaagcgctggctgtgacagccgaggtgagcaaggctgtgctgggcaagcccgaggccgtgctgaaaatcatgatggcgatgctggcccgcggtcatgtgctgatcgaggatattcccggcgtgggcaaaaccacgctggcacaggcgtttgcccgcgccatggacctgacccagaaccgcgtgcagtttacaccggatgttctgccgtccgatattgtggggttttcgctctatcaaaaggaaaccggcaagtttgtctatcaccccggcgcggtcgcgtgcaacctgtttctggctgatgagatcaaccgtaccagcgcccgcacccagtccgcgctgctggaggtcatggaggagggcgccgtcacggtggacggtgtaacgcgcgcgctgccccagccgttcacggtcatggctacggaaaaccctgtcggctcggtcggcacgcagatgctgccggagtctcagctggaccgttttatggtctgtgtggtcatgggctaccctgacgctgaggcggaaatggaaattctggcccgccagccgcgccatgccctgctggaccgtgtgcagcccgtgatagacaaaagcgaactgctggccatgcagcagcaggtggatgaagtgtttatgagtgacgagattcggcggtatatcgtggagctctcccgcgcaacgcggcaggacggccgccttgcgctggggctgtcgccccgtgcatcgctggctgtggccggtatggcgcgcgcggcggcttttctgagcgggcgcaattatgtggccccgcaggatgtgaccgcgatttttgccgatgtgacccaccaccgtctgcgcctgaacgagcaggcgcgcaccggcggtgagacggtggagaacattattgcggatgttttgcacaccacgccgcgcccccgcccggagaagccgacccatggcaggtaaggttggctgctggctgctgctggctgtgctgtttgccgtggccgcagtcagccgtgcgccgtttgcggtgtttctgctggcatgggcggtgctggtggtggtgtttctggcatggtatgcccgcacactgcgccggcgtgtgacggcagcgctgcaattgcccgcccgccctgtgcgccccggcgaggagtttgccgtgctggtgcagctgcacaacgccgggcggcggcctgtgccggagctgcgtgtcgttttgcaggcagtggacgccgagagcggtacggcgattgaattgccctgcggtgccatgctggccacgggtcagtgtgccgacctgcgcgtaacgctgcgcgccgccaaaagcggcctgtggcggttccgcgtgcgggaaatcacggtgcgcgacccgctgggcctgtttgcagtgccctgcgccgtgccgccccaaagccgggagctgtgtgtaatgccgcccgccgagggtgaggacgatggtgcgggcacaaagccgcaaaataaggtggagaaggtgaccgccgcaggccacgacatggctgacggcgtttacgacctacggccctaccgtgcgggggattcactgaagcagatccactggaaactgaccgcccgcgtgggtgagctgaccgtgcgcgagccgctgggtgcaacctattgcacagacccggccggggcaatcatggcagagggagccgatgcgccacagcaggtgctgcactttggtcaggctgccgtaaaacggctgcgcaccatgacccgccgccggaccgccgacccggacacggggctggtgttcattgaccgtgtgctgctgccccgcaccggggccgcggcgcgccctgcgttggaaacggcagtggatttgctgattctggaattgctggcgctggggttgctgacggctttgaacggcgcatttgcgctggcactacccgtttgggtatggctgggtacggcggcgctgtgcccggtgtggctggcgctgcactgcgccccgctgcccaacgctgcccgccgtggtatgacgctggcgctggccgtggggtatctggtgctgctgtttgtggtgcagtggacatttctggccggtgcgcagcagtgcgcggatgccgtaaggctgtgcctgaatacacgattcaacgcaagctttgcggtgactgcctcaccgatcccggctcagatggggctgtttgtgctgctggctg

SEQ ID NO: 14118 - DNA, 2994 bp, Unknown
  gut microbiota DNA sequence
gccgcagtaacagcctggcacgccgatgcactgctgctggggctggcgctgctgccggtcgtggtgcttacgctgctggccgggacaggcagcgccgctttgggctggctgctgcttctgcccggctggttggggtcctgcgcagcggcgcggtcggtgcagcgaaagcggctgtggggcggcaaggattccgccgcctacgctgccaacctgcagacccaccgcacaaaccaaaaattggctgctgccggtatggcagtggcctgcaccgtgttgtttttgcccgcattggtgctgcgcccggtgcttacgctgccgctgaacgcgctgcagccggtgaccgacaaggcccgggcagcggtgctgagtgccgcaatcgagtggctgccgaaaatcagcggcggcgcattgaatttccatgtcagcgcggcggcgggcggcgttgaggacggcagcctgacccaaggtgacggccttgcactgaccgggctggaggatttgatggtcacggccagcgccaagccggaggagaccgtctatctgcgtggttttattggtgcggactatgatggaacaagctggcgggcgggtgacgctgcggcttttgacagtgcagcatccaactggaagaccgacggcaacggtcggctggccatagccaacctgccgtttttgcgcgccgcctacagtggcactgagccacggcaaatgaccgtacagcgtctgcatgcaaatgatgcctacacttttgcaccgtataacgcatattttaacgattactacacgccgaacggtgatggggccattgcagggcagaccacacaggatgatacattctactattttccgcgcaaacaagccaaagaattgctgaccgcccgcgctgacggtgatgccagcgtgctggaccgccttgaaagcgcctacgcggcgtatgccgaggcgcgttatctggctgtgcccgcaggcgcggagtacgatgcgatcaaggaagagcttgacgcactggtgaaggagcgcaagctgaaggacggtgacaccgatggccgccgcacgctggtgcgcagctggctgaatgagcgctgccattacagtaccgatgccgccgcgcctgcctacaccgacccggtgctgtattttttgaacgagagccatgcaggcggcagcacgcagtttgcctcggcggcggtggtgctgtgccgaatgctggggctgccggcccggtatgtagtgggctacgccgcgccgcaaagcctgtttacgatccaaggggatggtagttaccgtgctgttttgcaggatgacaacgcgcacgcatgggcggaggtctatcttgccgggcagggctggacgccgctggaagtgacgcccggcatggcaacggaactcaccgaaggcgaactgtcagctgatacaccactggccggacagaatgctgccaaggaagatgacgcgccgctgccaacgcaaaacgaagcgaaaacccctgacggtacatcgcggaaaacggcactgctgtgggcattgccggtggctttgctgctgatcgtgctggtgattgtacaggttcgccgtgcgcgccgtaccccgctgcagatcgtgcaggtggagttccgcgcgctctaccgcaaaatgcggcgctgcgggctgggggaggatgtctcctctgatgaggcagcgtttgcaggatttctgcaggcgcattgcccgcaaacagacggcgagacaattcaaagcctgttggctgctgtgcagatggcacagtttgcacccgggccgtgtacacgggaaaccgcgcaaagggtgcgcaccgtttgccgggaactgcgcagaaagatgcgcaaaagtgttgcgcgaagatgtgaaatgctgtaaaaaatagttgacggttcgtgaaaaaatgattatgataatagtaaaatagctgcgggagatgaggaaggatggcatgcttgccgaagaatgataaggtggcctatagtacacaaagtacggagacgctggatgcgccaaaaacaacggtataccgttcagagccagaaggcggacgcatcagccacgcaacccgacagcgcgtgctggactatgtgaaaaagcacaactgtacccccggcgtgctctaccgcggagcggcgaagcaatgctcgtacaacatttcactggtgatatcaaagcagttctccgactttgagatgccttttatgcgtaaaataatgcgctctgtctactatgtggcgggggaatatgattacgatgttctgctgacacttgtagacgagaacgagacccgccctgtggaacggctgctggataaccgtaaaatcgatggcctgattttgacccgcacgctggagcgtgacccccttattcccttgctgaaagcgcgcaagctgccgtttgtcgccattggtcagccggaggatgatgagatcctctcagtcgaccacgaccaggtgggcggttgccgcgagatgacgagcctgctgttgatgaagggcatgaagcatatagcgttgctgggcggcagtatgctgtacacggtcaaccagtcccgactggagggctttcggcaggcctatgacaaggcgggccaggaaattgatgaaggcttgctgtttttggagctggaaaccgatgatctgcggatgtgggctgtgcagcaggcggtggagcgcggtgcggattgcatcctgtgtatggacgagcgtctggcccagctgtcgctgaatgtgttaaagcagctgaacctgcgtgtgccgcaggatatccgactggcatcgctgtatgacagcgagaatctggccaacaccgtaccgcccgtcacggccgtacaatttaatgccgacattctggggctcaaggctacccagcagctgttgtgcgcattgcagggggaaaaggtggagacccgaatagaactgggctatcaagtgagcctacgggagtcaacgcaaatatagtgtactgattttcaaggatttcagaatatgcctg

SEQ ID NO: 14119 - DNA, 7305 bp, Unknown
  gut microbiota DNA sequence
atttgttccgggcctggctctcacctgcgaaagcctcccaaaggtttttctcggtcttgctgcctctgagttccataatgaatacctccgttaaaataggaataagtcttaatatgactttattatagcatacaaacagcccctgtcaagtaaaatttcagaatggaatcttggtgattttgcgcagacggttgacaaagcatacattttagtgtactatctgaataggatatattcttaaatcaaaaaaggaggtctgcccatgacccgccaacgcgccctgattttgggtatcatgcgtgaaaaatgcccggagcatctgaccgctgacgaaatcttctgccatgcgcggcaggccatgccgcacattgcgcgcggcactgtgtaccgcaacctgaaattgatggagctggacggcgagatcggccatctggaaatgcccgacggccccgaccgttacgacgccaaccccagcccccacggccacctgttgtgtgagagctgcggcgagctggcagacctgccggtcgtggggctgatccgcgatattgaggccgccatcggcaccgaggtccgcggctacacgctgacgatccggtatatctgccccaaatgccgcgccaaaaacgcgcagtgacccttgccgcccgaccgtgggcggtatttttgtaaaagcgaggttgtaacttatggcaaagcagcgcgaccctgtactagatagtatgcgcggcatcggcattgtgcttatggtgctgggacattccgggtttccgggaacggattatatttatttattccacatggcgctgttttttatgctcagcgggtggtttttcagcctgcggggcgggctggtacattttgctaagcgcaagctgctgaccctctggctgccctttgtggcggccaacacggtatttacggtctgcaacaacctttttctgcggctgaacatcctgacggacgatgcgcggatcgcggagataccgggcaacagtgtcacagcaccggtgagcatcaaggatatcgttggccgcacggtacactggtgcgtgtttgacggcggcacccagctgggcggcgcgatgtggttcatacaggcactgttccagatctccctattgtacgctgtcatggaggttttgctgcaaaagctgctgcatggcggcgatacgctgattgcgcaggggctgctttccggcgtgctgctctgggtcggctggcactgtaatcagctcggctggaatgtctgggggctgggcattgcggccagctgctactggatgttctaccttggcacggtgctgcgccgcactgcgcggtcggaggtgcgcccgctgtaccgggcggcggcaggggcagcggcctttgttctgctgctggtgctgcggcggctcggctcggtcgggctggcgggcaacggctataccaacccggcgtttttgctgttggccagcatggctggctgggtgctggtgcgcagcgctgcctgcctgacggcccccctgccccgcgtcagcgccgtgcttggctatctgggccgcgccacgatgcccattgtgatcctgcattttttgagctttaagcttgtgacctggctgggcctgctggccacgggcggtgaaagctacctgctggccgccttccccatctattacaccggcggcggctggtggctggcctacacggctgccggtctggccctgccgctggcggcccatgcagtctaccgcaagctgcgggcgctgctgtgaccagcccgcaccttatacaacaaaaagagagaagcagcctgtgacggttgcctctcttttttttgcagttttatgctgctgcgtcagcgctcctccagcggcacatactcccttgtctgcatgatgctctggtaggcggggcggatgatcttgtccacattgacaagctcctccatgcggtgggcagaccagcccacgatgcgcgcaatcgcaaagatgggggtgtacagctcgaccgggatgcccagcatgtcatacacaaagccggaatagaagtccacattggtggaaacgcccttgtaaatgtggcgtttctcggcaatgaccttgggggccagccgctcgatcgtgttgtaatattcaaaatcgcggctgcggcccttggcatcggccagctggtggacaaagctcttgaacacgaccgcacgcgggtcgctcagtgaatagaccgcgtggcccatgccgtagatcaggcccttctggtcaaaggcctgccggtccacgatgcggccgaggtaatcggacatggcatcctcatcgagcgggtcagtgacatgggtgcggatgtcatccatcatctgcatgaccttgatattggcgccgccgtgcttggggcccttgaggctggacagcgccgccgcaacgaccgagtaggtgtccgacccggacgaggtgacaacgcgggtcgtgaaggtagagttgttgccgccgccgtgctccatgtgcaaaagcagcgctatatcgaggacatgcgcctccagatcggtatatttctggtcggggcgcagcatcttcagcaggttttccgccgtggaaaggctcgggtccgggcggtggatgtacatgctgccgccgcactcataataattgtaggcgtggtagccgtagaccgccagcatcgggaatacgctgatgagcttgatgcactgctcaagctgggtctgcaaatcggtcttgccgatgtcatcatcatagctggccagcgtcagcacactgcgggtcagcgagttcatcaggtcatggctgggggccttcataatgacatcgcgcacaaagtttgtgggcagggcacggcatttggtcaggcagctgttgaagctttccagctgcgcggcatcgggcaggtcacccagcaaaagcaggtaggccgcaccctcgaaggcgtagcgcttgccgcgcaggccgcggatcaggtcgtagacattgtagccgcgataccaaagcttgccttcgcagggaatcttttggccgtcccgctcctcaaaggcatcaatgcgggagatgttggtgatacccgccagcacgcccttgccgtttttgtcgcgcagaccgcgttttatatcgtactgggcaaaaagctccgggtcaatgcggttgttggtgacgcattcttcggtaaagatgcgggcttccttttcgatggctgcgtaatcgctcatggttgatggcctccctttcttttttgtccgcggtgggcaaacaaatcgtagcagatgcaggaatctttacaaatcgtataacaataattatacggaaaatcgaacaatctgtcaaatggataatttgtgaacaaggcggccgctgccgggatataaaaaagcgggagaggtcatccctctcccgtcaggccgcaggcggatgtaggcatccgccccggcaaaaagctgtaaatatttattctgccacaagtaccgtcacgctggtcggggccagttcaagagcatcgcggaagcatgggccgaacggtgcggcgtccgcatggacaccgtcactgagtttgcgccatgtgccggtgggcagactggcccactggcgggtgcgctcggggttgtaatagacagccagctgacccttggcggcagtgccgtcatgctccggcacaaagccgatgagccaccccggcagcgcgagcaggaacggctccggctcccctgccgcgccgctcaggcgcgggtaagcgcggcggatggccagcataccgcggtaaaaggccgtcagcgcagcaaactccgggcggtgggcgcgcgcccagtcaagccggtttgtgctgagcggccccttgtagctgttgtggtcgccatacttggtacggccccattcctcgcccgcctgcataaagggcagcccctgacaggtcaggtagatgcctgccgtcatgcggttttgcgccagcaggtcgacatcgggccagtcataatccccgcggcgggccacggcggccagcttgtcccacagggtatagttgtcgtgggcggagacatactgcaccacctgcccggcgcgccggggccaaaagccgtgtgcaccattgcgccatgcactgatcgagtggatgacatcatagccttgctggggcgcgccgttgacatagccggcgttggcggcatcaaagacattgcccttgatacaatcgcgcgtatcatcacagaaaaagccaatcctgtcactcagcgcatcgagcgcgcgcttgtcggcagggcgtgcgccgccctccagattcgtaccgccgcccatccatggctcgccgtacatcaggatgctttcgccgccgggcaggctgtcgagcgcggcacggatcgcgttcatcgtgtccacatcctccagcgccatcagatcaaagcggaagccgtcgatgtggtaggtcttggcccagtacagcactgaatccacgatgaatttacgcaccatggggcgctcgctggcaaggtcgcagccgcagccggagccgttggtcatgctgccgttgggccagcggcggttccagtagccggggactgtccgctcaaggcagctttcactgtgataggtgtggttgtagaccacatccatgataacgcccagccccgcgcggtgcagggctgccaccatggcgcggcactcgcgcacgcgaacctcgccgtggaaagggtccgtggcaaagctgccctccggcacattgtagttctgggggtcatagccccagttgtagccgccgtcagggcgggtctcgtccacggtggcgtagtcaaagatcggctgcagctgcacatggctgacgctcagccccttcaggtagttcaggcaggtcggatgcgcgccgtcatcgtccagcgtggtgtcaggctgggtaaagcccatgaatttcccgcgccactcggggcgcacaccgctgcgcgcatcggcggagaagtccgccacatgcacctcccacacgctgcgggcgtggggcgggatggcggggcgcgcgtctgcgtcccagccctcgggggcggtccgggtcagatccagcaccatgccgcgctggccgttggcaccggcgctgcgcgcgtaggggtccacgacctcctgcatgcggccgtccgggaagtagacgcggtagagatagtaggtcccgtgcaggttgcccggcagggtgatggcccacacgccgtcggcctcgcggtgcagctcatgcacgccgcgctccccggcgccgggctcggcatcggtgccggttgcatacaggcagactacgaccccgcaggccgtgggtgcccatagcttgaaaaccgtttcctccgccgcaggatttgcaccgaggtcgctgccgccgtaatagggcagttcacacgcctgctgccagttcatgggtgatcgctccttacaaagtagtatgaacatattgtaacaggcagagcgacagtttgcaaggcgtaatccgcaaaccggctgctgtttgcaggttcacaaaaccatcagcagcgtgcctgcgccgataagtgcgcagcccagcagcgatttgacggtgaactgctcatgcagaaagacgaaggccagcaccagcgtgatgacaacgctcagcttgtcgatcggcacgaccttggaggcgtccccgatctggagcgcgcggtagtagcatagccacgaggcaccggtcgcaaggcccgagaggatcagaaacagccagcttttgcggctgatcccggtaataccaccctgtgtgttggtgagaaacaccatgccccacgacatgacaaggactaccactgtgcggatggccgttgccagattggaggcaaccccctcgatgcctattttagccagtatggatgtaagcgccgcaaagacagcgctcaacagtgcaaagacgaaccacatgagaagtcctccgcagagtccgcatcgttttgcgcggcagttatgcctttttgctgtaatcccgtgcgccgtagatggcggtgcctacacggacgatggtggcaccctcagcaatggcggcggcgtaatcgtggctcatccccattgagaggatgtccatctgtgcgcggtcatagtgctgcgcatcggccttggccagcagctcgcgcatccgtgcaaaaaagcggcgggtctcatcgtcatcggcgtctgcaggcgggatcgccatcagcccgcgcagccgcagattctctttggcggctgcggcctccagcagggggaacaggctgtcggcgtccacgccgctcttgctcgtttcatcaccgatgttgatctccacaaggatgtcctgcaccagccccagacgggcggcagcgatgtcgatcttgtccagcagccgcgtgctgtccacgctttggatcagggcggcgcggcctacgaccttgttgaccttattggtctgcagatggccgataaaatgccccggcttgccgttgtaggcaccggcatcggttttctcgaccagctcctgcacatggttctcgccaaagaggtcgatcggcagctcggcgctgcagcgcacctcctccaccgtgcgggtcttgcaggcggcgcagagctttacctgtgccgggtcgcggccggcagctctggcggctgcggccattgtttcgcggatatgggcaacggcctcggccatctgctgcttttgtgcttgcgggatcatcgtacttcctcctgactgtagacggcgcgcgcgccgccgatgaacggcgggcgggtgcgggcgcagagcaggattgcctgcccgatatgatccagcgacaggcgcaccggcacggccacccggcgcagatgcataccgatgagcgttccgccgatgtccatgcctgcggcggcgcggacctcctcgacaaggacggggtccttaaaggcgcgccagcagcttgtggcccagctgccgccggcatggggctgcggaatggccgcaacaatctggcagccgtaagccttggcggcctcgcgctcaaggacgatggcgcggttgagatgctcacagcattgagcggccagatagaccccctgctcctgcagcggcggctgcacacccgccagcacagcggcggcggcctccatgctggagtcatggccgatatgcccgcccatgatctcactgctggagcagccgaccacaaaaatatcccctgtttcaagctgcgcagcttcgagcagttcttccgtggcctgccgtgcctgcgcggtaagttgcgtgtaatccatggataaagccccctttggttctattatagcaggggtgtcaataacaaaaaaagccttccccctgtgggggaaggtggccgaaggccggatgaggggcgggcttgccgatagcaca

SEQ ID NO: 14120 - DNA, 1831 bp, Unknown
  gut microbiota DNA sequence
tcgtcgccttggtgggccgttacctcaccaactagctaattggacgcgagtccatcctgaagcgaataaatccttttcccgcagatccatgcgaatccgtgggcttatgcggtattagcagtcgtttccaactgttgtcccccacttcagggcaggttactcacgcgttactcacccgttcgccactaagtcaagaaaagcaagcttctcttgactccgttcgacttgcatgtgttaggcgcgccgccagcgttcgtcctgagccaggatcaaactctttataaatggtatttaatcgccatttaaaagcgttaaatctctgtaatcactcagacacaatcgcttgcgtcctgtatgaattacttgtaaatttggaattgatttacgtgggtttccaaacccacgatcaaggttccacaagtttcagttttgttcaattttcaaggtcctgctgtgctgtcgcgtctccgtgacagcttgtatattatatatcagaaccgcttgattgtcaagaggttttctgaaagttttttgaagaagttttcttcaaaaaacgcgtacaagctgttgatacaagggcttgccgcggcctccgccgcgggacagcttgactattatagtaagtggtcatacttttgtcaatggggtttttcggtttttttgacaaatttcgagggaggtatttgggcaaggtgtatattgcggacgaggggaagtatgcctactaaatgtgggtgcggagggggcaagccccctccctacaggtgggcggggacagaaagattgcccgataaagggcgttatccgcaaggttgcccctcatccggccctgcggggccaccttcccccgcaggggaaggcttgggggcgggcggagcagagccccgcccctacgggatggcggtgggtgatgcggacggtggtattttcaacatcggttgctgggctttgtggaaagctcttgcaatttgttccttattataatagtataaagacaacacacttgaaatgagggctatccatgatcctggcattcaatatcggcaactccaacattacctttggcgggtacacaccggacggcaagctggtcttttcctcgcggctgtttgcggacaccgcgctcagcagcgatgagctgctgtataaagtcgtaaacatgcttgcgctttacggtaccgagccgcaccagatcactgcggtcatcttttccagcgtggtgccggcgctgacgccgcggctgcgggaggctctgcgcaagatgtgcgagtgccagatcatggaggtcggccccgggctgaaaagcggcgtgcgcatccggatggacaacccggcccaactgggcggggagctgctctgcgccatcgtgggcgcgctgcagcactgtgcgccgccctgcgtggtggtcaacttcgacacggctaccaccctgctggctgtggatgcctcgggtgctctggtgggcggctcgatcctgccggggccgcagtgctcgctgtcggcgctggtgcgcaacacagcgcagctgccgcaggtcgagctggaggcccgcccgcgccgcctgctgggggccaacacggcggattgcctgcacagcggtattgtgttcggcacggccgcgatgctggacggcatggtaacccagatccgcgcagcgctgaacgcccccgatgcccccgtggttgcgaccggcacactgccggacagcgtgcggctggcctgcgcaacggacatcacctaccgcgagacgctgatccttgagggattgtatgtgatctggaagaagaacgcgcggaaataattatcgcgggagggataaagccctccccta

SEQ ID NO: 14121 - DNA, 4267 bp, Unknown
  gut microbiota DNA sequence
aagcctcttttatgagaggctttatttttttgccctgctatgctatactatactatgtatttttgtgtacaaaattatagagaaaggtatcaatttatcacctatgcagcatttcaaaaagattgattggaagaaattcctcttacagatgcttctcccctgcctgctggctgtcgcggtgggctttatctcccgctatcagcttgagctttccgacggcgtaaccgaaagctttttgcagctgcagtggccgctctacgcgccgctgaacgccctgacggccttctgcctgacactgatcctctttgcactgtgcggcagatggagcctctccacggggctgtccggcgcggtgttcacgattatcgcgcttatcaactactacacccgcgacctgcacggctcggcactgatgcctcaggacattttgaatctgggcaccgccgccgaggtcatgggcagctacaccctcaagatcacgcaggatgtcgtaaaaatcgccctgctctatctgccgatcctcggcatcgcctttgtgcagcacctgctggcaaagggcgcgcccaaacgcgcaggctggcccgcacgcatcgtgcgcgtagcgggcagtgcgctgggtgtttttctggtcatgttcttcggctactttgggccggtgagcatcaagcccaagacgacctacggctgggcatggcagaacacctactacacctacggctatctggccggcacgatcgaggccaccagcctgatggccgaccccatcattgagccggaaaactacaacgatgcggccgccgtaaactttgcccgcaaggccgatgactatgcggcccccgccagccccgaaagcgccgaggactaccccgacattgtgctgattctgtccgagagcttctacgactttgaccttgtgaccgacctgcaggccgacaccgacattatgccggtgaccaaaaacctgaccaacgcagtctacggccacaccatcagcccgcatgtgggcggcggcaccaactcgaccgagtatgagatgctgacctccaactcgctgatcctgatgccgagcatcacgcccttcaactggctgaacctgtacaacgccaacagcgttgtcagctacctgaaggggttgggctacaccacgatggccgcccacccctacaccaactccaactaccggcgcgattccgcatggctggcgctgggctttgacgagacccattttgagagtgacttccccaccaaggagacctacggcgaccgcccctaccagaccgactccgccacctaccgggattgggagaagatgtacgaggccatgcccgaggacaagccccggttcagcttcttagtctccatccagagccacggcgattatgacatgaacgattccgcgctggatattgtccacgcgggcaccgactacggcgagtatgacgagctgatggacgagtacctgagctgcatcaagatgaccgacgccgccgtgcaggagctgtgcgactatttcaccgagcagtacgaaaagaccggccgcaaggtcattgtggccatggccggcgaccacgcgcccagctttgtcaagcatgtggctgacgcgagctttgccgccaccgacaacgatttgcagcttttgcagcgcagcacgccgttctttatctgggccaactacccgctggagcacacggccgcttccaccagcaccaccgacccgctgaaccggatggacatggtcatgctgacccccaccctgctgcagcaggccggtctgccgctgagcgactattacaaatatctgctggaaatgaagcagaatacccccgttgtgaccgccgccaacgattacatgaaggtggacggcacgaccgccgagtacggtgccgaccccgcgctggacgagtgggccaaggggtatctgagtctggaatacaacaacatcggtgcccacgccaagcgggaccagagcatttttgaccccgccgagtaagaggaggaatcccgtatgactggtctgaaacgaaccctgcgcagccaccgcggctttacgctggtggagctggttgtcgtgctggtgattgcaggcataacagcgagctttgccgtgcctgcgctgaccgggtacatcgacaacgccaaggagaagcaggccgtcagcgagacgcaggcgtgtgtgatggcggcgacccgcattgccgcgcagaagtacgccttggtgcagaacgcttcaataacaggaaaaagcgatggtgcaaatgctctgacaagctgggcgggcgatttgaaaaacgaggcccccaccgtgaccggtgatgttgcactgactgagggcagcgggcagtatctgctgcatgtgaacaccccgcctgcgggcagtattaagcctgttgggatttcttcggatgccggggtaaagggtaccgtgcagtggatgacctgcaatgccagcgggcaggttttgtacttggtgtacaccagcgccgatgggatacaggttgtatacacggccaccggaacgaacgcgcgtgtggacggcagtattgacaacatcgttgttccaaagcctgatgataccaaaccggaaccaaaccccaacccggagcctgcaccgggcccagaaccaactctcttaaaagttacaattttaaaagtagacgcctccaccaagattccacttggcgatgcaaagctacagattcttaaagaagatggtacggcggctgcttcttggacttcgtcaaccagcagttcagggcattccgttagtttgccggttggcaattatgtgctgcacgaagcttcagctcccggaaattatgatattgcagcagatattaagtttacaattacaagtaacggtgacacattgagcttgagcggcgattctggagtatctgctaccggaaacagcatcaccatggaagataaaaaggtagattatacaaagagtgacaaagtctttatccatttacaggatgccgtaacagggtcttccagtgattttgccaataaaacatacactgtaactgttcccgacccgaagattacctacgatgtcactgctgatgcaaacggcaatattccttttgaaatttatgataaagattcgggcaaacccattgttgccggtcagttacccgcatgggtaaacaattttaccattacagaaaaagaccctataccgggatatcagcccctaaaaaaagaagatttctccatccagattaaccaatcttataataacggcgaataccttggctgtacctttaaagagttccatttcggcggcgatacgaatggaacttttgcggatggcaatgtgattaccctgcagtactttcccactgccgttgtaaaaattctcacaaccgatgcagacaacaagccccttgctgatgctttctttaacatcacagacacatcagggaaagtcatttttaagaatctaagaagtaattcacagggttattgctttgttcctctgcggcttaattccggggatggcatgacggatactgtttatctgaataaagaaaagacttataaactcatcgaagttactgcgcctaccggatatcagagtggcgtcaactgctctctttcttttaatttcagcccatttccgaatgcatacatgaaaacacccggacgacaacccgctgcccataatacatggtttaaaccaaatatttataacaatacttacggtgaatggggccgtgttgagcagtatagagataatagtgatattattcatgttgtcaacagcaagaaattgacctgcaccacctctctgtacaaaattgatgatgccggaaatcctgtatccggcgcaaaccttgctctccactctaaagatggggatcatattcttcttggctttgacagtggcggcagcggtaatcccaacttgtctgaccatcaatcttttaccactacctcctccgctccctatgttgtacagctccgccgtggtaagacctatgaattagaggagataaccccgccacaggattacacaaaagctgaaaagattactttcacagttccgtcagaagctgatacttttactgtctctatggttgaccataaatatagtgaggaaaattctgatataaagttcgacaaggttacttttaatcaggcaaataactgggcatacaaactcactacggatgacaaaatcagttttagtggcggtgaaattctttgctggaagggtatcgcttactacaattatgatagcgttggcactaagattccaaac

SEQ ID NO: 14122 - DNA, 297 bp, Unknown
  gut microbiota DNA sequence
gattaaataccatttataaagagtttgatcctggctcaggacgaacgctggcggcgcgcctaacacatgcaagtcgaacggagttaagaggagcttgcttttcttaacttagtggcgaacgggtgagtaacgcgtgagtaacctgccctggagtgggggacaacagttggaaacgactgctaataccgcataagcccacggaaccgcatggttctgagggaaaaggatttattcgcttcaggatggactcgcgtccaattagctagttggtgaggtaacggcccaccaaggcgacga

SEQ ID NO: 14123 - DNA, 545 bp, Unknown
  gut microbiota DNA sequence
atccttcacaattcctctttcttatacttcaacaaatgagatacttgaagggcaactcaagcctctaaaaagtatcatccattttgagaatggatgatacccatttccacagaagcccatatataatatgtatagatataataccacacaatgcgacacatttcaacagaacgagttatatcaaaccgtacccgaacacatttttgtcactttcaccatattgggcgcactttttcctatggaatagccgaaacatataaaagcaatgttacatcattacaaattgaacaaggaggagcactatggcaaagcgtggagaaaacatcagaaagaggaaagatggtcgttgggagggtcgctttattaaagggcgaaaacctgaccggaccgcaatctggggatacatttatgggcgttcttacacggaagtaaaggaaaaactcaccactaaaaagatggaggtgcagcaatttgcactaaatgcagacaatccaactttttcagagctttctctcacttgggaaagctccattttttatgcacat

SEQ ID NO: 14124 - DNA, 8309 bp, Unknown
  gut microbiota DNA sequence
cagaccgtagtgctggacggcggcaagatcagcgccttgaaccgccttgacatgcgcccggcgggctggatcacccagcagtttgaacgcagcggctttaccgtcacgggcatacataagggtgaaaccgtcgaagcggcggttgatctctactggttgtggcagcaggccgttgttggaaagcagcttgcaacaatttttgtaaaacattgaaaaggaggatccagcatgagcaagagtcattatgtacaagctattgttacctgtctggaaagcgccaacgaaaagcaagccaaacttatttgtacgttcgtgtccaattacatgaagaaaaccgaattaaaaaatgatttttgggcggatgaagcatttgctattgtctgcgaaatctactacatcctgcgccgtaacccggatgaaaagttcctgcgcaaggcactgacatggattctggccattgaaaaggtgatgtacaatggccagcaaagcaacacggagagctgatgctctccggcgggccagaggaaaacaaagcatctgcacacctttgcgttgtcggactacaccctcatgtgaaaaacggtagatttccgtaaagtcaggaacccatacgagttgaaagctctggcatacaccctttttttctgtatgggggtatctgacccgccggggcagtcagatgtgcggtatagtttgcggtacaatagaaaaaagccgcctagaaacaaacatttctaggcggttttctggtatcgaggtgacaggactcgaacctgcggcctcgtggtcccaaaccacgcgcgctaccaactgcgcaacacctcgttcttatagcttacctattataatacacgaagggggcaggcgtcaagccccaacagcggtatgctgcggtgcctacggcaaatatcacgcaaggaggcggagaagccccagaatcaacagatgggcgggataaaacgcatagaaaaaccacttataaaaggtgcggccccggactgcccgccttccgttataaaggtgcaggaggacgaagccggacactaagatcggcaccgcgcagccgagggcatctgccaaagaaccgctgcccagcccggccatgccgccgtacagcagtgccgctgcggcaaaggcagcttttttgcgcgcgggcgcgtcctttgcccatgaaaacagcagtgtaaagatgggggccagcaaggcccagtcacagaaaagcgaggcgcagatcagcaggacaatgcagatgccgcgcagcacgcggtcgtgtacctgctcctgcaccagcagcaccaaaaagcagagcagcagcgtgaacagcatattaaactgcacaaaccccgccatgccgtactccggaaaagccagctggtaggggaactgcgaaagaagtgcaaaaaccagcagccgtgcagcgtagttccgcttggagcgggtgtagccgtagccctccacaaggaaatagcacatcgtcacggcggtaaagtagccgatgaacaaaaacaggttcgtcagcggctgcccggcgggcagaagggcatttgcaatgtgattcagcagcatggtgaacatggcaagcattttgatggcgtcgcggttcatggaaaagacccctttcactttcattgtagagtacgaggcagcaagggtcaacattgcaaagcagaaaaaattgcacggcgctttcttttcccttggccctgcgctataataaaatccggtgaaaggaaggtatataagatgaaggaatccatacagttcagccgcagggtattctgcgacggtatgcgggacgggtttccgattgcgctgggatactttgcggtttcgttctcgctgggcattgcagcccgccatgcgggcctgacgccgatgcagggcttttgggccagccttttgaacaacgcctcggcgggagagtatgcggcctttacgctgatcgccgccaaggctacctatctggaggtggccatcatcactctgatcgccaacgcgcggtatcttttgatgagctgtgcgctggcccagcgcttttcgcccgagacgccgttttttcatcggctgctcatcgggtacgatgtcacggatgagctgttcggcatcacgatcgcacggcctggatacttgaacccctgctatacctacggcgcgatactgctcgcagccccggcgtgggcaatcggcacggcgctgggcatcgtggcaggcaacgccctgccgctgcgggttgtcagtgcgctgagcgtggcgctttacggcatgtttctggccatcatcatccctccggcgcgcaaggaccgcgttgtggcggcgctggtgctgctcagctttgtgctcagcttcgcctgcagctacctgccgggcgttgcggccctgtctgacggcacccgcacgatcctgctgacggtgctgatctccggcgcagcggcggtgctgttcccggtgccggcacaggaggaggtgggcgaccatgaataactacatttacattgccgttatggcgctggtatcctacgccatccgcatcctgccgcttacgctgatccgtaagcccatcaaaaatcgctttatccagtcgtttttgtactatgtgccctatgtgacgctggcggtcatgaccttcccggccatcatccgcgctacccagacgccggtctctggtgcggctgctctggcggcaggtatcatcgcagcatggtgcggtgcagggctgttccctgtgtcggtcatctgctgcgcactggtgtttgtcattgagctgtttgtgtaagccggaccatcagcaggcaagaaggcttttcaacacgcgatgcctccctcacagagggaggtttttgttttgtgcaggatgcacaaaatacaagcatgatttttggtgaacgaaaatgaccgaagctgattgattttgacgaaagacgtgatataatacagatacaatcaatcagaaaacatcacaaaacaccaaaaacagtcacacacaagaccggaaagggggctgctcatgttagcagaagaacgctttgcactgattttagatctcctgacagaaaaacgcacggcaaccgttcaggagctctgtgaggcgctgaacgccagtgaatccaccatccgccgcgatttgaccgagcttgaccggcagggccggctgaataaggtccacggcggcgcaacgctgccgaacggccagtttttggcggacgagcctacgatggctgcgaaggagtcgctggccgtcagccagaagcagagcatcgctgaggcggcggcagagctgatcactgccgaggatttcgtctatgttgacgcgggcacctcaacgctggcaatggtccgggcgctgagcggccccgcgctcgaggcgcattatgtcaccaacggcattgcccatgcgcggctgctggcgcagaaaagctgccatgtctgcctgccgggcgggctgctgcgcccccggaccgaggctatcatcggcgcagcggctgtcacggcgctgcagcagttcaattttaccaaggcatttatgggggccaacggcgtggcgatggatgcgggctttacgacccctgaccccgaggaggccgccgtcaaggccgccgcgatccgccgcgcccggcagacatggttcctgacggatgattcaaagttcgggcgcatctatccggccgttatcagcgcgcttggcgatgccgcgatcctgaccaatcgctgccctgatccgaaatacggccaactgacacttgtaaaggagacagagcgatgatctacaccgtaaccttcaacccggcgattgactatgttgtgcggcttgacagagagctgcgggtcggcgatgtgaaccgcgccagcggcgaggactgtgtgctgggcggcaagggcatcaatgtatccggtgtgctggcacagcttggctgtgagagcgtggcgctcggctttgtggcgggtgagaccggtgcatggctggagcgcggccttgctgcgcaggggttgaaaaccgatttcgtccgccttgcacagggaatgacccgcatcaatgtcaagatcaaggcggggcaggagactgagctgaacggcgccggtcccgacatccccgaggacgcaatgcgggcgctggaggaaaaactcgaccgtctgcagcaggacgatattctggtgctggcaggcagcatccctgcaagtctggcacagaccacctatgagcggattctggcccggctcgagggccgcggcgtccgcgcggtcgtggatgccacccgcgacctgcttgtgaatgtgctgcgctaccgtccgttcctcatcaagccgaacaaccatgagctgagcgaaatcaccggtgtaaagctgaccaccgacagggagatcgcagcggcggcaaagatgatgcaggataaaggtgcgcgcaatgtgctcgtcagcatggcaggggacggcgccatgctgctggatgagcaggggggcgtgcaccgcatcggctgccccaagggcaaggttgtcaacagtgtcggcgcaggggacagtatggtggccggctttgtggcgggctaccagcagagcggcggagattatgaggctgcgctgcgtctgggcaccgcctgcggcagtgccaccgcgtttagtctgggtctggcgacaaaggcggacattgataagctgctcaagacgatggagtaagcggcttttgcggagcggtcaagaccgctccctacaaggcacccataaacctcagtttgtagggagggggtcttgacccctccggggccgttcgcccctatacaaacatacattataattgaaggagaactgtcttatgcgtattacggaactgttcactgcgcagtccatcgcgctggatgtcgcagccccggatcaggctgccatcatcgacaagctcgttgatctgcaggcgacccacggcaacatcaccgacaaggacgcctacaaaaaagccctctatgcccgcgaggccgaggcatccacctatgtggacaacggcatcacggtgccccatgcccgcacggcctgtgtcacacggcccagtctggcggtcctgcgcctgagcgaaccggtgcagtataatgcggacgatgacggcaagacggacctgctgtttgcgattgccgcaccggaaaacggcagcctgcatatcgacatgctggcccgtatgatgcagatgctcatgaacgaggattttgttgagaagctgcgcgccgccaagacacccgccgccttccttgatgccattgacgcacaggaggacgcccagttcggcgaggagagctttaccgagcaggagatcccccagaacggctaccgcgtgctggccgtaacagcctgccccaacggtattgcccacacctacatggcggccgaggccctgaccaagacaggggataagctgggtctgcccaccaaggtcgagaccaacggctctgacggtgcaaagaatattttgacggccgaggagattgccgcctgtgacggcatcatcattgcggcggacaaaaatgtcgagaccgcccgctttgacggcaagccggtgctgtttgcccgcgtggatgacggcatccataagccggaggagctgatcaagaagatcgcccacggcgaggcccccatattccatgccaagggcggtgcagcgcagagccagagcgtaggcggtgccagcgacacggtggcgcacagcctgtacaagcacctgatgaacggtgtttcccacatgctgccctttgtggtgggcggcggcatcatgatcgcgctggccttcctgctggatgattacagcatcaacccgtccaacttcggtatgaacaccccggtggccgccttcttcaagacggtgggcggtgcggcgttcggctatatgctgccgatccttgcgggctttatcgcaatgtccatcgctgaccgtccgggtctggcggtcggttttgcgggcggcgtgctggcaatgaacggcacaaactttgcggggcttgcttctggtgatacgaccggcatctccggcggtttcctcgcggcgctactggccggctttgcggcgggctacattgtgcagttcctcaagaacatcaccgagaagctgcctgccagcctgaacggcatccgcccgatgctgatctacccgctgggcggtattctggtcattggtctggttatgtgcggcatcaatccgctgatgggcatcatcaacacggccatgagtgactggctgaacgcgctgggcggaagctccaagatcctgctgggtgcgatcgtggccggtatgatgagcgtggatatgggcggccccttcaacaaggcagcctatgtgttcggcacggcggcgctggcctccggcaactacgaggtcatggcggcggtcatggtcggcggcatggtcccgcccatcgcaatcgcgctgtccaccaccttctgccccaaaaagtggagccccgatgagcgccgcaacggcatcgtcaactatgtcatgggcctctgcttcgtctccgagggcgcaatcccgtatgcggccgcggatccgctgcgtgttttgcccagctgcattatcggctcggctttgtccggtgcgctgtccatggtgttcggctgcgcgctgcgcgccccgcacggcggtatctttgtattcccggttgttgaccacgcactgctctatgtggtggccctcgccgccggttctgctgtcggcgccgtgattttaagcctgctcaaaaaagactacactgcagaataaacttgtatatggcaaaggccgctctcaaatgggagcggccttttttgcgcagggatgccatatacaaaagctgcccccgccacaaagggcaggggcagaaagcagagcggtaaaagggtttgtgcgggtagaggatcagcccaggctgatgcccatggcgcgggcgacattcagcatgtcgcagtcgccgggcacaccgcgggtcttaccggcgatgtcggcaagcgggttggcagtcacatggcggttgaccatcgcaacggtcacgccgaaatgctcgtctgctacaaggccggctgcgtaggagccgaactgggtggccagcacgcggtcgtaggcgctggggctgccgccgcgctgcatgtggccgggcacgcagatgcgggtctcggcaccggtcatggcctcgatctccttggcaatgcgggcggtggcggtggtgtaaccggcctcggcgcgcttggcggtccactccttgcgcttcatcttggcctcctccaccgagaaggcaccctcagccaccgccagaatcgagaagttcttgcctgccttggcgcggttctccacggcggcggcaaccttcttgatgtcgtagggcagctccggcagcaggatgatgtctgcgccgcccgcgatgccggagtacagcgtcagccagccggccttgttgcccatgatttcaatgcacattacgcggctgtggctgccggcggtggtgtggatgcggtcgatgacctcggtggcaatatctacggcagtgtggaagccgaaggtcacatcggtgccgtagatgtcattgtcgatggttttgggcaggccgatgatgttcagcccctcctgactgagcaggtttgcggtcttgtgggtgccgtttccacccagacacagcaggcagtccagcttggcggcgcggtagtttttcttcatcgcggcaaccttgtccaccttgtcgtcctcaaccacgcgcatttttttgaagggggtgcgcttggtgcccagaatggtgccgcctacggtcagaataccggaaaattcatcaggggacatctcacggtagttgccgttgatcaggccgtcatagccgttcataatgccaacgatctcaactttattgcccatccggtgatacagcgccttggccacgccgcgcagggtagcgttcaggccggggcagtcgccgccggaagtcaggataccaacacgaatcgccatagtaaaaacctcccaaagctgtatttatactgctattataaatgtacgcttactgaaactgtatgtcaagaaaagtttttgctcgatgctgtgaacaaaatacacttttttcaaaaaatctcaaaaaaagttaaaaaaaggcttgcattttgaaaatccctctgctataataacatacgtcgccgggagacacggcggccacaaactgaataagggagctttcccgagtggccaatggggacagactgtaaatctgctgcttaatgcttcggtggttcgaatccaccagctcccaccaaaaggctgtgacaataaagttgtcacagccttttttcttcgctgtaacgccaaaaattgaccgattttg

SEQ ID NO: 14125 - DNA, 952 bp, Unknown
  gut microbiota DNA sequence
aaaggaggatgtcagcctgcatgggagacgcttttaaggcgctggccgacccgacacggcggcgcattttagaattgctggcacagggcgatctgactgccggggagatcgccgcacattttgagatgacaaaaccgtctgtcagccaccacctgaacattttaaagagtgccgagcttatcaccgatgagcggcgcggccagaacatcgtgtacagcgtgaatctgaccgtgtttcaggaattgatgaagtggttttacgactgcggccttgtaggagggcacaacgatgaaaaagaataagctgttttggattttaaccgtaggctgcgtgctgaattttgccgcgcacctgtacttctacccttccctgccggacattgtgcctacccactggggcgcgagcggtcaggtcaacggctgggggccgaaatccaccattttaattttggccgcccttccgtttgcaatgcttgttatgttcgaggtcatccgcaaaatcgaccccaagcaccagaattttgagaaattcggcaaggtgtggaatctgtttgtggtactgttcaccgtaatgatggccatgttcagctggctgagtgaattggccgtgttcggcaagctgccggacaacagcagcctcatcggcattctcgtctgcggtggcatcggcgtgctgttcattattttggggaactttatgccgcaggtcaagcagaactacacctttggctgccgcacgccgtgggcgctgaacgatgagcacaactggcagcgtacccagcgcatgggcgggtatacctttgttatcatgggcatctcgcttttggtgatcgcgttcctgggtggcctgctgggtgacgccgggtgcatgattctgctgttggccgctgttttcggcggcacagcttggatttacctgtactcatatctcgtgtatatcgggaagatgaagt

SEQ ID NO: 14126 - DNA, 3870 bp, Unknown
  gut microbiota DNA sequence
agccttcccctttgggggaaggtggccccgcagggccggatgaggggcgggtgtgccattgctatccgttagcgagttttgacggcaggtcgcccctcatcagtcagcgggcgtggccgctgacagcttcccccgagggggaagccatataaacaaccagcccgcgcttcttttttgaagcgcgggctgttccttatttataaagcgttacttgtatagccccaccagattcagcaggatctcaacgccctgatccatcttctcggcggtgatgcactcacacgggccgtggaagttgaatccgccggtgccgaggttcgggcagggcagccccatatagctcagggtcgcgccatcggtgccgccgcggacggggctttcgatcggtacaaggcctactgcgcagatcgccttgcgggcgttttcgaccagatggaagtgcggctggatcttctccaacatattataatagctgtccttgatgtccagctccacggtaccggcgccgtagcgctcgttgaggcagtctgcaatatgctgcatctgggccttgcgggcggcaaacttggcggcatcgtggtcacgcacaatgtagcccagatgcgcggtggtcacatcgccctgcatgctggtcaggtggaagaagccctcacggccctcggtatgctccgggcgggagaaggcgggcagtgcggcatggaactccatcgccacattctgggcgttgatcatcgtgttcttggcactgccggggtggacgctgaagccgtgaaccgtcacgaccgctgcagcggcgttgaagttctcatagctgatctcgcctacatcctcgccgtcaacggtgtaggcgtaggctgcgccgaagccctctacatcaaacaggcttgcgccctcgccgatctcctcatcgggggtaaagccgatgcagagcttgccgtgggggcggttttcagcgatgatacgctcaagcgcggtcataatttcggcgacaccggccttgtcatctgcacccagcagcgtggagccatctgtcgtgattagggtctggcccttcatctcgcgcaggaacgggaagacctccgggtcaagcaccgtgccggtggccggcagggtgacggggccgccgtcatagttctcatggatctgcggctgcacattctcaccgctggcatcgtctgccgtgtccatgtgggcgataaagccgaggggcttggcgctctcctgccccggggtagcgggcagggtggcatagacatagcaatgctcatccacatgggcatcagcgaggccaagcgctttcaactcctcaacgaggattttggccaaatcaaactggcgcagcgtgctgggatgggtgccgctgttagggtcagaggtcgtgtggacttttacatattttaacagtcgttcgtaggcgcgcatgggcgggtcctccttgtaaaaaacattcggcaagacgccggacttttgatttcgtgcccattataccacaaaaagcagcaatttccaaccccgtgcccttttcaagcggggaattttgtgctagaataaataagattataaaggtaaactgcgcccttgcgcggtcaaatataaggaggccatcatggcagacagcatttttaaggataagaccctactcatcaccggcggcaccggcagtttcggccataccgtgctcaagcattttctcaccactgacatcggcgagatccgcatcttctcccgcgatgaaaaaaagcaggacgatatgcgccatgagctgcaggcccagtaccctgagtacgccaacaaggtcaagttctacatcggcgatgtgcgcaacccgcagtccatccgggacgccatgcccggcgtgaattacatcttccacgcagctgcactcaagcaggtgcccagctgcgagttcttcccgatgcaggccgtgcagacgaacatcatcggcaccgacaatgtgctgcacgccgccattgacgccggcgttgagcgcgtggtctgcctgtccaccgacaaggccgcctaccccatcaatgcaatgggcatctccaaggcgatgatggagcatgtcatctttgccaacgcccgcgtggcagccgagcgcggcggcacgaccatctgctgcacccgctacggcaatgtcatgtgcagccgcggcagcgtgatcccgctgtttatcgaccagatcaaggcgggcaaccccatcacgatcaccgatcctaacatgacccgtttcctgatgaatctggacgaggccgtggatctggtcatgttcgcgttcgagcatgccaacccgggcgatctgttcatccagaagagcgatgcctccaccatcgccgacctggccaaggccgtgcagcagctgttcggtgataccggcacgaacatcatcggcacccgccacggcgagaagctgtttgagacgctgatgacccgcgaggagcggctgcgcagtgaggatatgggcggctactaccgcgtggcggccgacaaccgcgacctgaattatgataagttcgtcgtcaagggcgaggtccacacgatggccgatgactcctacacaagccacaacacgaaccgcctcgatgtcgagggcactgtcaagaagatcctgaccaccgagtatgtgcgcaacgcactgaaggagatggaggccgagaaaaaggcatgaaaattctcgtgaccggcgccaagggctttgtgggccgcaacctctgcgaaaatctgaagaacctccgcgacggcaaaaatcgcacccgccctgccctgaccgtggatgaggtgtttgagtacgaccttgacacgccccccgcagagctggacaaattctgtgccgaggccgattttgtctttaaccttgcgggcgtcaaccgccccaaaagcaatgacgaattcatgcagggcaacttcggctttgcctccaccctgctggacacgctcaaggctcaccgcaacacctgcccggtcatgctgtccagctcgattcaggcgaccctgctcggccgctacggcgagagcgactacggcaaaagcaagcttgcgggcgaggagttgttcttcgactacggcagggccaccggcgcgccggtgctggtctaccgtttcccgaatcttttcggcaagtggtgccgccccaactacaacagcgccgtggcgaccttctgcaacaatatggcaaatgacctgccgatcaccgtgaacgaccgtgccaccgagctggagcttttgtacattgacgatttggtcgaggaaatgctcgatgcgcttgaggggcatccccaccgctgcgattacaacggtcttgcgcccgttttttgtgagacaggccgctattgcgctgcgactgtgacccacagggtcacgctgggcgagatcgttgacctgctggagcagttcagggcgcagcctgccacgctggtgatgcctcgcatcccggcgggcagctttgccaaaaagctgtactccacctatctttcctatctgcccaaggagaaggtctgctttgcactgaaaaagaacgaggacgcccgcggcagctttaccgaactgctgaaaaccgaaggctgcggccagttcagtgtgaatatctcaaagcccggcatcacgaaaggccagcactggcacaataccaagtgggagtttttcattgttgttgcaggccacgccctgattcaggagcgccgcatcggcagcgatgaggtgctggaatttgaggtgcggggcgaggagccgcaggctgttcatatgctgccgggctgcacccacaacattatcaatctgagcgagacagaagatcttgtcacactgatgtgggcaaatgagtcgtttgaccccacacaccccgacaccttttttgagaaggtctaaagcagg

SEQ ID NO: 14127 - DNA, 1782 bp, Unknown
  gut microbiota DNA sequence
cgcctttatagtgggccgatgctcgcatcggcccactcggccgccccaaagtcatactacacacccaatccattgttcaaaatccacaactttcgttttgacagtgcaagaaagatttccgcaggaatcctttgtattttgtccgtggttgtggtacaatctttctaatacgaaaaatgtcgaaacaggaaagtcaggagagtgtattatggcatactatttttccgagccgtcccgtacttttggtgaatatctgctggttccggggtattcctcctcggagtgcgtccccacggcggtcagcctcaagaccccgctggtcaagtaccgcaagggtgaggaaacctgcccgctggagatgaacatcccgatggtctctgccatcatgcagtccgtctccggcgaaaagctggcgattgcactggccaagcagggcggtgtttccttcatctacggctctcagaccattgagcaggaggccgatatggttcgccgcgtcaaggcctacaagaagggctttgtcacctctgactccaacctgccgccggaggccaccctcggcgatgtgctggacctcaagacccgcaccggccactccaccgttgccatcacccatgacggcactgcccacggcaaactgctgggtatcgtggccagccgcgactaccgcctttcccgcatgacgatggatctcaaggtcaccgagttcatgaccccgctggacaagctgatcacggcacccgacaccaccagcctgcatgactgcaacgacatcatctgggacaacaagatcaattctctgcccctgatcgatgccgagggtcacctgcagtatatggttttccgcaaggactacgactcccacaaggagaacatcaacgagcttctcgacgagaacaagagctatgtggtcggcgccggcatcaacacccgcgacttcgcccagcgtgtgcccgcactggtggatgccggtgtggatgtgctctgcatcgactcctccgagggcttcagcgagtggcagtcccgcaccatcgcatggatccgcgagaactacggcgataaggtaaaggtcggcgcaggcaatgttgttgaccgcgagggcttcctcttccttgccaaggcaggcgcagacttcatcaagatcggcatcggcggcggctccatctgcatcacccgtgagaccaagggcatcggccgcggtcaggctacggctgtcatcgaggttgccaaggcccgcgatgagtattataaggagaccggcatctacatccccatctgctctgacggcggcatcgtgcaggactaccacatcacgctggcactggccatgggcgctgacttcgtcatgctgggccgctatttcgcccgctttgatgagtccccgacgaacaagctgcgcgtcggcggcaactatgtcaaggagtactggggcgagggctccaaccgcgcccgcaactggcagcggtatgacctcggcggcgcacagaagctgagctttgaggagggcgttgactcctacgttccctacgccggttctctggcggacggtgtgcagacgaccctgtacaaggtgcgctccaccatgtgcaactgcggcgcgctctccatccccgagctgcaggagaaggcccgcctgacagtcgtgtcctccacctccatcgttgagggcggcagccacgatgtcatcctgaagaacggcccgcagaaccgctaagccacaataaaaattgccgccgaccggacaaaaccggtcggcggctcagtttgtagaaaaagcccttt

SEQ ID NO: 14128 - DNA, 841 bp, Unknown
  gut microbiota DNA sequence
cggatgagcgccgctgcaaaattcttcttattagcaggtttgttttctaggcctcgatggctttcttccgggcgtactgggacggtgtctctcccatggtgcgcttgaacagacgggtaaggtaggagacatccgggatacctacctcctgtgctgcctgtgtgatcgtgtagtggtgataccggagcaggttcgccgcaaactggatgcgggtcagggtcacatagtcggtcaggttgcagtgtacctcccgtgctttttgcggtgcgccgaaaatgaatgcctcctgcgtgttgaaaagcacagcgggagcatggtacaattatcaaaccaaagcgcagtacgatgaggaaaggaggataaacacatgacgattttgatcgatgcagacggctgcccggtggtcgatctgaccctgcggatcgcagggaaaagcggtgtgccggttgtgattctgtgcgatacatcccaccgcattgagagggaaggggcacagacgctggtatttgacaaaggcgctgacagtgtggattttgcactcgtcaaccgggtgaagcctggggacttggtcgtgacgcaggattacggtctggcaagtatgtgccttgcaaggcgcgcacgggtgctgaaccagaacggtttggaatatacggcggataatatagatgcactgatgctgcagcggcatgagaacaaaaagctccttcgcgccggcaagcacccaaagggggctgcaaaacgcacaaaagagcaggatattcgattctgtgatgcgctggaacagattttaagcggcacataaggatacaaatcaaagcgtacaaatggtgggaaaacacga

SEQ ID NO: 14129 - DNA, 11916 bp, Unknown
  gut microbiota DNA sequence
tgccgtatatgagccagcgcgacacgagcgatattctgtttggtgtcgagcagggctttgatttgatctccgccagctttgcccgcaacgcgcaggacattatggatatccgccacatcctggacgagcataactccaagatccgcatcatcgccaagatcgagaatcaggagggcatcgacaacatcgacgagattctgaccgtggccgacggcatcatggttgcccgcggcgatatgggcgttgagatcgactttgccgagatcccggccatccagaagcacctgatcgaccgcgccatgagcgccggtaagatctgcatcactgccacccagatgctggattctatgatcgtcaacccccgcccgacccgtgccgagatcaccgatgttgccaacgctatctatgacggcaccggcgctgtcatgctctccggcgagaccgccgcgggcaagtaccccgtcgaggcgctgaaggccatggctacgattgccgagaccaccgaggcagactccagctttgacagtctggtccaccactctggtacggacaacagccgcctgaacatcagcgctgccgtcggccatgccgcctgcacgaccgcgaccgacatcggtgcttccgctatcatcaccgcctccaagagcggtgaaaccgcccgcctgctgagccgtttccgccccgacacccagatcattgcctgcgtgctggacgatacgacccgccgtcagctcaatgtctaccgcggtgtcaccccgctgatgatggattacgcaacctccaccgatgagctgatcagcatgtccgtcaaaaaggcacaggacgccggtcttgtacagaacggtgatctggtcgtagtgaccgccggtgtccctgttggtgtttccggcacgaccaacatgatcaaggtccatatggtcggcgactccctgctggccggtgtcggcattggtcagaacaacgccaagggcgaggtctgtgtctgccgcaacgctgccgaggccactaagaaattcaagcccggccagattctggtcgtgccctttaccaccaacgattccctgcccttcatgcgtgaggcagccggcatcatcaccgaggaggccggtgccaacagccattccgctattgtcggtctgacgcttggcaaggctgtcatcgtcggtgccaccaacgccacccgcaccctgaaggacggtatggtcatctcgatggactgctcgcgcggtattgtgcaggctatggcgaagtgaggctatgatatggaacgcatcgcaagcttttgtgttgaccacaccacgctgctgccgggtatgtacctctcccgccgtgacggtgccgagggcgagatcctgacatgggatatccggatgaagcggcccaacaagggcagctacctctccccggctgcggcccacacgctggagcatctctttgccacctacgcgcgcaacagcaaatacagcaagggcgttgtctatgtcggcccgatgggctgcctgaccgggttttatctggtcaccaccggtctgacccccgccgaggcgctggagctgacccgcagcgctttcgcatggatggctgaatttgaaggagagattcccggagcgtccgccgtggaatgcggcaactacctgatgatggaccccatcgcagcccgcgccgaggccgctgccatgctgcctgtgctggaggcactggacgctgaaaagctgcactattgatcagcactatataaaaattgaatgcccgctgcggaaacgcagcgggcatttttggcaggcggatacggaatccgcccctacggaatccatggttatataggcaggggcgcagttttctatgtccatgccgcataaaaaccgccacccaatgaaaaacagcgggtggcggttatcgttatgcggtattgtcctaactcagatcagcgcggcagtgatgagggccatcttgtagacctcctcggcgttgcagccgcgggacaggtcgttgataggagcgttcaggccctgcagaatggggccgtaagcctcgaagccgcccagacgctgtgcaatcttatagccgatgttgccggcgttgatgttggggaagatgaaggtgttggcatagcctgcgaccttggagccgggggccttcagctggccgacctcaggggcaacggcggcatcaaactgcagttcaccgtcaaccttcagatcggggcaagcctcctgcacacgcagggtagcattgcgcatcttatcaacagtctcgcccttgccggagccctttgtggagtaggacaggagtgcaacgcgggggtcgatgccaaagacctcagcggtatgcgcggtctcgatggtggactcaacgatttcatcctcggtggggtcgatattgatggcgcagtcacccatggcaatgctctcgtcaccgcgcatcaggataaagcaggagctgacagacttgatgccgggcttgcacttgatcagctgcagtgcggggcgcacggtgtcagcggtggagtaggtagcgccgcccagcaggcagtcggccttgcccatcttgaccagcatggtgccaaagtagttgcccttggacagagcggcacggcactgctcatcggtcatcttgcccttgcgcagttcgaccatcttggcgaccatctcgtcaaagccggcatatgcagcagggtcgatgatctcggcaccggtaatatcaaagccgccctcggcagcagcctgcttgacagcctcgacctcgcccagcagaatgaccttcagggtcttgcctgccagcagacggcttgcggcggacaggatacgggcgtccgtgccctcggtaaagacgatggacttcggctcagcctgcagcttcttctcaaaattctcgaaaatggacatactttgataacctccatgattttagcagtctacggctgctcaacacttacattgctattatagcacccattttgcgctttgcaaagaaaatgtgcgaaagcgggacaatctccgcaataaatgcatagtttggcagacaaaagcaagataattcacaaagttaataaaatgtcaagaaaacattgcgaattatttatcaaatttgcctgtataagaaaagccatagcttctgtaaaaggccgcaatatccgcgcggttgcgcacggccactgcgttcagcagcctgccatccgctttgctgcgaaagccaatgaccgtctcaccggtgcagatgctgctctcaagtgctatatcagactcctgcattccgtccggcggtgtcagtatgggcggagcctgtctgcggagcagtctgttccagaacgacaccgggtacacctcccctgcttcagtgcgtcaaatagatgacagccgctgcctgtaccgccaagatcaacggcatacccaccacaaaataccagtggcgggtcttatgatggaacagatacatacccgcccaagccccggcactgccgcccagcagggctgcgccgaacagaacgcgctccgggatgcgccattggcgcgtgcgggcgcggtgcttatcaatccccatcaggcaaagggccagcgtatttattatcatacaatatatcagtgcagtattcatagtatcattatacgcgctcttactgcaaagcgcaagacataacaaaaagcccccgccgttaagcgggggcagaattacagatcagatatccttgcgggcagcgacactgctgcgcacgagtgcgcgtctgaggcgggcttcggccagctccatatcgcgcttgtcgagatttttctgggccagtatctcctcggcgcgcgccttgctgcgggccgcgcgctcggcatcaatagcatcagcccattcaaaggtagtggccagcaggtggcactcgccctgcatcatgctgagcataccgcccatgcaggcggcgcggcgggtggtaccgtcctccagcttgatatgagcctcgcccatgcccagtgccgtgcagaagtcgatatgctttgccagcagctgaacctgaccgttgatcgtgcggcaggacaccgatgtgaccagtccgtcataggcgacgccgtccggcgtcatgatcttgagcgggaaagttgccatacgaccaccgccttactgctgcttggccttggccagaacatcatcaatggtaccggcaaacaggaagcagctttcggggatgctgtcgcactcaccgttcaggatcatcttaaagccgcggatggtctccttcagcggcacatactgaccgggcataccggtaaactgctcagccacatggaaggactgggacaggaagcgctgtaccttacgggcgcgggcaaccgtaatcttgtcatcctcggacagttcgtccatacccataatagcgataatgtcctgcagctccttatagcgctgcagaacctgctgcacggcgcgggcaacctcgtaatgctcctgcccgacaacctcgggcgagaggatacgcgaggtggagtccagcgggtccacggccgggtagataccctgagaggcaatgtcacggctcagaaccgtggtagcgtccagatgggtaaaggtcgtggcaggcgccgggtcggtcaggtcatcggcaggcacatagacggcctgcaccgaggtgatggagcccttgcgggtggaggtgatacgctcctgcagggcgcccatctcggtggccagcgtgggctggtagccaacggcggagggcatacggcccagcagcgcagagacctcagagccggcctgcgtgaagcggaagatgttgtcaatgaagagcagcacatcctgatgcttgacatcgcggaaatactccgccatcgtcaggccggacagggccacgcgcatacgcgctcccggcggctcgttcatctggccgtagaccagcgccgtcttgctcagaacgccgctctcgcgcatctcaccgtagaggtcattgccctcacgggtgcgctcaccgacgccggtaaagacagagtagccgttgtgggccgtggcaatgttatagataagttcctgaatcagaacggtcttgccgacaccggcaccgccgaacagaccgatcttgccgcccttggcgtaggggcagatcaggtcaacgaccttgatgccggtctcgaggatctcagtggcagactcctgctcgtcaaaggcaggggctgaacggtggatgggccagtgctccgcattctggggggcaggctgctcatcaacgggatcgccaagcaggttgaatacgcggcccaggcactcatcaccgacaggaaccttgataggctcaccggtgtcgacagcatccgtaccgcggacaagaccgtctgtggcggccatcgcaatgcagcggaccacattgtcaccgacatgctgggcaacctcaacgatcagcttttttccgttgttctccagctcgatagcgttgagcagggcgggcagttcaccgtccttgaatcggatgtccagtacaggtcccatgacctgcactacctttccgatgtgtttttctggcatagcacacactcctttagtgggcttttcgttagctttccgcgtcagcaccggccacaatctcggtaatttcctgggtgatagcggcctgacgggcgcggttgtagtacaggttcaggtggtcgatcatctcaccggcattcttggtggcggcatccatggccatgcggcgcgcgccctgctcactggcaacgctctcgcaaagggcaccgtagacaacaccggccagatactccggaatgatcgcatcaaagaccgccttgctgtccggctcatacagcatcagactttcgtgctcgtagcccggatcagggcgcggcgcatcgaaaggcagaaccggcagcacggtggccgtctgggtcagcatcgagacaaattgcgtaaaaccaaggcgtatctcatcaaactcccctgccagaaacttccggcagaccagccgcgaaatttcaaagcagtcgctgaccgacagatcgcctgcttcggcaaagcttgtggtcagaatttcagccttacggcgctcaaaatgctcgaccgcttttttgccgatgggcagcacacagtagtcgctgccctgcgcgtcggcctcgacagccttcaggatattggagttatagccgccggccaaaccgcggtcacccgcgatgacgatatacaggcggcggtttgtcgcccgcttggcgaggtaggggctgtcaaagtctgaatctgcactggcgatgtcgtacagggtacggtagagcgtttcaaaatacgggcggctgccctcgacgcgctcctttgcacggcgcagcttgctggacgcaacaagctccatggccttggtgatctgcatggtgctttcgacgcttcggatacgcagcttgatttctttcatggaaccggccatcggcggcacctcctttgcagtttatttttctttcagaaattcagccgtaaagtcggcaagcacctgcttgagctgctcctccgtctcaggcttgaggtcgctggtggtgcggatggtctccatcacaccggcggcggtgacattctcgtcaaggtaagtgtacaagcggctctcatactcggcaatatcaggcaccgcaacctctttgaggtagccgtggatcgttgcatagaggatagcgacctgcttttcaacggcaacggggctgttgcggtcctgcttcaacacctcaacgatgcgctcgccctgtgccagacgcgccttggtatcggcgtccagatcggagccgaactgcgcgaagccctgcagctcacgatactgcgagtagatcagcttgagcgtaccggcgaccttcttcatcgccttgatctgggcgttgccgccgacacgggaaaccgagatgccggggttgacggcggggcggatgcctgcgtggaacagctccgtctcgaggaagatctgcccgtctgtgatcgaaatcacattcgtcgggatatatgccgagacatcgccggcctgcgtttcaatgatgggcagcgcggtcagagaaccgccgcccttggcatcactgagcttggccgcacgctcgagcaggcggctgtgcaggtagaaaacatcgccgggataggcctcgcgtcccgggggacggcggatcagcagcgaaagcgcacgataggcaacggcatgcttggacaggtcatcgtagatgatgaggacatgcttgcccttgttcatgaaatattcgcccatggcgcagcctgcgtagggggcgatatactgcagggggctgagttccgatgcggtcgcacagacaacggtcgtgtacgccattgcaccgtttttctcaaggttctccaccagcgttgccacggtagagcgcttctggccaatggcaacataaatgcagaggacatccttgcccttctggttgatgatcgtatcggtcgcaatgaccgttttaccggtctggcggtcaccgatgatcagctcacgctggccgcggccgatgggaatcatcgagtcgatggccttgatgccggtctgcagcggctgcttgaccggctggcgctccagaataccgggagccgggctctcgatggcgcggtaatcggcagcctcgatggggcccttgccgtcaatgggctggcccagcgcgttgaccacgcggccgatcataccctcaccgacaggcacggagacgaccttgccggtacgcttgatggtactgccctctttgatgccttcatcgtcaccaagcaggacgatggagacgctgttttcttccagattctgcgccatgccgtaggtaccgctctcaaactggaccagctcaccggccatacagttatcaagccccgcagcgcgcgcaataccgtcgcccaccatcgttaccgtgcccgtctcggtctgctcaatggcattctcatagtacttgatctgggaacggatgatgcgggagatctgttcgggtttcagttgcactgtttggttcaccacacaatctatagaatgggtgcaattcctttaaagggtggcaccgtcgatttcctcacgcagtcgctccagatggcgctgcacggtaccgtccaggcgtgtgccgcccatatccagccggatacctcccagaacggtggggtccacggtctcggtcaggacgatgtttttgcctgtcatattctgcaattttgccagcagcttttcacggttggccgcagtcagcgcaacagccgacaccgccgtgacctcgagaatatcgtggtcggcgttgtagcggtcgcggtacgcccgcaggcagccgggaagctcagcgatgaggtcctcctcgcacagaagcttgaggaagttgaccaggtacgggtgggcaccctcgaaggcctttgccagcaggtcgcagcgctcctgtttaggtacgctggtcgttgccagcagccgcagatactgcggctcagccttgatgctgtccaccgcggtctgcatttcctgtaaaagccgatcggtcagagcctcctctgccgccagatcatacaggctgccgccgtagcgtttcgcaagctcggtcatgaggcatcccccacattccggataaattcatcgatcagggcctgatgatcagactccctaatctcgcgttccacaaccttgcccgcgatctcaacagccatgccgccgatctcgtttttcaggtcgttgacagccttcttgcgttcctgtgcaatgtcagcctccgccgctgcgcgtatggacgcagcctcggcctttgcctcgttgacgatctcatcctcgcgcttctgggcacgggcggtcgcctcacgcagcattgtgtcgcgttcatccttaatgctctgcagatggtccgcatattccttctcaaggtcggcggccttctgcttggcagcatcggcatcggcgtacatcgtatcgatctcctgctgacggtcatcgatcatctgctttaccggcttgaaaaggaactttttcagcacggcaaaggtgatgagcatattgcagaaggtaaacagcgcagtccacgggttgacgcctacaaaactttcaaagcccgtcatgagctattcctccattttcggcagtagtatcagaagacgaagagcagcagcagcgcgatgaccagcgagtagataccggtcgactcggtgatggcgcagcccagaatcatgttggtacgcaggtcgttggccatttcaggctggcgggccatgccctccagcgccttgccgacggcgttgccttcaccgatagccgggccgatagcaccaaagcccattgcgataccggcgccgatagcgcaggcagcttttacgattgcagcttccataaaagaatcctcctaaaataataaatacagtgtcatgcttctgccgggggcgggcaggcattgcccacatacaccattgtcaacaggctgaaaacaagggcttgtacgccgccggagaaaatatcaaaatacaggctcaggatgccgggaacgccaacctccagataaggtacgcctgtcagccccaagagggaaagtgcgccggtcacagcaaagaccgtgccaaagattttacgggccatttttttgcccttgacgccgctgtacagcagcgccgcaccaatggcaaggatcacgatgcccaccacaaagctgcggcccacaaggcccagcacggcagccgagacagttgccagcgccgaatagaccagactggtcagaacgctgccgcctgcaatgttgccgaaatgacggaacgccatagagatcggctgtgcgatttcagagacaaggttcatcggcgtcatgaccacgatgggctcggtaaagcccttcagccagccgcccacgccgttgcgcttgatggaacagccccagcatagaaagctggtcatcagtgcccaggtaaatgtcgtggacagatcagcggtagacgagcggaaaatgccggtcatgccgataaacgaaccgcagatcgagctgaggaacagcgcgccgatatagggcgtccaatagctgttgtgcttgcccatcgtgctttcgaccatgtcgtagagcatcgtcacgcccttttcaacaagcacctgccgccggccgggcctcttttgcaggttgccgcccagcacaacggccgccgtgcagagcagcaccatgactacaaaggaagaaacggtcgtctgggtaatgtcgatgccgccgagcagcggtatagtaaagtagattttcggaccattcatggggttgaatcaccgtccttttcagactttgcggggtccttacggaaaaattcgatcagcttcaggctgacctgtgcaaagagcagcggcaggatcgccgccaccgggtcgcacagctttgcccggaagatcaggatatagaagatcaccagcactacaggacgcaccacgctggaggtctggatctcaagctgtgccttctgggggctgtcgccgttggcagcgcgatccagcgcgttggacaccgtgatgctcagcgcgaggaagttgcccatggccagcacaaacccaatcagtgcaccaaccagcacttccgtagtataataaccggccagcgcatacactgccagcatagcggcgatacaaagcgccacggcaatagccaactggccggactgccgcaaaatgtcctgatgcttgcgcaagggttatgcccctttctaatgtttattaaaggaaaccgatggcggctgcttgtgttccgctgcctttccctgcctgtccagcgcctgcagcgagctgcgcagacagctgacagccgccagcacaccaatggccacgcccacgactacgacccatccgcccagctgtagctgacggcgcagccagaccgcacctatgatgcacaccacaggcggaatcacaacggacaacccgaactgggtcagccagaccagatggcgggcggcatcatataggcttttcattatactgtcccctatctttgccgtatactcacagtatacaacagagcacgctgtatttcaacagttatttttcacgcacgccctgtattttgtatagttttcatactatgttcacaatttccggtatggtaaattctgtcactcagaaatgcagctgctctgcctctccgggcgcaggcgccgttatgacccccagtgtcagcaataccggatagaggtagcttgccccatagcagccaagctttttagggccgctgatctcaatccccgcctcctccaaggcggcaatttttcccagcgcgttcgctacggtagagaccgtgatcgacttctgccgccgatccacaaacaactccccgccccggatcgtgtaggtaaagggcaggcccttggctgtgtgaaagacctcctgttggtgctgctgcagcagtgcccagacagcatctatcgaatcgggcatggcgcattacctccttagtataacggataaacaaatagaaacgcaatgtacaaaaaacaccgcatgaccaaaatcatgcggtggaattggacaggttacttcttctgtccgaaacggtattcggtgccgttgcgcagccgctcaatgttggagcggtgcagccagatgaccatagcggccataaggcagcagcagatcgtgctgaacacaaccgtcggcacgcctgcgccgtgtgcgatgaggttgatgagggtaccgacagggtacagagcagcgatgataatgctgccaagcgagacgatatgggtaatcgcaacctcgatcaggaaaacgaccagcaggactgtacagacgagcggctcggtggcaagcgccgcacccgcaccgaccagaacgcccttgccgcccttgaagccgaagaaaatcgggcggctgtggccaatcatacagaagatagcggccagatacgcaccgcaaaccgggtccagcgggttctgccagcctgcccccgtgccggaaagcagggcatcaaagaagaagcggcacagattgacagccaccacgcttttgcccacatcgcc

SEQ ID NO: 14130 - DNA, 3027 bp, Unknown
  gut microbiota DNA sequence
cctcatccggccctgcggggccaccttcagtctccgcgctaagagccgcctacggcggttgcgctccgacacgcgcctgcgggcgcagccccttaggggaaggctttaagaaacttagccgttcacggcctcgtgcagggtcttgcggacggcgccggggccggcgatttcggccttgaagtaggccttgatcttgtcggccagcacggtcttggtcagatcggtgccgaagatggaggcattgctcaggatgccgtccagctgatcggtgacggtctcgggcttgccgaactcgatgccggcgagcttggcctgcaggtcgtccttcagcgggtcggcggagacctcaaaggcgttgccgttgtcgtcgatggccagcaggtagcgcagccagccggcgatggccagaggaatggaaacaaggctgttcaggtcgcggccctcggcgatgtagctcttgatggtctcgccaaagcggatgccgaccttctgggaggtgtcggttgcgatgcgctgcggcatgtcgggcatgaaggggttgggcaggcgctgctcaatgacctcgtcaatgaacgccttgggggccaggatcttcgggtcaacgacgaccggcaggccctcgacatagcccagacgcttgatcagggcaacgatgtcctcgtccttcatctcggcgcagatcaggtcgtagcccagcatgcagccgtagacactcatggcggtgtgcagggggttcaggcaggtggtgaccttcatgcgctcggtcttgttgacggtctcgcggtcggtcatatagacgccggccttctccagtgcggggcggccgttggggaacttgtcctcaacaaccagatactgcgggcgctcggcgttgacgaacgcggcgataaaggtgttcttggaggtgacgatgggagccatgccctcgatgccgtccttctccagagactcctcaaccatcttgtgggggcgcggggtgatcttgtcgatcatggaccaggggaaggtgatcttgctctcatcggacaggtagtcgatgaagtcctgaccgacgaagcccttctcgagccaagccttggcaacggtcatgacgctggcctgcagcttctcgccgttgtgagagcagttgtccatgctgacaacggccagcggggcggcaccgttctggaaacgctccagcagcagggcggcgaccatgctcatggcgtggcgtgcgtgggcaggaccctcgtcaatgtcggcctgcacaacgggcatcaggctgccgtcgggacgatagagggcgtagcccttctcggtgatggtgaaggagatcatctgcaggccgggatcggtgaagatctgcttgaagcgggccatcatctcggcgtcggcagagttggcgcgcaggccctcggccacagagccgatgatctcgcggctggtggtgccatccgggttcagggtgacattcatcgtcaggttgtcatacggggtgtagatcttgtcgatgatgtcgtagtcgaaggtgtcggctgcgatgatgccgcggtcggccagaccctcgttcagcagacgctgctgcagggcggcgataaagccgcggaagatgttgccggcaccgaagtggacccagatgggatgctccttggtggcggcggtcatggcggcgtggtcaaatgcgggcagcttgacgcccagcttttcccactcagccttctggttgacgatggaagacgcgttcatctgcataatgatttgctccttttgttgctgttgagggagtggtcctatatgccactcgcgatagtttcagtatagcacgcaacttttcgcaagaaaataaccgtagttgcttgaaaaattgtaaaaattgcggtaaactaaacctagcatcgaaaaaggcttctcccatgggggagaagctgccgcagcaggcggctgatgaggggagaacttgccgcaaaagcccttttacggggcggcagcggtacagccgcccctcatccggcttcgcttcgctcagccaccttcccccctaggggaaggcttttgaggagttcccctatgtcaaactacaacccctacaccaaacgccagacgatgatcgcgcccgactatgaggtctaccgctaccggtctacctacatgaacgaggtcgagctgcaccaccatgacttctatgaggtctacctgctgctgcgcggccgggtggaatatatcgtcgagaaccagctctaccgtgtgcgccccggtgactggatgctctgcagcccgctggagctgcatcaggcccgcattgccaccgacgccgatgcctatgagcgaattgtgctttggattgcgcggccgtatctggagggcttgtccactgcgcacaccagcctgacccgctgctttgataccacgattcccggccatacgaacctgctgcggctgcccggcgcgaccggcgcgccgctgcgcaccacggtggacaagctgtgcgccttaaaggcaagcaaggactacggcagcgacctgctggcccagagcgcccttgtggagctgctggtcgggctgaaccgcgccgccgccgaccgtggcgatgcccggcctgtcggcacgagcgatcaggtggtggatgcggtgctgcactacatcaacgagcattacagcgagccgctgacccttgaccagctctcggagaagttcttcatcagtaagtatcacctgctgcgcaagtttgatgcacaggtcggcacgaccgtacaccggtatattttgcaaaaacggctgctgaacgccaagcagctgcttgcgggcggtgtgccgccgaatgaggtctgccagtactgcggcttcggcgattacgcaaatttctaccgtgcgttccgggccgagtacaaccagacaccgagacagtatatccagagtgccagggggaagtgagcggctgaaggattaacggcagtctcccgggaggttgttctttcttttggcagcaaaagaaagaaccaaagaaaactgccgctgtttcgacgcagcggacccgcgacctaggggctg

SEQ ID NO: 14131 - DNA, 797 bp, Unknown
  gut microbiota DNA sequence
attggtgcgccgaatgcgtcacttctcctgccggtcatatcccttttggacggtcattcacttgtcaaggtactgtgtggtacgaaattaccaaccgcaatcatcatagcgtactatccttgacaaaacaatgattctgcgataccatgagtgtaacggatataactgaattatataattaccataaacaaaggcaggggatagggatggagaatcagtttatacggcatgagccatgttttgagaggattttgtttgtcctgacgctggacaggaagaaaatgaaagagcggattttgattggggaagaacagcagatccgcttccgtctgaacgggagccaaaacgcagaggtgctttgtgatatgacacgcccactgggaacttttttgataaactttgagcgtgacacggacagagactggaacttatacgggctttctccgctgcggcaagctctccactccaaccgatggaaacagccggagctggagcaggcggcaagcgaatttctttgggagaaatatcttagcaacgaccctctgaaaatgtatgtggcgttccgtatctggaacagctatctgcttgccagagaacctcgtgaccgtaacgctgcctgtgaccgcttcatggataaaatgagcagcctgaccggggtattccataacgaaaccatgatctttgacagagaaacaggaaaaccgaaacattttcaaactggcagcctttatttcaaaggcgcaccgtcagaagatacccggcttgacctctggttcccggacaaccggcgcacagaa

SEQ ID NO: 14132 - DNA, 2269 bp, Unknown
  gut microbiota DNA sequence
gtgaagaacagaatagcaacggaacaataagcatagcaacaagaattgacagccacatccacaaataacagtctttacagaaatgaggaattgctcaatgtctgcaaaaattattacaattgccattgaaaagggcggcacgggtaaaaccgtaacggcctccaatcttgcttacctgatgggcgatgaagggaaaaaggttctctgcgtggataccgatccacaggggaatctcaccaaagcgctcagcggcggcttgagcatcacaagtgatgaattctacggcaaggcgctctataatcttttcgacggcttcctgtatcatagcaagacgcgagactttattgtagaaacgcagtatgaaaatgtagatatgatcccgtgcgacgcgcaaacgccgcggatcaataagcgcattgagctgctgattggtgatgcagagcgcctgaaggacgatgatccgaggaaggtttccggtatgggagattttctgtactatttcctcaaccaggtgcgcgatgagtacgattacattctaattgacacacagcccacgcgtgacagcctgctgctttccaatgcaatctatgcagcggattatatcctgattccggccggctgcgaggataactccgaagaatcggcattccgcctttactatgaatgtaataagatgaagcaaagctccacttcgcacctgatgggtgccggtgtattactggtaaatgtggacaggagcgcggcaacagataagaaaattcaggagcattttaaggaagaactcggcacatcgctgttcagtgttgcaatccctgccagcaagacggtgaaaacatccatttcccgctttttgcctgtgtgctatatggcaaaaacacagcctgtggcaaaagcctatgtgaaagcctacgaagagttgaaaaagcgtctggaggtgaaatgatatgggaatgaagagtcccgccaaaaagaaggaaatcgtaaagcgttcccgcccgacggatgcggagcttggtaaaatcgattccaataacggcgatgcagggaagattatcagtgatctgaccgcaggacataaaagcattgaatacgaatcacgggatattgcactgtacgatattcgtgtaaacgcggacaacgaaatcttccggcaggcagatacccaagaggatattgtgcagctggcggaggatattcagcgcaacggcctgatgcataatcttgtggtatttccgcaggaagaaaatgggaaaacggtgtatgtccttctctccggtgagcggcgctaccgtgcgatggagtaccttgaaaagagaggcgacgccacctggaacaccatcaaaaactgcaatgtgatcacaacaagcctgtcggaaaatgaaaaaaaggtgcttttatacagcgcgaacctgcaggttcgcggtggcttggcggacgaacagatccgccgcaaggctgttgcagaattcgtgatatgcctacagagcgagccgttcaatatgacagaaaaggacgctaagaaggcaattaaggaagtgagcgcaaccaccgccaagcagatcgaccgcgatttccgcattgaggaaaagctggataaagagctgcttcgtcttttggacaataagttcctgacccgcatggagtgtgaaagctatattacgctggagccagaggtgcagcataaaattgcgcagtgctatctgttgctgagcacggtagatgtgagcaactgcgacaccgatgcacaggagcgtctgctgcaggagcgcaacagcatacattatgattttatccgggccattgacagcgccagaaaaaccaacgagccggacgagcgggacgaacgcctggagactgcgtttgcggagtgcgacagcgcaatccatctgctgcagaacacggtaggggagtaccatgccgccgtcagccagcatgatacgaagaaggccgaagagatcgcaaaggatgtggccaaggatcaggaggcaaagcgcgtcgagaagaaggagcaaaagagcgagtctgaaagcgcgacctttgtggaaaagacgctccagcctgttgccaataaaatctttaagaaaatgagttcaaccagctataagcgcggcgtcagaaagatgtctcaggagcgccgtgacaatgatgttgcgattctgaatgagctgatcgagcaggcgcaaagtctcaaggatttgatcgaagccgcaaagtaaggcagggtaggggagacactgtcccggcaacaaaggcaacaccgcacaattcc

SEQ ID NO: 14133 - DNA, 2786 bp, Unknown
  gut microbiota DNA sequence
aataacactactgtctggtggaacaataaaattcatgtaatcaaggacaaggaaatgtttatcaacctaacagagggaattttctttctggaagatttacaaacaaagtaaatcaattccagtttgtcgggccgctgcgaaggtttgccgcagccaccggtttttccgacagggttgcacgccccgccctacgttttatagtaaaaatgtgcccgcttgcgcgggcacattttgcgttattctgctttttcctgtctggcagcgttcagcagctgcctttgaaattcccgggccgccgtattcagcggacggtgccggtcgtagatcaggcttactgagcgctgcgggatctcctcccgcagggtcagctgcacaatgctgcggcgatgcagactgccgcgggccatcggctccggtacaaaagcgaggccaagctcactttttaccagcgtcatcatctggtctgtggtggctgcctcaatatccggcttcagctcggcgctatgctcaaggaaaaactgccggtaaaacaggcggctcatgctctcgttccccagcatgatcagcggataagcgccaagctcctgcagcgaaagcgtctgacttgccagcgccgtgaaggttttcccgccgactaagatttcattgaacggcatcaagtcaacctttttcagttccccctccgccccggtgggagtcgtcacaacagcgaaatccacctcgccgtttttcaccgcctgaatcgcctgcggcgtcgagtggttggagatccgcagccggataccgggatactgctcatggaaatcccgcagccgctccgacaggtagatgttcaacgccgtctcggttgcgctgatgctgatagcaccatgctcaaaggtcgcgctggcgctcaactcctcctcagcgtcctgtatctgcacagcagccgaggaaatgcgtgtatagagcatctccccctccggcgtcagcgtcacaccccggttggagcggataaacagcacacagtgcagctgatcctccagcttgttcatcgtatgcgtgatgttgggctggttgctgcccaacacgcgggccgccttggtaaaattgcggtattttgcgacatagtaaaaaattttgtagtattcccaatcgacatacataggcgctgcctcatccataccaaaatcacatagtcattatgtggtaaatactttttacacattctatgtcacaaagtataatagcaacgcaacccaaaagcaagctaaaatttacccctagaaacaaatttgaaggatggcgaaactaaatgctgaccgcagtaaccggtatcaactggggcgatgagggcaagggccgtgtcattgacctgctggccgaaaacgccgatatcgtagcccgctatcaaggcggaaacaacgccgggcacactgttgtgaccgagcagggcaaatttgttctgaacctgctcccctccggcatcctgcacccggatgtcgtatgcgtgctgggcaccggcatggtcattgaccttgaccatctggccggggagatccgctccatcgaggaacgcggcatcaaaatcagccctgaccatctgaaattgtccgacaaggctacgatttccctgccgtggcaccgtgtacaggatggccttgaggaggaccgcctcgccaaaaagggaaaagcgtttggctctacccgccgcggcattgcctatgcctacagcgacaaataccgcaaaaagaccctgcgtctgggggatctcttgcaccttgatgaggagcgtatccgcagcaggctgcatgtgatcctcgattccaaaaacatggagctggccggctgttatcatcaggagccgatgtcctacgaggctcttctgaactggtgctatgcgcaggcggcgcaattcggaccttacatctgtgatgccggtgcctatctgcaggcagccagcaacgcaggcaagcgcattgtgctggaggcacagctgggagccatgcgcgatattgattacggcatcttcccctatacctccagctccaacacgctggctgcctacgcccccctgggggctggtatccccaatgtcaggctcaaccatgtggtcggcgtgctgaaggcctattccacctgcgtgggggccggcccctttacggctgaaaaggcaatgccggaggcatggatggaatccctgcgcaaggccggcggtgaatttggtgctgctaccggccgcccccgccgcgttggcccctttgactgtgttgccagccggtacggtcttgcctgtcaaggcgcggacaaaatcgccctcaccaagctggatgtcctcagcggcatgaaggagatccctgttatcaccggctatacgctggacggcaagccggtggcagccttcgaccccacagatgacttagaccgtatggagccggttgtaacgatgctgcccggctggaattgcgatatttcccactgcaccctgtacaacgagctgcctgatgaggcaaaagcctacattgaatttctcgaaaagcagcttgtccatgttatccaatttgtttcgaccggtgccgagcgtgatcagtacctgctgaagggcacctggctctgagccacttccgcatctttctgtgtgccgtcccgttatctttccaaggcggcgtctcccctctcccctgcccgcgtttgcgggtgggggcttttttgtttgccgccttttgcgcgccccccagagaacgcaagagagcgcctctgcggcgcgttttactgcgggcagctcttctttcattggtcgttcattt

SEQ ID NO: 14134 - DNA, 587 bp, Unknown
  gut microbiota DNA sequence
ggtctggtgcaggcttgctcttttcatggcaaccagcagacaaaaaacacccacagcgacggctgtgggctttgattcaatcatgatttgcagatgctcccagcgcacggcaaagcggatgattcagcagcataccggcgataacataccgataggagtgaaccgcaccgtttcgcatcgtttgcggtatccgctgctttcgtaccagcttttccagaacatccatctgctctttcaaaaagtaaaaagatatctgtggataaatcttgtcatctaactgtgttgcaataaaccggctgacaacctttgtttccggaaacagataataggccgccttgttctgctcgatttctgcttcgctggccagatattccctgctgttcacaatcaggcagttgtcagcaccgaccgccataaccttatccaactcggactggagcagccgattggcaagagtgcctacgcggatatcctccacagcagcctcatccacaagcgtctcccgaatcaggagccctacccgaaggttgaccttgactttttcttctttcattcgcatcaccctttgggcaataccgcataattct

SEQ ID NO: 14135 - DNA, 1448 bp, Unknown
  gut microbiota DNA sequence
aaccgcctgccgctggcctactttgaaaagcgcaccgtcggcgaggtgctgtcccgcatcacaaacgatgtcgatacgctcggccagagcctgaaccagagcgtcacccagctgatcaccagcgtcaccacgatgatcggcgtgctggtcatgatgctctcgatcagccccaaaatgacgctgattgcactgctgatcctgccggtatcgctggcgctggtgctggtggtcgtcaaattcagccagaagtacttcaaggcccagcagaccaccctcggcgtggtcaacggtcaggtcgaggaggtctacgccgggcacaatgtcatcaaggcgttcaaccgcaaggccgctgtgctggatgacttcaacaccgcaaatgacaagctgtacgaatccgcgtggaaatcccagtttttgtcgggcctgatgcagcccatcatgagctttgtaggcaatttgggctatgtggcggtcgccattgtgggcagcatctttgccgcagcgggcaccatcacgatcggcgatattcaggccttcattcagtatgtccgcaactttacccagcccatccagcagctctcgcaggtgtcgaacatgctgcagagcatggccgccgcagcggagcgcgtctttgagttcctgaacgaggacgaggaggaccagctggccgaccctgcccgccgcgccgaccccgccagcattgacggacaggtcaccttcgaccatgtgcggttcggctacacaccggacaaaacagtcatccacaacttcagctgcaatgtcaagcccgggcagaaggttgccatcgtcggccccaccggtgccggcaagaccacgatggtcaagctgctgatgcggttctacgatgtggacgccggtgccatcaccctcaacggccacaatgtacgggacttcgaccgcagcgccctgcgcgagggcttcggcatggttttgcaggatacatggctcttcaagggcaccatcatggagaatatccgctacggtcggctggatgccaccgatgaggaggtcattgccgctgccaaggccgcgaacgccgaccactttatccgcacattgcccggcggctaccagatggagctgaacgaggatgcctccaatgtcagtcagggacagaagcagcttttgacgattgcgcgcacgattctggcggacaaccgcatcctgatactggatgaggccacctccagcgtggacacccgcaccgagcagcgcatccagactgcgatggaccgcctgatggagggccgcaccagctttgtcatcgcccaccgtctttcgaccatccgcgatgcggatctgatcctcgtcatgcgggacggcgacattgtcgagcagggcacccatgacgagctgatcgaagccggcggcttctacgccgatttgtacaacagccagtttgaggatgtctcggcgtaaaggcttcc

SEQ ID NO: 14136 - DNA, 1559 bp, Unknown
  gut microbiota DNA sequence
gtgtcagttgcatgacaaatatctgacacaaggaggcgcatccgccatgaagcgcagcaatatccatctgcagtacaacgccccggtcacgctgacctttttctttctgtcgcttgcttcgctggcgctgggtcatctgaccaatgggtggacaacccatcatcttttcagcgtctatcgttcttcgctggccgatccgctgttttttgtccggctgtttggccatgtgcttgggcatgtaggctgggaccactttataggcaatatgctgcttttcctcgtcattgcgccccctttggaggagcgctacggcagccgcaccctgctgagcggcatcctcatgaccgcgcttgtgtccggcatcctgcagtgtgtgctgttcccctcctccgccctgctgggtgcctccggcatcgtgtttatgctcatcatgctgtccagtctggccggcagccggaacggcagtatcccgattaccctcatcctcgtcggtgcgctctacctgagccaacaggtatatgatattttgttcgtacaggacaatgtagccaactttatgcacatcgtcggcggtgtctgcggcacggggtttggctttgccgtgcgcaggaaataatatgcggaggtttccctcatgaagatccttatcaccggttttgatccgttcggcggggagtccgtcaacccggcctatgaggctgtcaagctgctgcctgacaccattgccggggcacagatcatcaagctgcaggttcccacccggtttgccctttccggtgccgtgctggaagctgccgtaaacgagcacagacccgatgcggtcatctgtgtcgggcaggcaggcgggcggtctgccatcacgccggagcgagttgccatcaaccttgcggacgcaagcatccccgacaatgcaggcgaccagcctgtggatgagccgatccggaaggacggtgcgcccgcctacttcaccaccctgcccgtaaaagccatggtgcaaaaaataagagccgccggtatcccggcagccctctcctataccgctggctcctttgtgtgcaactccctgatgtatacgctgctctatctcatcgacaggcagtatcctgccatgcggggcggctttatccatgtgccttatgcaatggagcaggccgtcggcaagccgctgggaacccccagcatggatctgcaccaaatcgcgcgcggccttgcgcttgcggtagaagcggtcgttgaaaacgagcgcgacctcaccttgaatatgggcaccctccgataagcgtatcccgaaaaatcagcaccttgcatcatatcggacagtcacactgcttctcgccttcggcaagcttgaccttgcagaccacggcatcgtcaagcagatagacgactctggcggaggcataggcaatggcgatcggctcggtgcagcccatggcggggatcagctcctctttgaggatctgcacatatgcctgataggtcctgctctgcttatccatacaaatgactcttttggctgctctgcaaggtgtccgcagtggtgacaagtatagacattt

SEQ ID NO: 14137 - DNA, 11226 bp, Unknown
  gut microbiota DNA sequence
cattataacaaaaagccgggcgctctcaaacgggagcgcccggccatattcattgactatgcttcagatcagtttgccttctgggctttcttggcggccttctgggccttcttgaaatccttgtaggccttgtactgctcagtcttgcgcagcttgcgggcaccgaggatccaaaggatcaggcccagcacaaagaggatgccggaaatccatgcgacagcgataactgctgcaacgatgccgggacggatcaccttgatggtggtgtcggcgccaacgccgttcatgccgcaggagttggcaatggcatacaggttatggtggcaagcctcacgcatggcggtgacgatgacggggtcattcttgtactccggcagcttgtcggtgacgaaggacatcatggcatcgtagatggacacaccggccatgacaccatcgggaccgttgacatactgggtcagcacgttatcggtgatgaccatgccctcgcagccccactcgttgcgcaggatgccggtgaccagaccgtagttgccgccggaccagatggcaccccagcgggtgtaggcgatcataacgccgttggcgttgccgacctcaacaggagtctggaaggccttcagatagacctcacgggcagcctgctcgttcagccatacgcccagaccgatacgatcctgctcacagtcgttcagcgcaaagtgcttcatgacaacatggacgcccttttcctgaatggcggcgacctcataggcgctcatcatgccggacaggaagccatcctcagagtagtactcgaagttacggccaccgtagggagtgcggtggatgttgttgccggggccgtacaggcaggcaatgttggcgttcaggcagttgttgccgatgaccttgccgatctcggtcatgaggtcggtgttgaaggtggcagccatgacatcctcagaggtgaaggcggtggcggtcagctgggtcttgttgctgcccagcagactggcggtcagaccctgcgggccattctcatcgcgggtgccgggagcctccacgctcttaacgggcatggtccagtggaaggcatcgccaatcagggagttcatctcatcgaaggtcatctgatccagcagctcatcccacttgggatcgttgtagtcgaggccgatcatgtcgtacagcttgacgccgttcttggcgccgagggtgggcatctcaacgctctcgtagtcggcagcgtcgtagcggacctcctgcagatccttcttcagcagctcggtcagggtcagcttgacagtctcggtgggcagggtgccgttccagtcagagcggctcagccaagtgacagtctcctcaacaccctcatagaggttggggtcagcgcaggacagctggttggtaatctcggtgccgttctcgctggtggcgtaggtggtggtatcgagggcgtcctcggtccatgtgtaggtcaggtcggcgttgccgtcggcagtcatcttgccgttggtgttctcgaccgtgaagcccttggcagccagaatgttgttgacagcgttgtgggcatcggtggcggcggtgaagtagtagtcaccggcgtcaaggatataggtgccggcaccgtaggtgtcgtaggaagcgatgtcacgcttgttgacggtcatggacagcgtctcggaagcgcccggctcgatcataccggtcttgccgaagccgaccagagaaacggcagacttctcaacgccgttctgcttgtcgtagtcggtgtaggggctctggacatagacctgcacggtctttttgccggccatggcaccggtgttggtgaccttgacggtgacagtgtaggtgtcatcggcggcattgtagttgaccttcatgtcgctgatgtcatagctggtgtagctcaggccgtagccaaaggggtaggccacgatgtcgccgtaggcgtagtcgcccgcgttgccgctgccggtgacgaagtcctcgtagcgggtctcgtagtacttgtagcctacatagatgccttcctgataaatcatgtaggacttgctctttgcgggcacatcgccgccctcaacataaccctcataggtggtgggggtgaagttccacatggcaggggcgctgtagttgtcgtagcagtaggtatcgaccaggctgccggaggggttgaccttgccggtcaggatctcggcaacagcgttgatgccggagatgcccacgtcaccgacccacagagcggcatcgatgtcgtactcgttgttcttgaggaaatcgacctgcagggcgttggcggagttgatcagcacgatggtctttttgacgatgccgttcttcttcatctcggcaacattctgcagcatggccttctcgttctcgtcgagggccagatagttgacatcgccgtaggcaaggtcagcgccctcgccgccaacgcgggagagggtgacgatggcggcatcgccgtactgggcaacgctgttcttcacatcgtcggtgtagacatcccaaggcacctcagcggtgacctcactggcggtggcaacggtgccgctcttggagcgggcgtagtccttgcctgcgccgacggtgtagaagtcccacagggtggggttgacggtcacaccaaccttctcgagggcagtgcgcagggtgtcggcggtggaggcatcaatgttgccggagccggtgccgccgtacacgaggttgacgctgctgttggagaaggtgctgaccttggcatcggcagccagaggcagtgcattgttgttgttcatcagcagggcagcgccttcagcctcgacctgctgggtcagggccagaccgtagtcgaccatctcctcagcggaggcaaagtcgccggtaaaatactgggcgttggtgtcctcgttctgcagcttccagaaggtgccgccgtaaaaagcggcgaggctgttgtcgaatttctgggcaagcacggacaaaggcacggaaatgaccataacgaccgcacacaggatcgtcaggatcttccacgccagaacgttcttgcgctttgcctgtttgtaggcttttttgagcgctttcttttgggctttgatctcgtccatgattctctccttgttttttctttaacagtttatctgttatcgctattgtacacaatttgctactgccatttcaatagcttgcgataaacggtcgcattttatgcatattcggtttttcaggaacaaaaaaaccggtcgttcgtttgtgcacaatgcacaacaaatggccggtatatctggtaattgcgcttgtttcttcgctggttcgtgcgctgcggcgcccttaatactctatcccctcccgcgcgggaatgccctgagtgtaggggtgccggaccgcgcgcagctcggtcgagtagtcggcggcctcctgcatccacggtgccggatcacggcctgtcagcacgacctctctgccctgctttgccatcgctgccgcctgccccagcagtgcctcgtccacaagctgatgccgacaggccgcgcaggcctcgtccagcaccagcaggtcaaagggggtatccagcgcggcgcgcagcgccgccgtattgtgctgccggtcctccgtgcgctcggcctcggtcatgagccatgtaaactttgcgttggggcaggcatggacctctgcaccgcagcggcgcagcagagcgatctccccgctggtgccgtcctttaaaaattgcagcaccaccacacggcggccgtggccgagcgcacgcagtgccagccccatagccgccgtggtcttgcccttgccgtccccccagtacagatgcagcatggcgccagcctccttataatgtataagccgtttgcaaaaagcgcttttcgacaggcttactctataataatgtaaattcagtatactgcaaggccgccgccgtgtcaattacagggcggccgcctgcttttttgcaaaatacgcaaaagcgccccacccaaagctgctatgctcgggcggggcgcagggtatgctttgcctgtattcagcttatgccttcacagtcggcttgaccttttctgcaaggatgcagagcagcacggtcagcaccatggcgggcagggtgtagcccacgggggtatcaacacccattagcaggcggtaggcaaggaagccgatcagccagatcacgagattccgcgcatcggcggccaccgcaaagcggtcacgcctgaggataaaatgatctgcgatctgcacggcgatcatcggcgcaaagaccgagccgatcagatacaggaagccggtgatgtcgtccatcgggaagaggatcgcccccgcgacaccgatgaccgtcacaacgatggcggtctttttgccgtccagcttgggcgtcaggctctcggcagagataccggcgctccatgcatcaaggaaggtcgtggtaacggtcgagaataccagaatcacgagtgcggcaatgcccagaccggccttgaccatgatgacggcaatgtcatactcaccggtgaagatggccgcgcccatgccgatgacatacatccagcaggatacaaggccgtagacgatcacgctgacccatgtcgcctgtgccggcttttcagcatcgcgggtatagtcgctgatcagcggcagccacgacagcggcatcgccaccgccagctccaccgccgcgccgaaggtcaggctttcgccggtaaggtcgggcatggcattgccggagaagaagataaccttgcacagcaccagcgtaagcacgaacaatgctgccatcgtcagcttgttgagccagcccagatcggtgatgcccaccgcgatccagaggatgatcagtgcgccgatcaccagacaccagacccagcggccgatgtcaaagataccgccgacagccagtgcgccgtcatagatcataatggccgtccagccgaccagctgcagcacattcaaaaaggcgaacagcaggccgcccttctggccgaagctcatcttgacggtctccatagcactgcggccggtgcggccgccgatcaggcccgccagcagcatcatggcgcagccgatgatatgtccgacaaggatcgctgccagacccttggccatgcccagcggggcaaaggccgtgcccgtcaaaatttccgccagcgaaacaccggcgccgaaccagatcaggccgttctgaagggtagatgtctttttcattcggtgaactctcccttcaatgcgaacatatgatccatcgggccggagccgtgcccgatgtcgagcatggcagccagtgcgcccgagatgtacgccttggcgcgctcgaccgaggtgtcgaggtcatagcccttggcaaggttagacgcaatggcgctggatagtgtgcagccggtgccgtgggtattggggttgtcaatgcggcggccgcggaaccatttgccggcaccgttacgccagagcaggtcatcggcgtcgttgatctggtggccgcccttgcacagcacggcacagccgtatttctcgctgatggtctgcgcggccttctccatatcggcggcatttttgatggacatgccggagagtatctctgcctcggggatgttcggggtcagcacctccgccatcggcagcagccttgcggtcagtgcatccacggcatcgtcccgcagcagcttggagccggaggttgccaccataacggggtccaccacaatgtgcttggcgccgtactcctgcagcttgtcggcgatcgtgccgatcagctctgccgaggataccataccgatcttgacggcatcggggtagatgtcggtaaagaccgcgtcaagctgctcggccagaaaatgcggggtcgtctcaaaaatgtcggtcacgccggtcgtgttctgggcagtcagggccgtgatggcgctcatggcaaaaacgccgttagcggtcatcgtcttgatatctgcctggataccggcgcctccgctggaatcacttccagcaatggtcaatgctgttttcatcgtaatacttcctttctttatctgtacagcaaggttttataacgcggcacaaggtggtgcccccgatgtaccgcgagggggggcaagttggtttgcaggggtcagggcacgcccgcccctgccgcgcggcggaaattcacatctctgtaaggggaatctcccccaagcgcttcacatatagatccgccgtctttttcaatccggcctggtcggcttcgccgttggcatcatacacgccgacggtgataaaccctgcggctttggcggtttgcagggcgtagaggctgtcctcaaacaccactgtctcgcgcggggcggtgcccagacgctcggcagccatccggtagatgtccggcttatgcttgctgacgccgatctcccctgttgtgaagatctcggtaaaatattcgagcagccccagccgcgcaagcgcccttgtcacatgggcccgcgggctggaggttgccgctgccatcccgatgccccgctctgccagaaatgccagcagctcgggggcaccgtccttggcagggacctcgttgtaatagtagtcctgcagcatctcctcgatgcccgcgccgacctcctgcgccgtcatgggcagcgcgtaccgcgcctgcaggtaggccgccccctgctccatactcatggaaaagaggatctcattcaggcccggctccggtgcaacgccaaggcggcgcagataccgcgcccccagatcgttccagatgctcatggaatccagcacaacgccgtccaaatcaaagatcgcaccgttacacatgcagcatcttctccgttgccagcctgaggtctgcagaggccttttgaatatccttcgccgcgtagatggcgctgataaccgccacgccgcagatgccgctgcccgcaagctgctccacattcgattgtgcaatgccgccgatggccacgaccggaatggataccgccgcgcagatggccttaagcgtctcatagctcacatcatcggcgtcatccttggagccggtcgggaacaccgcaccaacgccgaggtaatctgcaccgtgcttttctgccagaaccgcctgctccacggtatgcgctgacacgccaaggatcttgtccggtcccagaagggcgcggacatcctgcgcctccatatcgctttggcccacatgcacaccatccgcatccatctcgcgggcgatctcgacattgtcattgacaaggaacggcacgccgcgctcacggcagagtgcctgcagttcctttgcctctgcaaggaagtttgcttcatcaagggtcttttcccgcagctgcaccatcgtgacgccgccgtccagactctcgcgcacgacatcgaccagccggcggccgtccagccagtggcggtcggtgacggcgtagagcagcaggtcctttttatcgcagttcataccgtgcgcccccgttcagcgtctcgccgtccatattgtagatggcgtcaatgatgcggttgcggtaggtggagttgccgtcaccctcggccatacggctccagccgatctcaccggccagacccatggcgcagacagcggcagcggcagcctccagccggttatcggggttggccacaacaaaggctgtcatcataccggagagctggcagcccgtgccggtgatcctgcccatctcggggcggccgttgcggatgacatagcagctcttgccgtcactgacaagatcgatcgcgccggtcacggccacgatggcgccgctcttggcggcaaaatccttgacaaacttcacagcattgtcaagattttcctcagtcaccgcgtcagccacatcggcatcaacgcccttggtagtgccgctgcccagcgccagcgtcttgatctccgagatattgccacggatgacggtgaagcggatcttctccatcagctccacagcggtgttggtgcgcagcgcagaggcaccggcgcccacgggatcaagcaggaccacatggttcagctcgttcgcctttttgccggcgcggaacatcccctcaatgctgcgctggttcagtgtgccgatgttgatgttcaggccgccgcagatggcggtgatgtcctcgacatcctccggctcatcggacatgatggggctgccgccgcaggccagcagaatgttggccacatcattgacggtgacatagtttgtgatattgtggaccagaggcacgcctttacgcacattttcgatgcaggtacccagcatacaaaagcactcctttataaataaaaatgcggacatgcccgcagaggcacatccgcatcaagacgcaaaaaagcgcagaaacgactatttccctacgttggcattatccaaatcaggttacgggtcagggcaatacagcccactctcagcctgctttgcgcaagctccccatttctgtacagtttttacagtagcacactattctgttttttgcaaggtggttgtccgatttttttgtatttttttgcaggaatcctctgccgccccgccaaagcgggtcaagcagatggctccttcttttggcgcatcggtatcaggacccgcagctcaaaccagccgtcatgggtggtgatggtggccgtgccgccgtacttggtggccgtgttctggatgctcttgacgccgaagccgtggtagcgcccgtctgccttggtcgttacaggcaggccgttttcaaactgcagctcgccgtcatagcagttttcaatgcggatggctgcaaagcccttttgccgcgccacactcagatggatcagccgccgctccgggtcagcgaccttggctgtaccctcgatggcgttatccagcgcattgccgaacaggttgctgatatccatcacatccataaagtcgagtgccgcaccgtccgcgaccaccgtcagctggatattctgggcacggcaggtcaggcttttgccggtcagcaccgtgtccagcaccttgttgccggtgtcgttctgggcctcgtaggccctgatctcctgctccatccggtccagaacggcgttgcgctcctccccgctctccgaccgcagcaccgcgatctggtgcttcaggtcgtggtatttctggttgatcagatcaacgctctcctgcttggccttatagttctcatactgcagatgcagcatattgcgcagggcatcggcctcccgctgggtggaaagatcgcacagctgcgattgataggcaaacagcagcgcgacacccccgaagtaaacgaccgagcgcatggtgtagatctccatcgtgccgcgggccgaaaagggcgttttaagtgtcgtatagctgatactgctcaggatatagatcgctgccgccagaccggccgcaatggccgccgtgcgggggcggatgtcaagctggacgctgccgatgtttccaccgtcctcgaccagccacatcagcccgaagatcagcccgaaccccgccgcaataaaaagcaccagcgccggcagcccctgaagcagcgggttatccttggcaaagtagacatacatctgccatgtcaatgatgccgcaaaaccggccaatataaaggcgcgcgtacagaaaaacacgacctgccatcggtcggcgcgggtcgccgccgccataaagagcagcataagcgccaccgacacggcgtacagcacattgaactgccagccgtcaaagccgtctgttgcaaccagatagaccaccagcacggcgaacgcccctgcatagagcaccgcccgccttacaccgccgcagcgcggcggcagaaaccgcagatacaaaaggcaggcaagccagtcagccgccgctgtgaccagccggggaatgtccatctcataatatgggatattcaacggcatatcctcaccccgccccgtttatatagtcattcagcgcgtccaaaaaggccttgcgccgcgcccgggcgatgggtacgcgctccccatggaccacggcatcctcgccatccatgcagtccacatgctcaaggttgacaaggcagcccttgttgacccggaaaaagctgtcctgcgcaagccttgtctccgtctctgccatcgagccggacgccgtcagcgccccctccgccgtatggaaaacgaggtcatgaccgcagctttccacccagtagagcgcggctgtgtcgattttatgggccgtgccgcgggcgttgatctgcaggtagtgccgtgcccggcgcgctgtgcgctcgatggcgcggctcagccgctggctgaacgcatagtaggaaaccggcttcagcacatagtccagcgcatccaccgcatagcccttgatggcatactgaggcgagtttgtgatgaagatgatgatgacctcggtgtcctttttgcggatttcctcggcggccatcatgccgtccatgaatttcatctcaatatccatcaggataatgtcgtaaaccgccttgtagccaagcgcgatctcatcaccatcggaaaattccgtaacggtaaacttttcacccgaggcggcactgtatttatcaatatactcccgcagctggctgcggtacagcgtgtcatcctccaccagcgccaaacggatcatatcggtcacttcctcacagagcagattgcatcggttcctatacctatctattttatgagacaggcgcacaaaagtcaatctgcgtttgggaaatcatgccggggcttatcggatcagcgctaccgccacatcattcacatttgttccggtcgggccggtaaaaagcagaccgcccacggccttgagcgccgtgtaagagtcgttgttgttcaaaaccgcaaaggggtccagccctaccgcacgcagcgccgccagcgtatcaccgtccgcatagccgccggcggcatccgtcgggccgtccgtaccgtctgacccgacgctgaaaaccgccgcatccatccccgctatgccggctgcggccgccagagccagctcctgattgcgcccgccgcgtccattcccggtgacctttaccacagtctctccgcccgccagataggccagcggccgggccgggctgcggtgggtgcgcacaatatccgcaaggaatacgcccgcctcccgcgcctgacagctcagctgatccgtcaaaaggatcggctcatagccgagcgaccttgccgcagccgcagctgccgcacaaagctctctcacactgccggtgatccgcgcctccacattgtccagatgcttcggcgtttcacgctgcagacaggcgcgtgcttttccggacagctgcagcccgtactttttt

SEQ ID NO: 14138 - DNA, 2179 bp, Unknown
  gut microbiota DNA sequence
gcgacctcttgcgcatccctgcaggttgacgaatccgcacaggccgggccgctggcgatcatatcgagcgggtcgcccagaatatcactcagcacgatgcaaagcacctgcgccggggcgcaggcctgtgcaaaccgcccgcccttcacggcagacagccgcttgcgaatggtattgatctcgacaatatccgccccgcaggcaaggagctggcctgtgatgtcctgcagttcagacagcggcaccagcggctgttcaagcagggcactgcccccgccggagagcagaaacacgaccgtatcctgcgcaccgagatcgcgcacaagcgcaagcgccgccctcgtcccccggcaggagccctcatccggaatgggatgcccgccctcaaagcatgcaatgcccgccagcggtcccctgctgtggccgtactttgtgatgacaacgccgcgccggatgcgcccgccaaggcaggacaccgcagcatgggccatctgccatgccgccttgcccgccgcgaccagatacaccccgccggtgccgaagtcatagctttccagcgcacggatgacggccacatccggcagcacggcgtggatacccgccgatacgattttttcagcatcctcatgcagcagctgattcatgaccggttttcctccctttaactgccttcccggcttctgctaccattatacggcagttcccgcacacaggcaacaaaaagcgcattttcatcgcagaaaatgcaggtcaaagaatcactttcttggcctattttaatgtgtaggggcgagcattggtcacccgtggccgtgtgcggcaaaagaaaagtgcccgggcggatatggaatccgcccctacggcgtaggggtcggcgtcctcgacgacccgcggaagcttccgccgccacaaagttcctgcgggctcacccctacacagtgcctttgggacagtccttctgtgctttttcctgttctttgcgcagcagcatacagtcggtttcgcggcgcagcatcagcaggatcttcagttcgtccgcgctcagctccagtccggccctctgaaacagctccagcagcctttgggtataccgctcctctgtcaggcggggatattgctccgccagctgcagcagcccctcctgaagctcccggttcgtatcgagcacccagttaaagcagacggcatcctcaaattcaagcggcgcccgcttttttctgcttttccaaaaccatttcatactgattcccctattctgtgcatgccgtttataccatgataaaagaaacacgcagaataagcggcttttcttcgtgaaacagcgctttttctgcgtgaaatatttatatgcgggtcatgtaggcaaaataggcgtttttcatctcgccatagccgctttggggaatcgggatatgctttccgtttgtcagcagcagctcgcgggccgtcagcttgcggataaaatccatattgacgatatacgcccggtgcggccggacaaatgcaggctgctccttaagcgcctccatcaattctgccatcgtggccgacacggccagcactgagccgtccgccagcgtacagacctgattgtggttgaagctttccacgcacaccagctcacagaccggcacgcggtagaagccgtccttggatttgagcataagggacgggttgttttccggcagcaggcggtggatgcagtccagcaccgcgccgtcaaagtccggcttgctcaccggcttgatcagatacccggcagcctttacgctgaaggcgtccaccgcatactctctggagaccgtcaaaaacaggatctccgcccgctcttttctctcccggaggcgtctggccaaggccacgccggtcatgtgcggcataacgacatccagcagatacagatcaaacccgcctgctttttctacctcgtccagcaggtcatacggctggccgtaggcctgtatctgcaccggcgtttcggggtgttcctcagagaagcggaccgccagctcccggatgcgggcaatatcctcccggttatcatcgcagataccaatgcgcagcacacctctcacctcctgtatttgactcctgctttaaagcatagcataaaccgcccgaatccgcaacctgcctgcgccgaatgtgaccttgtttttgaatcgaaaacaatataaat

SEQ ID NO: 14139 - DNA, 23632 bp, Unknown
  gut microbiota DNA sequence
gacatgctacatatagttattatccacagttatcgagtaggtgttatcaatgccgataacaaaatgataacattagctcgtataggcaggataatatggatatatcaaataatcaaaagaacgagaaacattacagagaataattcctaaacaaaaagcgttagtctttgtagagtttgaataatcgcaaaacctaaatagagcccgcatattgaatgtgctaacgttcaatatgcgggctctttctttttgctgacttcgttttgactcccgttcgtaaatttgaggtcaataaacgatatttgaagcaaaatcataaggtgcattactacaatttgctgacaagcagtaagctaaattcatatcttgcagatgttgaacagcaggcgcaagacctttttctccggctggtaaaagacctcgccgaaaaagaaaatgtaaccgaagaactcaaagccaccgatatgatgctctgggtgcagaagatgaataatatctgtaatagggcaacggagattgtaaatgcggaattgatttacacggtataaacacaacgacggcagggagcaatccctgccgcaatttaatttgtgctaaacttgacgttgacgtgattatatgatatactttatctacagagatttaggaggtaggatatggaatcctcagaattgttagagtggctgataagtgaaaaaaatatgagcattcgctctgcgaaagatgtaatttctcgttgcggcagagttcgcagaatgttacatacagactctataagtagtgatacattggataatctacaaaacaatgatgagtttgaagagagttctatgtttatcaagtcgcagttgaaaagagctgtaacattatataatgaatttgaaaaaacaacaacgaaggattagtatatgaaagaacaacttacagtaggaagtatgtttgccggcattggcggaatttgtttagcttttagacaaaatggctgtaaaatagtttgggctaacgaaattgataagtatgcttgcaaaacatatagattgaactttggtgatgaatatcttattgagggcgatattcaaaaattagatacgaaagatatccctaaatttgatattttaacggcaggctttccttgtcagtcattttcgtctgttggattgttggaaggcttcagcgaccctagaggaaatttgttttttgaaacggtaagggttataaataaaattaaacctcgagttgtttttcttgaaaatgttgcaaatcttgtaaaacacgatgaaggacgaacatttgatgttatacttaaaacacttggagatttaggctactatactgtttataaagttatgaatgcaaaggaatatggaaatattcctcaacaaagaaacagaatatatatagttgcattcaaatataagaaaaatgttgaaaaattcaaatttcctgacatgttgccattaacgcaaacagcctttgatttgtttgataagaaaaaacaagaagaaaaatattatatggatggtcatcgtatgtggaatagaatgatggaatatatggatgaccgtaaaagagtttatcgttttacagattgggggctttccagaggaatggaaggtatttgtccgacgcttttggctgcaatgggtagtcgatttgagagaattccatttttttatgacgatttttctgttaggttaatgactcctcgtgaatgtgctagattgcaaggatttcctgaaggttttattttaccaaaagaaaacgaaaaacaagtctataaacaaattggaaattctgtttgtgttccagtagttagtaggattgctggaaatattgttaaagcattaaattaggagaaaataaatatgagacaatataatgtaatggatttgtttgccggtgttggtgggttgagttatggcttttcaatgcttccacaatttaatattatagcggcaaatgagatcgaaaaagatatttctattgcatatgaattaaatcatcctaatgtcagaatgttaaattgtgatataaatgatttgacggaagatattttaaatcaggcactaaatgggcaaaaaatagatatagtagtgggcggacctccttgtcaatcatattcaactcttgggaaaagacaaaatgatgagagagctaacttgtttatgcagtataagagaattcttaaaattctgcgacctaaagcatttgtgtttgaaaatgttaccggaatacttagtatgaataagggaaatctttttaaacaaattcaaatcgaatttgaggaacttggttatgatttaaaacacaaagttttggatgcagtcgattatggtgtccctcaacatagagaaagagtaattcttgtgggcattaaagaaaaaaacaactttgtttatccgtctccaacgcatggtgaaggattaaaaccatatgtaactttgcgagaggcaataggagatttaccagtgctaagaagtggcgaagaaaataatatttatgccaccagtgctacgaatgagtttttgaaatttgtcagaaaaaatgccgatatatatgttggagaacacaaggcgcctaaaaacggtgaacatctcatcaaaataatgcaaacattaaaggatggagagtctaaagatgatttgcctgaaaatattcgccccaaaagtggctatggcaatacctatgctaaattatggtgggataagccttcaacaacaataacgagaaattttgcgtgcccttcatcttctagatgtattcatccaagagattcaagagcaatgtcaattcgagaaggtgcaaggttgcagagctttccggatgattataaattttatggctctgatggaatgaaaagattggaaataggtaatgctgttccaccattgctttctgtcgcaatagcaaaacaaatgcttcaggcactaaaagaatacgaagctgcaaattaagcagcttcgtttaagtgtcagtacagtatatccagatagttaggaatatcatcaagaaggaaccatcggaaagcttcatttggaatagcaaaaaccttctgaccttccatttgagaacgagtttcccagtggacgctattgtcattaatgtttgtaatatctactattgccattgtcccattaaacaaatcaaaatgaacaacatacgagtatacttgttcttgttcatatgctcgcttagcttcccttaccttatgttcttttatatcatttactccagtatatccagattgaatctcaagcctaattgttttgctgtcaatttcaagttctaagtcagcaactggagatttagaaaaggtttcgatatcagacaaactgtcgtgcccaacggttttaatggaatcttcttggaccccaaatatttgtgacaatgctggcgtgaaaaacttacaaacgatatagcctctcatccagttataatacaaatcctctggagaccttccattattgttcagtcgaggaaaaatattattttctttcataaccaaataagcactgtcgatctcattttgtatagggttcaagttttcccagtgtacactttgatttactgcttggttaatttcctgaaatatttcttttagcctttgattgcatttttcgattttgtcccaattaatagatacaatatctgtcgctttgaaatgcttttttaatgttgtttggtttgtgaagcccaacttccttctataatttctactattaaatggcatttatattattcccctttaagaagtctataaattttttcatagttgtgatgaaattgcagttgtccttgatgccattgtacaaatccaaaaggtagttgaatggtagttccaccataagatgatccataatatgtttcactgattgcgacatcttgaacagcattacagatgtcttcgataaagaaaatatcattggtatcattttccccaagtagatttatgtaccatacaaaatcagaccattcatcgctgtcacgaactgcacccatagaaaatgacaattttgcaagttcgtatgcattttcagtaaaccattcaagtaaaacaaaatatagatgttcgtcaaaagattttaaagttgttgcatttaaacttttgtgccttagttgaaggtcataatctttttgaatggttctgtcaccataatgctcgataatatcgactgcatcatcggatgccgcccaaaatagattaattgctctttggacatcagctggaatttcagtgttaaactgcttttcaaatgtatcaataaaaagtccggctctaataaaatatacttgtccaccaagactcttcttaatagatacattaattacttcatctgtatcaagatatactttcaagtcagttttggactttgtttttctaccgttgacactaggaacatttgtttcgtgcaaaccgccaatacttgttcgtatgattgaggcgtcggatctatttattttttttagaaaatctgcttgaaaatctttgtttttgtctaaattgatttttactatgtcctcatttttgtgacctgataatttagcgtgcttccaaccagttgatctatctctatgttccatcatttatcctccaaaaacaatttatatgtttcaatttcaagtgcatcagctatacgctgaatattttcaagcgaaatacttcgacgatagcattcgatagcactaatatatgttcgatgcataccacatttgtcagcaaaagcttcttgtgacagccctaacgcaatacggtatttcttcaagttggttccgaaaacttttacaatatccatagttacaatcctccatagtatgtagtataatatgtgtgaatacaaaaagtctacatacaataagtaactcgaataatttgaaaaaatgaatgaattacacatttgcgcatatactaatacactatgtttattagaggtgtattatatgtgtgacttgaatcgtgaatttgaacttcaaatttggagggacagcattgaatttgggaagataaataaaggtactttatcttttcaaatttttcagagaataacaaagaaataaaaatcaaaggagagattaaccttcccgccgggactttgcctggcgggattttttcattgcatggggcaggggaaagttgtacaataaaagcaaaagaacggcaaaaggagaagaactatcatgaaagaaattcctattacttcattccggaatctcaagatcggtcaggcagagaacacggcggcgggcacaggctgcacggtgtttctgctggggcaggaaggcgccccggcggggctggatgtacgcggcggcgggcctgcctcccgcgagagcgagctgctcaagccgctggcggcggcacaggtcatccacgccattgtgctggctgggggcagtgcctttggactggacgcggccggcggcgttatgcggtatcttgaggagcgcggcatcggttttgatgtcggggtcacaaaggtgccgctggtctgccagtcggacctatttgatctgaccgtggcagacgcccacacccgcccggatgctgccatggcgtatcaggcctgtgtgaacgcggaaatcggcaactaccgcgacggcaactatggcgcgggcaccggcgcaaccgtgggcaagctgctgggcatggaccactgcatgaagtccggcatcggcagttatgccgtgcaggtggggccgctgcaggtcggtgcagttgtggctgtcaatgcgctgggcgatatttacgactatgaaaccggccgcaaggccgcaggcttgttggcggatgacggcaggaccttcctcgactccgagctgcttgcgctgcagagcattgaggtaaaggaaaacaaattcgtcggcaatacaacgatcggtgttgtctttacgaacgcgcggtttgacaaatcccggctgtgcaagatcgcaggcatggcacaggacgggtatgcgcgtgccatccgcccggtgcataccacggcagacggggacagcatctacgctgtttcgctcggcgatgtggctgctgatcaggatgttgtgggggcactgggggcgcgtgtgatggccaaggccgttctgcgggccgtgcaggcggcggagcctgcctatggcttcccggcggtcagctgcctgtaaggcagcactgcacgatccctgcactgcggggcggccgccagcaaagcggcaacgccgtaaaataacactccggggcgattgcaccgccccgttttttggcgtataatatccctgaatacatcaccgatcatggggagaaccattttactatggcgaagctggacgaacaaatcaggacaatgaagggatattttgaggccgactgcgaggcggagggcaagctctccctcgggctggaggtggagcattttgtaacacactctgacggcagggcggtcacatttgcacagctgcaggcagctttgcgggagctgcagcagcagggggatgcccccgtcatttcggaaagcgaataccttggcttccgtgctcccgcactgtcggcggttatcggcccggcctgccagctgaagatcactatgacgccccagcgggatgttcaggatatcatggacagctacaaccggttttatctgcagctgtgcctgacgctggctgcctgcggtctgcgcgcgtggacagtgggataccaccccacccagcgtgctgaggcactgccgctgattccccaaaaccgtgccgaggcactggaccgctattttaagaacaccggtgcctgcggcggccagatgctgcgggctaccgcagcaacaagactttccattgattatttcagcgagcaggactttgtgcgcaaaatgcgggcggccagcctgctgacgccgttctttgtgctgctcagcgacaatgcgccggtgtatcagatgagccgcaacagcgcctatggcatatctgcccgcgtgcggcaggatgtggaccgcgaccgctgcggggtgatcccgcatctgatggatccggatttcggctttgcccgctatgccgagactgtgctgaccaagccgcagatcgtggcctggcgcacgaaccgcaccaaggcggtaggcagcaagaccgccccggaattgtatggtgcgcacatcaaccgaagggaggctgcacaggttctgtcgatgtttttctatgatgtgcggctgaaatcaagaattgaactatgcgctgcagactgtatgccaccccgctatgtcgcggcgtatttgcagcttgtcaaggccgtgttcggcagcccggcggcgctgcagaatgtgctgcgccactatagcggcgttacaacgctggatattacggacgcgaagcgcgcggtctgtaaggacggctacaatgcacttgtctacggccgccccgccggcagcgaaatcgcctggctgctgatgcaggcccgcagccgcacaccctcgcaggaggagcgcgctctgctcgacccctttatgacattgctgatgaaccgcaagacgatccgcgaggtagaaaactacaacgaataatccgccctaccgcagcacatactggcccaaagggggcgtgtgcagttgcgggaaacatcgtatcatgcggtcattgcggagatgacggtccgcgccctgtgggagatgcagaatgtgatggactgcatccccgatgagctgtgggatacctgctacggcggcgcgccgctctggcagcatgtttaccacacgctgcaccatctggatcagtggttcatcaacccgcgcgacaatgattttgtggaaccgccggtccacacgccgcatctgcaggagctttcaatctatccggcggcccacctgagcaggcacgatacggacgattatttttacacgatcaaggcgaagctgtctatttatttgacttcgctgcacgatgaggacctgctgcagcggccggaaaactgcgagtggacgcggtttaccctgattttggcacaatacaggcacctgtatatgcacatgggtatgctgatgggctttgtgcaggcggagaccggtctttgcccgcgcaccctgcaggtcgggcaagatctgccccggccaccctacgacccgtatgaatgagaggcatctatgaaaaaaatctctgtcgcggccgcggcgctggccgctttactgttgagtggctgcgcccggactgcggaccccacccctgtatggcagacggatctgcccgttaccggggtacatatcgagttgagcggtgctgagcttctcagcgatgcgccggtcctgtacgcccacacgcgggaggactcggcaaggaacaactatctggatatgcctgccgtgcaggcggagggggcgccagtcgtaacattttacggtgtcacggcagatgatataagccttgtctttcttgagagcatcggcgagctgtatgttgattatgaccgcgtaaagccacaggtcgagctggattatcggctgacacagggggatgacagcgtgtcctatcggcttgacacagcctacaattttgagtttaccgtaaaaacacagcaggggagcgataccctgctggttgtgagcagaagaagcgatattacggaataaaaataccgcccaccagccataaaaaggccgatgggcggctttctttatgcgttttccggcatgtccactgtcaccgtggggaaggcaaagctgcagccctcggcgcggaccagatccagaatctgcaggttcagacagttcttgaccttgagaaactcccgcagggagacccttgaaacatagacgcggcaaagcaggtcaatgctgctgtcgttgaatttatccagcgttacgctgacgccgtccggcagcacatcagggtgggcctgcagcagcgcagccagcttgcggcagagcgtttcaatcttgccgcgcggcgtatcgtaggtcaggccgatggtaaaggcccacaggcggctggtgcggcggtcgcagttctggatgtattcggagcagatctttgaattttcaatcgtgatcgccacattgtctgctgtgcggatccgggtcgagcggaaggaaatatcctcgaccgtgccctcatagctgccaagcaccacataatctccgatgccgaagggatgctccagcacaagggtgacgccggcaatcaggttggacagcgttgactgcgccgccagtgagaccgcaagaccggcgaccccggcaccggtcagcagaccgctgaccgggaccccaagctggtccagcatggcaatgccggtaaaaagtacgacaagcgcatggaagatattctcaaaaaagcgccccattgtctggttggtggtcatatcgaggtggttttcggcgctgtggagcaacagccgtgttaccggtgcggcctgccagctgcccaggccgatgaaaacggtgacgagcaggccggatgccgtgccaaggagcctgctgaatacctccccatggacaaagctgaaggggaggagcgtgacagcaaagcaggccagaaggacccgcaggatcatcgcaatcggcacgatatagctttccagcagaatgtgcagccaggatgcgatatgcttttttatgcggctaaggaatttgcgcgccagaagcttgtaaagctccggcagtacggcggccagcgctgcaaataccagcgccgggatcaatgtgccaaagtcaaaggccagttcagatatttcagacatggagtgaaaccctcatatttgtgcgccgctgcgcggcggcaacggaaaaacttctatccaattatagcacaacctcttgcattttgtaaaacctgtgctataatctttagcagaaagtctgtttcagggcggggtgcaattccccaccggcggtgagcggcgttgtgccgcaagcccgcgaccggctgtgtaagcagccgctgacccggtgcgattccggggccgacggtatagtccggatgaaagaaacggaaagctgtctgtattgctttttgtgcgccctgctgtatgcttatacggcggggcgttttattttgcaatgcgcggagcctcccgggttcgtgaatcggctttcacaaattatatcgggaggaatctcaccatgcaaaactctgtcaccaaggtccgcaaactcaccggaaccgccatgctcggcgcggtagctgccgtgctgatgtatctggaatttcccattcccatcatgccgtcctttatcaagctggatgtctctgagctgcccgccctgctggcggcgtatgcctacggccctgtgtccggcattgccgtctgcctgatcaaaaacctgatcaagctgcccagcacaagcaccgctgccgtgggcgagctgttcaactttgtcatgggcgcgctttttgtcggtgtggccggcttcgtctataagcgcagcaagacccgccgcagcgcactcatcggcgcaggtgccggtgcgctggtcatggcgcttgtcagtgtgccgtacaactattttgtggtttacccggcctatgtggtgctgtaccacctgccgctggaggccatcatcggcatgtatcaggccatcaaccccagcgtggacggacttctggcctgcctgctgaccttcaacctgccgtttaccctctttaagggattgctggacgcagcgctctgcttcctgatttacaagccgctgtctccgatcctgcacggcagaaagtaaggcgcgcggccagccctaaccgcaaaaaaccacacacggattgcagaatgtcctacttttgtgcaaacctgccgaactgcacaacgaattatcgttgacttaaacaaaaatctgtggtatagtaacttcacaacaacagaatagcaacttatcaagagcggctgagggaacaggcccgatgaagcccggcaacctgcgtgagaacgcaaggtgccaagtcctgcgggaaaccgaaagataagcgttttgcgcgcagtcttttcggctgtgcgcttttttgtttccgggggttgcgtttctgcctaaatttacaggaggcttatacaatgtccaaagttcttttcacatccgagtccgtcacggaggggcatcccgacaaaatctgtgaccagatctccgacgcaatcctcgatgccattctggctcaggaccccggtgcccgcgttgcctgcgagacgacctgctccacgggccttgtccatatcatgggcgaaatcacgaccgactgctatgtcgacattcccggcaccgcccgcgaggtcatccgctcgatcggctatgaccgcgccaagtatggctttgactgtgagacctgcggtgttatcaccaacattgacggccagagtcctgacattgcgctgggcaccaacgatgaggttgccggtgccggtgatcagggcatgatgttcggctatgcctgcgatgaaacgcccgagctgatgccgctgcccatcagtctggcccacaagctggccaagcgcctgaccgaggtccgtaagaacggaaccctcagctacctgcgcccggacggcaagagtcaggtcacggtcgaatatcaggacggcaagcccgtgcgtgtggacgccgtggtcatctccagccagcacagccccgaggtcagccaggagcagctgcatgcggacattcgccgcgaggttattgagaaggtcatcccggcagagctgctggacgagaacaccaagtactacatcaaccctaccggccgctttgtcgtcggcggcccgcagggtgactccggcctgaccggccgcaagatcatcgtggatacctacggcggctatgcccgccacggcggcggtgccttcagcggcaaggaccccagcaaggtcgaccgctctgctgcctatgctgcccgctgggttgccaagaatgtggttgccgccggtcttgccaccaagtgcgaggttgagttggcctatgccatcggtgtggccaagccggtctccatcatggtcgataccttcggcaccggcaaggtggccgatgagaagatcgagcaggctgttgagaaggtctttgacctgacccctgccgccatcatccgcgagcttgacctgcgcaagcccatctaccgccagctggccgcctacggccacatgggccgtgaggatctgggcgtcaagtgggagaacaccgaccgcgccgaggccctgaaggccgccatcgccgaataattgctgcttatgccgcgccccgcaccgccaccggtgcggggcacttttttgtgcgcagggcaaaggcggcctttccaaaaaatatatctgcaatcctgccaaacattttacatcagtaccgccgatttttggtttgccaaatgccactgtatggggtataatatctttatctgtgaaagtgcggcgattttgcgggaaaggagggcaaggatggagcagaacgaacagcagctgatgaagctggagggcacggtcgagcatgtgatctacgaaaatgccgataccggctatgcggtttttgaggtcgatgcaaacgggaccgatgttgtggtggccggcaatgtgggcggcgtggacaacggcatgtccgtgacggtttacggccacatggtcaaccaccccagctatggtgagcagttccgtgccgagaccatcgaggcccgcctgcccgaggatacaagcgccattttaagctatctttccagcggcgtgctgccgtatatcggaccctccaccgccaaaaagatcgtctcccgctttggagaggacaccctgacggtcatcgccgagacgccgcagcgcctctgtgaactcaagggcatcaccgagcagaaggccgccgtcatctccaatgaattccgccgcatgtacggtgtgcgggaggtcgtggcatggtttgcgcgctacgggctgaccgcgcagcaggcagtcaatgcctaccgcgcctttggcccacataccgtggaggcgctgacccagaacccctacctgctctgcggggagccgctgcagctcaaatttggtcaggtggacggtattgctgccgccctgcagtttgagacaggctgccgcctgcgggttacagcagggcttttgtatgcgctgcgccacaatgcaggcaacggtcacacctgcctgccgcgcggcaagctgctggaaacgacctctaaatttctgcgggtggctccgccagagatcgaggccgggcttgaggaactgctctcaaccgaggagctgcgcagccgcacctttgacggtacggagtatatctatctgcctgatctctacgctgcggaggaggatattgccgcccgcctcgggcagctatcgaccttcccaacggaggcacccaaaacgctggatactgacatacgcgcgctggagatcgcacagggcttcgcctatgcaccgctgcagcagcaggcaatccggctggcgctgtccagccgggtgatggtcctgaccggcggccccggcaccggtaaaacaacaacggtcaatgcgatactggccctgtatgaggctatgtatgaccgtgttgcgctctgtgcgcccacgggccgcgccgccaaacgcctgagtgagctgacccaccatgcggcctcaacgatccaccgcctgctggaggtggactacagcaccggcaatgtgcggtttatccataacgagaagaaccttttaaaatatgatgtcatcattctcgatgagatgagcatggtggatgtcaagctgtttcaggccctgcttgcagcggcgcgctaccactgccgcatcatcatggtgggggacgctgaccagctgcccagcgtggggccgggcaacattctgggtgagatactgcgtgccgatgttgtccctactgtgcggctgaccgatatcttccgccaagcgcaaaaaagtctgatcgttcagaacgcgcaccgcattgtggagggacagatgccccaaaagggcggggcgcaggacgatttcttcatgattgaggccaacggccttgcctgccagaagctcgtctgcgacctcgtcagcacccgcctgcccaaggcctacggctttgacccggtccgggatattcaggtgctttgcccgaccaaggtcggcccgaccggcagcgtggagctgaacaagcgcctgcaggagatcctgaacccgcccgccaagggcaaggcacagcttggcacggcggagagcgccaagatcctgcggctgggcgacaaggtcatgcaaatcaagaatgactatgacatcacctttgagcgtcagggggcggaggccggtgtcggtgcctataacggtgacatgggcgtcattaccggtgtggatgtggacgcccgcagcgttacggtgcagatggatgaccgcaaatatacctacaccgccgaccagcttaatgagctggagccggcttacgctgtcacggtacacaagagtcagggctcggagtttccggctgttgtgctgccggcagccgatgtgcctgcccggctgtgctaccgcaatcttttgtataccggtgtgacccgcgcgcgcaggctctgcgtgctgacaggcacagcccgcaccgagcaggccatggtgcagaatgtgcgccagaacatgcggttcagcggtctgcgctacctcttaaaagaggccgcggccccggcagacaatggcaataccaacttagctatggagaacgatccatgaaacaatacgacatcggaattgatctgggcacgacctcgatcatcattgcgaccgaggagcagggtgttgtgttccgccagccgaccatcggcgcggtggatacccgcaccaactccatccttgcagtgggggacgccgccctgaagatggtgggccgcgcgcccgctcatatcgaccttgtgcgcccgctgcgtgacggcattatacaggaccaccgcatgacgaacgaactgatcgtgcggtttgtcaacgaggtctgccgctcccgcttcttcaagccgcgcattgccgtctgtgtgccggctgccatcaccggcatcgaggcggacgccgtggtggaatccgtcatggcggcaggggccagacaggtctttctggtggatgagcctgtggccgctgcgctcggcgccggtctgcagattcgccagccgcacggctgcatggtcgtggacatcggcggcggctccaccgatattgctgtcatcagcatgggcggccgggtcaaggcggccagcctgccggtggcgggcaacgcctttgacaactgcatcgcccagtatgtgcaggaaaaattccagatcgccattggcccgctgaccgccgagcagctgaaaaagcaggtggcctgctgcaccaaaagcgaatttgaaggtgttatggaggtgcgcggtcattcttgggagacgaacctgcctgcccgccgcgttgtctacacccgcgatctctatgagcctgtgcaggagctggccgcccgcattgccgctgccgcccgcaatgtgctggaaagcaccccgcccgaactggcagcggatgtatcctccaccggcgtgctgctgaccggcggcggctctctgctgcgcgggctggcaagctatatcgcaggggaactgcacaccgatgtggccattgcgcccgacccgctcaactgcgtggcgcgcggtacggccatcagcttgagcgagggaaaatatcttaccgcaggcttccgcgatgccacgcctaaaagctggaacaagcgcctgaaccacacctatgaccctttctctgcggagtgaagtgtggtatactataataagtatgtacgcgcttgcgaagcaccgccctgtaggaggcgggtatgcccgacccctgcagcgcagtaacatttaaatccatccatgaaaggacttcccatgccagacatcaccaccgaatatctcgccctgcgcgatcaatatatcgaagcccgctttgcccggcttaactctgtgcagcggcaggctgtctttgccaccgaaggcccgctgctgattctggcaggtgcaggctccggcaagaccaccgtgctggtcaaccgcatcgccaacatcatccgcttcggctcggcccacggcagccgcgagctgccccgccctgtgaccgaggctgatcttaacgacctgcgcaccgctgtggccaacggccgcgaccttccccgggaaaccgcctatctggccgtgcgcccggcccggccgtggaatgtgctggccatcacctttacgaacaaggcagcaggggaattgaaggagcgtctgcgcaccatgctgggggataccctcggcggtgatgtcaacgcctccaccttccactccgcctgcgtgcggatgctgcgccgcgatgccgagcgcatcggctttcccaaaagctttacgatctatgattccgatgaccagcagcgtgtgatcaagcagatctacaaggatctgatgatcgacgataagttcctgcctgtcaagtcggccattgcgcagatctcctccttcaaggataagctcatgtccgccgaggaggtggccggtgagccgtttgccaacaccaaggcgcagcttatctccaaaatttacacagcctacgcaggccgcctgaagacggcgggcgcgatggattttgacgacctgatcttccacactgtccggctgctgcaaaacgatgccgaggcgcgggaatactaccagaaccgcttccgctatgtcgttgtggatgagtatcaggataccagtgtggctcagttccatctggtgcggctgctcgcaggcggcaccaacaatgtatgcgttgtcggcgatgacgaccagtctatctataaattccgcggcgctacgattgaaaatatcctgaattttgagaaggtgttcagcggtgccaaaacgatccgtcttgagcagaactatcgctctaccgcgaatattctgaacgccgccaacagcgtcatcaaaaacaatatgggccgcaagggcaagaccctctggaccgagagcggagacggcgaaaaagtccaccactatacagccacgaacgagcaggacgaggccagccatatcgccgatgtcatcggcgagcatctgcgcgagggcgcgagcctgaaggaccacgccgtgctctaccgcatgaacgctcagtccaaccctattgaaacctatttcgcccgtgcgggcatcccgtaccgtattgtgggcggtcagcgcttctttgaccgcaaggaagtcaaggacatcaacagctatctggccgtcatcgtcaatccgcgcgatgatgtgcggctgcgccgcatcatcaacgagcctgcgcgcaaaataggcatgacgaccatcgaaaagatcggcgagcttgcctctgctgccggcgtgccgatgatggagatcatcgcccatgtgcgggactaccccgcactgcagcgcgccgccgcaccgctggagcggttctatgagatgtaccgcgagctttgtgatctctcaatcagcgagccgctggatgtgtttgtcggtgatgttatcaaaaagagcggctatgaggccatgctcaaggccatgaaggaagagggggagacccgcctcgagaacctgggacagcttgtcagctcgatcaagacctacgcagaccagaacggcgaggatgcgacccttgcaggcttcctggaggaggtcgcgctgatctctgaccttgacagctatgacaacgatgccgacagtgtgacgatgatgacgatccactcggccaagggtctggaattcccctatgtttttgtcatcggcatggaggatggcatcttccccggtgatatggccaaatacaacgaggaggacatggaggaggaacgccgcctttgctatgtggccatcacccgcgccaaaaaggaactgtatctttcgtcctcccgcacgcggatgatcttcggccagacgcgccgcaatccgccgtcctccttccttgcggagatcgaccctgcgctgctggacgaaacgcagagcccggagctgtcgagctatggcggcggcttcggcgcagggtacggcagctacagcaccaatgtgccgggcgggcgcagcggctactccggcgcgtcccgcggctacctgaacagtgagtacaacgcccgtccgcgcggcggcttcggcagcggctacagcagcggctttgccagcggcgggcatgaaagccccaacagctatggcggccgccatacggtgcaaagcacgggcttcggctccggctacggctacggccgcagccgcggggccggcagtgcagtcccggccggggcaggcacctccacactggcgggcgcaccgtccgctgcagcccccaaaaagaaggagaccgtcagctatgcgcccggcgatattgtggatcaccgcgtattcggccgcggcacggtattgaaggcaacgcccatcgcgggggactgcatcgttgaaatccagttcgaccgcgtaggcgtcaaaaaaacaatggccaactatgcgccgctgaaaaaggtggaggaatgatatgttagttcagctcattgcccatacaaatgaccccgagaaaacgatcgccgcagcggcgaagctttgctactcggacgcacatattgaaacgctgcttgacggtctgacgcctgaaaagacggcggccttcctgcaaaagctgacggatctcggccatgccagcccgatcgagcatgcaagcttcacctttggcatcgagggcgtgtcccgcacttttttggcacaggtaacgcgccaccgcatcggcagcttcagcgtccagagccagcgctatgtccggctggacgatttccgctatgtcatcccgccggagatcgaggctatccctgaggccaaggcgcagttcatcgcctcgatgaacgaggacgccgaaaagtatcttgcgctcgtccgtacattggaggatgcccacacggcacgctttatgggcgagggtcttacggaaaaggccgcccgcgccaaggcctccaagcaggccaatgaggatgcgcgctttgtgctgcccaatgcctgtgagaccaagatggttatgacgatgaactgccgcagcctgcagaatttctttaatctgcgctgctgcaaccgcgcccagtgggaaatacgcgctgtggccgatgagatgctgcgccttgtactgccgctggcaccgcatgtctttgcggcggcaggcccgcgctgcctgaccggcccctgccctgagggccgcatgtgctgcggcaggcaggccgaggtgcgcgaaaaatacgcgaagctcaaggaggaggcagtgtaaatggggcagcttatcatttttgagggactggacggctccggcaaggggacccagacaaaattgacggcgcagcgtctgcagcagcaggggtacgacctgcggcagatcacatttccggactatgacagcgagtcctcagcactggtcaggatgtatctttcgggtgccttcggcgataagcccgatgatgtgaacgcctacgcggcctccagcttttatgccgtggaccgctatgccagctacaagaccggctggggcgagttttaccgggaggggggcttggttctttccgaccgctatacgacctccaatgcggtgcatcaatgctccaagctgccgccgatgcactgggacggctttctgaattggctgttcgactttgagtataagaagtttggcatccccgcgccggacgccgtggtctatctggccgttgatcccgaggtttcccagcggctgatcaccgagcgttaccacggcgatgaaagcaagcgcgatattcaggaacgggatgccgagtatctggcccgcagccgcgccgcagccgagtactgtgcccgcaccctcggctggcaccgcatcgagtgtactgcgaccgttgacggaacaaaaacgatgcgtccggtggaggagatcaacgatgaaatccttgcacagctgaaggcggttctgtaaaacggaaccggcatttcgcggatgtgaaagaaccactgtgcaggaataaaatttgacaaaagaggtgaggcccatgctgcgcaaggcaaccgaagaagatctgtccgcgctggtggcgctgcgctgcaaggcggccggcaccaaccgcgccgatgccgcaggctggctgcagaatgtagcggggcttgaaaatattttggtgctggaaaaaagcggccagcctcccgcagcaatgctggccgccgtaccggtcgagtacggccagcatcacggcatctggctttgcgggtcggcgggggcgcagggcgtaccgctggaccgcctgctgcccaaatggatcgaaagctgtctgcgtgcctatggggccagcgggtttgactttgccgtcatgacctccgatagcacccagaatgcgcagacgctcaaggcgctcggctttgccgggcagttgcccctgcgggtgctgcagacacccatccgccgagatttgctcgcgcaggcggtgtttgacagcctgaccgtacacaagctggtcgagatgcgccatatctaccagcccggctgcatctgcctgccggagcaggcgatgaatgaaatcatgacccagctttaccgccgcgggctgaccgtagtgtccaaccgccgcggatacgggttatactataccaagggcgatacgctgcaatttctggaattgcaggccgataacgaccactgcgccgacctgctgctgcaggctgcgcgggaaaaaaccggtgcgcagaatgcccgcatcctgcttgcggagaaccagaccctgtatctgggagccggacgccgctgcggctacggcatgatcgcctttttgggcagaccattcccgacaacagatgcgtatttcaggatgctgttgtgaccgctgaatcaaaaaccatcaacaggaaacacaaagttaggagtatcccatgaggatcaatcgttcaaatccggaaccgtccggggcgcagcagcccgcagtacagccgcagactgctgccccgcagcagccggccccccgccgcgaggagccgcgtcaggagcagccgaagcccaaaaaagaaaagcctaaaaagcgtcccgagcccgaggaatacgatgcgtatcaggaggacgaggaggaaaagccccgccgccgttttccagtcggctgcctgatcgtgcttgtgattttggcgctggtcggctttggcggatataaagtgtcccagttctacgccgagctggacggtcagggaacgctgggggaggtacagaccattaccgtaccggaaggctcctccgtagccagcattgccacgcagctcaaggattccggcgttatccagtatgactggctgttcaagcagtatgtcaagtacagcggcaaggctggggaaatccagtacggcagctttgaggtccagtccggtatggcctacaacgagatcatcaaggccctgtccgttgtgacccgccgtcccaccgtcaatgtgacgattcccgagggcaccaccgccgtgggcgtggcccagatctttgtcgatgccggccttgtggatgatgtggacaccttcctgtcctgcgccaacggcaccgatggctcggactggagccagtatgatttctggaacgctatcccggacaatgaccgcctgatgaagtgcgaggggtacctgttcccagacacctacaatctttacgccgatgagagcgtctattactatgtgaaccagctctacggtgagtttgccgccaaaacggcagatttgaccgatactattgctgccaagggcaccagccttgacgatgttgtcaagctggccagcttcattcaggaggaggccggccttgccagcgaggaccccaaggtcagcgcctgcttccacaaccgtcttgaatcgtctgacccgcagtgggcggagcacaagctggaatccaacgcctcaagctatattatgcaggaccgtgagaacaactatctctggaattccccgactgccgagtatttcggctggccggagcagggagctatcccggaggatgtgctggctctctatgacacctacgccatcagcggcctgcccgcaggccccatttcctgcccgggctatgccgccattgaggcagcgctgaaccccgaccagcagtatctggacgagggatactacttcttcgtcacgggccaccccgacaccgatgttgccgggcagtatttctacgccaagacggcggacgagcattaccagaactgcgtcaaggcgggctgggcctcgtaagggccgcagctgcctttcctgaaggggccgggcatgcccggcccttcgggtgaatcatgtaaaaacggaggaattatcaatgctgcagcaaccggaattgctggcccctgcgggcagtctggaaaccctgaaatatgctgtgatgtacggcgctgacgccgtttactgcgccctgccggaattcggtatgcgcgcggcccctgtaaacctgacggtaggggagctgcgcgagggctgcatctttgcccatgcccgcggtaaaaaggtctacctgacccttaacaccctgccgaccaatgaggaactgtccaagctgccgcagtatatacaggatgccgccgaggccggtgtggatgcctttatcatcgccgatctgggtgtgttggcgctggcaaaaaagtacgccccgcaggtggagcgccatgtctcgacccaggcgggcattacgaactatgaggcggccaaggtttgctatgagttgggtgccaagcgcgttgtgcttgcgcgtgagctgccgcttaccgagattgcccagatacgcgacaactgcccgcctgatctggagctggaggcctttgtccacggcgctatgtgcatgagtgtttcgggccgctgccttctgtccagctatatggctggccgcagcggcaaccgcggcgagtgtgcccagccctgccgctggaagtataatctggtggaggagcatcgccccggccagtatatggagattggggagacgcctgacaacggcagctatatcctgaatgccaatgatctttgcactgcaccgttcattgacctgatctgcaaggcgggcgttgactcactgaagatcgaggggcgcgccaagaccttctactatgtggcctccgtggtcagtgcctaccgccgcgcgctggacaccttccttgctgatccgtacaacgataactttgagctgcccgatgcagtcatcgaggagctgaaccgtacaagccaccgtcactattcgccgggcttctactttggcaaggagcaggcccagcagacgcccagccacacctatgtgcgcgactgggatttcatcggcacggtggaaagctgggagaacggcattgcccactgtacccagcgcggtaagttcacggcaggggacagcatcgaaatcctgcagcctgatggcagtgtcattccgctggcacccgcatggatcgaaaacgctgacggcgagcgcgtggacgccacaccgcatcccatgatgcagtacacgatcccctgtgagacccctttgatgccctacagcctgatccgtatgcagaaaaaggcagattgaaggcaaaatctatctaaaaaataatttaaaaatctgcaaaaatcgcttgactttttgcagaacatcccttataatagttcctgcgctggtcgtaaggcggacgccttgcaagcccgcgcaggctgggtatggcccggtagttcagttggttagaacgctagcctgtcacgctagaggtcgtcagttcgagcctgattcggg

SEQ ID NO: 14140 - DNA, 3627 bp, Unknown
  gut microbiota DNA sequence
cctcattatgaacaaccccgatggctggagccaggcacaggcactggctgcctacacccgcacctccacctccggtgccggcatccagagcgaggactacatcgagcagtactactctcaggacaaccagaagaaggcactggagctttccatgaagaccgacatgggcgagcatatgttcccgccgacgtccgtctccgaggaaaatcaggatcgctactccgaaattatgagccaggtcaagacgctgtccgatgagatggaagccagctttatctgcggcaccactccgatgagcgagtgggattcctaccagcagaagctgaaggacgccggcattgaagaagcagtccagatgatgcaggaagcatacgacacctacaaggcaaactgagttccgatgcgataaagcaacaataatatgttaaaaatggcatccggaggaatgctctttcggatgccatttctataaggaaacactacggggtgctgacaagattatgaacagaatggcagaactgctggaacggatcaattatgatctgcccgggctggaaaaagcaaagatgtgctatgcacagggggacgcggacggcgcaatggatgctgtgattgagcatttccgcacacgcacaacgccgaagtatctctttaccgccaaggagatggagcagtgtaaggtagatggcatcctgaaggatgcgcaggagacgctggatcattatatctatggccacaagtttgacggcgagatcgactggttcttcaacccgacggagcatacctcccacgataacgagtggacatggtcgctgtaccgccacatttattggcagccgttggcccgtgcttacgcgttgaccaaggatgaaaaatatacgaaagagttcctgcacgaaatgaccgagtggggcaaagcatggcctgtggctcccttcatggaaaatgaagaggatgctgcggccaagtacaaatttcccggccactcatggcgcaccatcgagacggccatgcgtatctacacggtctggctgccctgcatggaggcgttccgcacctctcctgcatgggatcgagagggatgggttacattcctgacgctgctgtgcgaccatgctgactttttgatgacccattacagcaaccacaagaagtcgtccaactggctgacgatggaaagcggtacgctgctggaatgcggtattctcttcccggaaatcaaatccgactggttcatgaccggctaccgccgggtcatgcaggaagtaaagtactccttcgataatgacggcatccacatggagcgcacccctatctaccacatggtggctgcgggcgtctacttccagtgctaccgtctgtgcaagctgaatagcatccctgtgccgccctacatggagccaacactggaaaaatccgcacagtttatcatgagtctggtcaagcctgacctgtccacgccgatgattggcgatgccgaccgggacgatctgacgacccgccgctgcgatacctcgctgtatgagggcatgaacctgacattcgacccctacgatttgaacgagatgcgtgcgtacttccgcacctggtacgaggaaacaggccgtgaggacttccggtttatggctaccgcgggcaagcagggcacaccccccgcacagcgcaactacaagtacatcccggcgggtatctatgttatgcgcacaggctggggcccggaggacagctacttccatgtacacggcatccagcttgagcgtggcgaggtcagctcgcactcccacaacgacacgggccatgtggagattcacgccaaaggggaggacattttgacagactcgggccgctacatttacaacagctcctgttggaaagattggcgccactactttctgtccgccaaggcgcacaacacgctctatatggatgaccatgagatgggtaccgtgcccggtgtcacccgcacccgcggtgtacgtacctatctgcatgcctttgaggaaaacgagcagtatcagcttatcgacatttcccataacggctatgacttcatggatgacccgatgttccaccgccgccgcgtcgtgcgtctgcctgatgatatctatgtcattgaggatcgtgtaaccggcatctgcggggaaaaccacgacattcgcctgtacttcaacttcgcgtttggtcatctggagggagaaaacggtaagtttgactatatctcccaaaaggggcgcgggtatacgatgaccgtgcaggctgacaagaaacttgattttgaaatccttgagggcagtgaggaccccatcggtgggtggatcagctacggctacgcatggcgcaagcccatcccgcagctgattgctaagcatagcggtaaagcacccatccactttattacggtgctggccccggcggcaaccagagccgaagctgccatgagcggtgatgccgccacggtaacactggctgatggcaaggtattgacgctgacggagaatgcggtagaactgtgctgagaaaggagcctgcaagatgagatacggtatctgtaccggcatcgaaaatgccgggcttgtaaaaaaattgggctatgactacattgagctttcggtgacaaagaccatgggccttgaccctgcggcgtacgctgcaggcaagaaagcgctggaggaaagcggaatcgaggctgagtgcttcaacattctgtttcccaaaacgatgaatttcgttgatgataagacaacgagccttgatgagttggaggcttatctggaaaaggcaatggcaatgattgccgatttgcatggtaaagtggtcgtgttcggcagtggcaagtgccgtacatgcccgccggaggtcaagtatctggacgcttacgagaaccttgtcaaagcctgccgactgacgggtgaaatcgcaggaaggtacggcatccgggtggtgatcgaaccgctgagccgaaaagaaaccaatatggtctgtaccgtggccgagggtgcattgctgcagaaggatgtggccaacgaaaatgtagggctgctggccgactacttccacatttgcgccaaccatgatgacctcaaccgtattgcagtcatcaaggactttgggcatatccatattgcgtccggcaatggtcggcggtatccgctgcccggcgatggcgaaagctatggcgagctttttgctgctctgcacactgcgggttacaacggccgcatgagtatcgagggcaaaacagagaacatcgagcaggacggtgcggccgcccttgcttacttaaaacagttggaggcgcaaaataatggctgataaagtaaaacttggtatcatcggctacggtcatattggcagccagcatggccgcgcgattcgggacggaaagtgtccgcaggtcgacctgactgcggtctgcgacattgatcccgcccgtcttgaactggcaaaaaagacgaacggtgaggacattcagacatttaccgatgcgtctgaactgatccactccggcgtgtgtgaagcagtcattattgcggtgccgcactacctgcacccctccatggcaatcgaagcgatggaaacgggcctgcatgtcatcgtagaaaagcccgcgggcgtctacaccaagca

SEQ ID NO: 14141 - DNA, 9443 bp, Unknown
  gut microbiota DNA sequence
cacccggagcttgtctactgtatggacttcaatcagcgcacgaacccgctgtacaaaaaggtcaaggatctcatcgacagcggtgatttgggtgagatgacccgcgttatttggatcgttacggattggtaccgctcgcagagctactatgatcagggcggctggcgtgctacctgggatggcgaaggtggcggcgtgttgctgaaccagaatccccacaatcttgatttgtggcagtggatgtgcggcattcctaagcgcgtgaaatctcaggtatactacggaaagcaccgcaatatcgaggtcgaggacgacctttatgcccttgttgaatacgaaaacggtgcgacaggctgctacattacgacagtaggggatgcccccggtacaaatcgtttggaaattgacgggacaaatggtaaaattgtagttgaaaataacgagcttaccttctaccgtctgcgtattccggaaccggaattcaacgccacctacaagggtggccttggtaagccggaagtgtgggagtgcaagattcccatcaagggcacttacacctctcaccccggcattatcaacaatttctgtgactgcatcctgaaaggtgcaaagcccattgcccccggcgccgagggcatccgcggcttgcagatctccaacgctattcatctttccagttggctgaacggcgaatgggtcaacatccccgtggacggggaactgttccttgaaaaactgcaggagcattgcaaggaaccggtcacaaaataacagttgcccgcagcagaagctaagccgaagaaacggagtatacaaacgtggctgaaaagaaaaagtgggcccccacaaaaatgttttggcagtggtgcctttcctatctgctgatttctgttattgccctgacgctgcttttggcatccgggtacagatatcttgatgtgctgcgggacaatttggaatacacgaacggcatccaactggatatgacgcgggtctggctggatcagaaggttaagctgctgcgcaatatcacggcaaaggagagcagcacagcagctattgatgccgtgcgccaggctgatgactatgatgatattccacggtatgattactacatgcttacaaggaaaatctctacagatgtcatcaactacggtataggggatgcatactttctctattttccgtccacggatgcgatagtatccaacacgaaatacgggcaaagccgtcgattttatgaccttgtgctggaggcttatggcatcagctatgaggattggatggaaatattaaagcaaaacttagtgacaacgcgggtatttcaacctgttgtacagggcaaggatagcaaaaactatctggttctgatgcgtccgctgaacatcacaagccgagagcctgataaggcagtggcggttatggtcgttgatttggaggatctgttcaaggcctctgattggctgaataacgatacactgtgtatcaatgaccgcaacaacggtgtgctggttgctaaccatgaactccctgaggcaacggaaaatgctgtcacagagctgattaaaagcagcggaagccgtaagtttgacgaagcggcccatataacgagcaaggaagaatacatttcaatcatttcttccacttacgaaaactgggatattgcagtcattttgaaggaacaggcttttgcatcgaaaatcattgatatacagaagcttttggctgttgttgtcatcatctatctgctgttgacggtagcagttattgccaatagcgcagccaagcgttatttgaagctgcgcaatattgtgcaggtgctgcacagcggcaatgtggctgacccggaggagaatctgaccgatgccttcgcctatattgacagccgcgtacagaagcttgtgcaggataatgtcgaaagctccgatctcattgaacagcagcgcaccgcgatgctgcgtgagcagtttcacgcgatgataacgaacgcagatgcggcaaacgaggccgatacagaccagctggaaaatctcggcttgccaatccacagggcaaagcagtattatcttctgtcctaccgcctgcaggaacaggatcttacgaacgagaaggatcctgacaaaatatatgagatgcagtggttcatactccagaatgttaccagagagaatcttacgagccgcagtcttgagaacctttgcttccgtgaaggaggcatgcagctttacattatctggaccgggaaggaagacccggagatgcttgaaagcattttgtggagctatgaatactgccgcagctttttggcccagcattttgagttccgctacgacattgccgtcagcggtgggcacaccggcattgatggggtgtataaagcttaccgtgaggtatgccgtgtctatcaatatcagcaacgcacgcaggataccggtacgatattctacagcgacctgaaggtacaacccggcgacacgacagtacgctatccggttgaaacggagaataagctgcatctggctgtacgcagcggcgatgaaggcgaggcctgtacacagattcaagcgttgatgcgccaaaaccaggaaaactacttgagccctgcaggtatgcagttcctggtgggtaagattatgtcgaccatcgtgcgtgcaggcgaacagcggagtgatgatcccgagctggccgaaaatcaaaatcgcgttatggaggccgcccgccgtggtaacaccgaggcgatggagcaggcgctttgtcgattggcgggcactgtctgccaagcggtccgcgcctctgaacaggaggcggcagcggatgaaaaaggccgcctgtatctggagatgcgggactacattgaagccaactattcggatgctgcgctgaatgtaaatgcgctctcagagcatttcgaccgtcctgctccgttcgtctcccgctatttcaaagagatgaacggtacgaacctaacccagtatattcacaaagtgcgcttagagcatgtgaaagaaaggctgctgcaggacgaaaaattagagacgatcgccatcacctgcgggtttggcagtctgcgcagcttcctgcgtatcttcaaacaatatgagggtgtaactcctactcaatatagggagctgcacagcaaaaaggaagaaacaaccaatgaaaacatttaaaacggcagttatcggctgcggtatgatttccaaaaatcatttcaaggccctgaaaaatgtcgagaacgcagagtgtgttgtcgcttgtgatattcgcccggagcgtgccgcagccgctgcagaaacctacggcatcccacacacggagacagagtatcacagggtgttggataacccggaaatcgatgttgtgcacatctgcctgccccactatctgcacgcacaggttgccatagaagccatggagcatggtaagcatgtgctttgcgaaaagccaatggcgctggaccccgccgatgccgaaaggatgatcgaagtccgcgaccgcacgggcaggacgcttggaatctgcttccagaaccgttacaacgattcgtccaggtatatgcgcagcctgatggactcgggcaggatgggcaaggttctgggggcacggggcgctgtgttctggaaccgaaaccccgaatactataccgaatctgattggcgcggtaccttggacaaggagggcggcagcgcattggaaaatcaggcaatccacacatttgatctgatgcagtggctcacagtgccgatcaagactgtggaggcaagctgctccacaaagcgtcacaagggcgttattgagacagaggatacctgcgatgtctttatgaccggccccaacggcgagcggctcgtctttttctgcacgaactgctatgtgaaaaatgccccagtggagttagaaatcgtctgcgagaatggcagtatccgcatggtcggcaaccttgtcactactgaattggacggcaagaccgagacgaaggacttctcctccggcacggtgttcggcaaggattattggggcagcggccatgggttccttattgaggactactacaccaagctggcggcaggggagaggttccctgtcagtggtgaggaagctatcgtcagtaccaggcttctccacgcggtttattcttccgctaaaaatcacgaggtcatccgccttgacacaaaggagaatcaagcatgagcacaaagagtaaagctgcggcggccgaagaaaaaaagccgatcaccttaagctcagagcatgtgcctctgagctaccgcatcaaaaaagatttgcagcgcaacggcatgatctatgcgatgcttattccggtgctggtctactatgccgtctttaagttcggcccgatgttcggtctgtatatctctttcatcgactataagcccgccagaggcatttttggcagcaagtttgtcggcctcaaatggttcaagtctttcttctcggactattactttggccgtctgctcatcaataccgtgcgcatagcggtggcggatctgctgaccttccccctgcctgtcattctggcgctgcttatcaacgagttaaaaagcaaaaaattctccaagactgcacagacgcttctgtatgtaccgcactttatctccacagttgttatctgcggtatcgttatcacgctgacaagctccaccggtgccattaccgaggtgctgcacaacttgttcggcatcaaagagcaggcgctgctaaatagtccttctaacttcctgccgatctacattctgacagagctttggcagacgcttggctggaactccatcatctatttgtcagccctttccggaatagatcaggaattgtatgatgcggccaaggttgatggcgcgaatcgctggcagcagtgcctgcatgttacgcttcccggcattgcgcctaccatcgtcatcatgctgattttgaagatgggcaagatcttcaatgttggttatgagcgcgttatgctgctgtacaaccccgcaatttacaacaccgccgatgtcatcaacacatatgtttaccgtaaaggcctgattgatgcacagttcagctacagtacggcggttggtatgttcaactgccttgtcagcttcgcactggttatgatcacaaacaagatcagccagaaggtcaatggcagcggtctgtggtaaggaggaaacgatcatggctaatacaaataccaaaaccgcaccgcgcagcaccaagatcaaggaatccttcggcagccgcctgttcgatgttgtggatgtgctgattatctgcgtgctgctggcctgcgtgctgattccgctgatccatattgtggcggcgtccttcagcaacccatcgctcttcgtggggcataagggaattctgctctggccggaagggttttctcttgcatcgtatcaggcagtgctcaagaatgccttcctctggaccggctacgcaaacacactgtttattgttatcgtgggtacggttctcaatgttctgctctcgatggttgcggcctactgcctgtcccgcaagcatgtggcggccggccccaccattatgaagcttcttgtctttacgatgtatttcagtggcggcatgatcccactgtatctggttgtcaagggcgttggcctttatggctcccgctgggcgctgatcctgcccacactggtcgatacctacaacctcattattatgcgcaccgcctttgcgggtgtgcccgattccttggaagaatccgccaagctggacggtgccaatgcgtggacgatcctgtggcgtatcatggccccgctggtaaagcctacggttgctgtcattacgctgtactacgcagtcagccattggaactcctggttcaatgctatgctgttcctgcgcgataagacccagtaccccctgcagctgatcctgcgccagatcctcatccagaatgacacggccgacatgaccgccggtgcggattacctcgtgagcgagacgatccaatacgcgactgttgtggttgccacactgcccatcctctgtatttatccgttcgttcagaagtactttgtcaagggtgttatgatcggtgccatcaagggctaatctgcacagtaaaaaggagaaattaccatgcgcgtaccttatgaggaaatgtataacgaatttgtgcgggttctgctgaagtacggctttgacaaggagaaagcggagatctccgccaagctctacgcagacgccagccgtgacggtgtatacacgcacggacttaaccgctttccgaaattcatcaagagcatccatgacggcattgtggacatccacgccgagcctgtgctgaaggagagctttggcgcatttgaacgctacgacggctgtcacggccccggtaacctgaacgcctacgcctgtacgaagcgggccattgcgttagctaagcagaacaccatcggctgtgtggcgctggccaacaccaaccactggatgcgcccgggcaactacggcctgatggcggttgagcagaattgtatcggcattttttggacgaacaccgtgcccaatatgccgccgtggggcgggcgtgacgcacgccttggcaacaaccccattacgctggccataccccacggggatacgcccgtgctggtggatgtggccatgtcgatgttctcctacggtaagctggaagtctataagcgcagcggccgtccgctgcctgtggacggcggcctgaacaaggaccagcagcccacgaagaacgctgcggaaattcttgaaacgcatgagagctaccctattggttattggaaaggctccggcctgagtctggcgcttgaccttatcgcggctgcgctggcaggcggccgcacgacccgtcaggtcggtgagctgccgctggaaaccgaactgagtcaggtgtttatctgcatcgatctgaacagcctgcccgacaaggagaatatcgctgccaatgttgaggcaacattgcgcgatatggagacctctacccctgtggaagagggccgcccggttcatttccccggcgcgcatatggccgaggtacgcagcgacaacatggaaaatggtattcctgtcgaggatgcgatctggcagcaggtgttggcactgtaaagggaggtgcgcggtatgatcatacccggactggtatcggcaacatttaaaacagaaagctccgattttgtgctggcggcactgcaaaaagctgaattgtatgcggtggaatggtcggaaaactggcatatcccggcgggggataccgcgctggcccgcgacctgagggaacggacccttgcgcagggcgctgacattgcggcctacggctcttactatcgcttggggcagaacagcgaccctgtcaaagaatttttgcctacgctgcagagcgctgcggcactgggcgtgccgctcattcgcatctggggtggcgatagaccatcagcagagctggatggtgacacacgcaaaaagttggcggccgaggcaaagaccgtcagtgatatggcggcatcggaaggcatcaaggtcgccttggaatggcacaaaaacaccgtcaccgatacgaatgaatcgggcctgtcctttttggacgaagccgccgcagataatctctactgcctgtggcagcctaccgtggcactgaatatggacgagcggtgtgcagggctggacctgctggaagcccgcagccgcctgctcaacctgcatgtttattactggctggaaggcaagcgccgcccgttcgcggaaggtcttgacgaatggcggcagtacctacagcatgtcaaccgcaacgaaaaacgctacggcctgctggaatttgtgttgaacaacaccgaggagcagtttctggaagatgccgctcaatggaagcggcttttgcaggaaacggcgatgaactgaagaggagaaaagcaaaatggcagatttatatgtaaagaaatttgatatgatcaatccctttgttgtggcatctagccccgcaacacagggtgcgctgaatgttttgaagagcgctaaaatgcggcccggtgccattgtgctgcgcaactatggccacggttcgggcggcggcagctttatcggcccggactccaaggcaatgttcggcggagagatggccattcacagccatgccgttggccgccaaatcccagacagtgttgacacgctggaaaaatattgtgaggaagttcacaaaatcaagaaggagatggactcggacatcaagctgtgggtgtctgtcggccattacagcgacatcgtcaagggtggtgactgggagaaaaactgggctcatcaggctgaggaactcgctctcgcgggtgcggatgccattgaactgcatttcaatacccccggcgttgctgtggcaaaggaccgcacatttgcttatcatcagctactccgccattccattgaattgatgaaaaagacagtgcccaatatgccgatcatggccaagcttgccatcgagtccaccgacgcgctgacctcgatgcgcattgccgaggcagcgggtgcagccgccgcaggcccaaccgcccgctggaaaggctattacatggatcttgactggcgcggcaccgaggcccgccccggtgcaggctacggcggcacgcaggccaccccgttggtgtgttactccatcgccgaggcgcgcactgcaggtgtgaaaatccctctctacggcggcggcggtgtcttcaattatgagaacgcagcccgtatcctgatggcaggctccgagatggtgcagctgggtgccctggcctgtgccggcggcacaatggcctgcaagaagcttatcagtgacctgaaccgctggatggacgagaatggttatgccgatatggattcgcttgtcggtgacagcctgaagctgttccagatggatgctgattttacgaagaaacgccagaataagctcgccgatgcctaccagaccgccgatgccgaccgggccaagtgcatcggctgcggccgctgtgaggatgtctgctggcatcagggcatcgagatcaaagaccgcaaggcttataaaacggataaatgcatcggctgcggctactgcttccaggtctgcccgacgcaggccctctatgtagataaaaaaggcatcctgcgcgccgcctttgaggaagcgggcatcaagcggggaaacagataacagtgccctgttatcacggcatcctataatcaacttatcgtagggcgagatgacctgcttgctgtgcagccagtcggctactacagttcatcctaaaaatgactatggcgcagcatgtgcacgctacggctgcacggctgcgccaattttttgtaaggagatgtagaatgacactctttgatacagcccttgaggctgacccggaggccctgaagcaagcgattgaatatgagggtcagaacttccgcgagcgcgatgctggcggtaatacactgct

SEQ ID NO: 14142 - DNA, 1094 bp, Unknown
  gut microbiota DNA sequence
ctgggcatcccaaacgaaagtgacatcatagctgtcagaagtgccgacatagccgtaaggcggtttggtttcctcgatatggtagctgcccagcggcagggtcacgctgacttcgccaatcgtgccgtcatggattacggacaggaaatcgtaggtggccttggtgcgggcaggggcaaaggcggcaatgtctgcgctgccgtcgccggtggtgactacggcgaccacatcacccttggcataccagagcgtgcggttgccataattgtcggtctgccgatcctgcgtataaatatcctcggcggcggtgatggtatactccgcactggccagcgggcgggtttcatacacgaaattgccgtcctcggcctcgccggtcatccacgggtcaagtgcgccaacttctgttttccagccagctaagacctcgcctgttttgcggatcgtcaatttgcccagcgtctcatggttagagtagttttcaccaatcacaagggtatccatgccgttctcgtttttgtcgccggtggctgcgtaaatgcggtctgtggtgatttcaaaatccacatagtagatgccatctgcatcgtcggccaaaatgccgttttcatatccggcagaatccagccattcgttgtagaatccgttcgggccggtgacttccacaatgcgatatttacccagcggcaatttttcaggcagcgtcaagttgccctcgctgttggtgtagaaagtgtctacatcttttgtcagatggccgttgacagtatcggtcaccgtaacgagtttcgggttgccgttgctgtcataacggtaatgcccctgctcgtccagccagtagatttggaaagcggtgtcgggcagcagtaccggtttgccggtttcctcgtcaactttggtgatgcggagataaacttcgatttcctcgtccagtacggtgaatttctgataactgtcagagcctgtcattacgctgtccttgggggtggccatagcgccccacgggttgttatcctgttcggggtcaacggtgacaataaaaggctcggcttggaacaggtcgtgcggcacagttgtttcgacaacgagatatg

SEQ ID NO: 14143 - DNA, 930 bp, Unknown
  gut microbiota DNA sequence
ctcatgagcctgtattccatcgtctttcaggatgtgaccctgtttgacaatacgatactggaaaacattcgtctggggcgcaagggcgcgaccgacgaggaggtccttgcggcggcaaagctggcaaactgcgaggaatttgccgaaaagctgccggacaagtggaacaccaacatcggggaaaacggctgcaccctttccggcggcgagcgtcagcgcatttccattgcccgcgctttcctgaaggatgcgcccatcattctgctggacgaagccaccgccagtctggacgtggaaaacgaaactgccattcaggaggcactttcccggctcataaaacacaaaactgtccttgtcattgcccaccggatgcgcaccgtagccggtgcggacaaaatcgtggtgctgtcgggcggcatcgtggtcgagcagggcagcccggcagagctgtacgcccagaagggactgtacactcacatggtggatctgcagaccgaaagccagcgctgggccatctgacccaattcaaaacagccccgcggcaatcgagtaggaggacttctaaatcagagtgccgacctctcacaccaccgtgcgtaccgaccggtacacggcggttcaaccgcataagtgcaaggactcgtagcagttgaggatactgaaatatcccgctgctgcgagtctttcgtttgtaatggaacacttttggctgcaaatattgttcatattatacatctttctcgatcacaaggcaagcgatcctcgcatcgtgttgcgaagatcgccaatttcaaaatccggtcatcccttttactcaggtagaaaagagcaaccaacagcgacaaccaagcgttcaaacaagttcatgcttctacggttgaatctaatgcagaatcccgacaggtaggggctgagattcttctgggcaag

SEQ ID NO: 14144 - DNA, 1437 bp, Unknown
  gut microbiota DNA sequence
atctacgctttcctgaaccgtctgctgatccccaccggcctgcatcacgctctgaacaatgtgttctggttcgacaccatcggtctgggcgacctgagccactactgggctggcgacgtcaccggccagaacggtgtcaattgggacctcggcatgtacatgtccggcttcttcccctgcatgatgttcggcattgccggtgctgctctggccatggtccagactgccaagaacaagaaggccgctatcggtctggttgtttccgctgctatctgcgccttcgtctgcggcgttaccgagccgttcgagttcggcttcatgttcctctgcttccccctgtatgttgtctatgctgctctgtacggcatcttcaccatcatcacctactactccggcttccgcgcaggcttctgcttctccgccggtgctaccgacctgatcttctccgccagcctgcctgctgctgctaagacttggatgatcattcctctgggcatcgctgccttcgtcgtgttctacctcgtctttaagttcgccatcaccaagttcgacctgaagacccccggccgtgaggatgaggacgctgaggctgctgaggccaacatcaccctcgccaacaacgacttcaccgccatcgcctccggcgttctggctgctgtcggcggcaaggacaatgttgccaacgttgactactgcgccactcgtctgcgctttgaggtcaaggacagcactgctgtcaacgagaaggccgtcaaggctgctggtgctgccggcgttatccgccccagcaagaccgcttgccaggtcgttatcggccccaaggttcagttcgtctatgacgagctgaagaagatgctgtaatttccgacatctttcggtaaaggtctggttccctttatcaaatccgccgtgggcgggcctacgcccgcccacggccttttgtttggaaacgaaattttggtataaaattcaaatttaggtcatggtataccatggcgcagcgtggtataatgcaaataggaataacggagcgcgcccgctccgaaatatcaggaggtattttcttatgaagatcatccgtgctaaggattattacgacatgtctcgcaaggccgccaacatcatctcggcgcaggtcatcatgaagcccaactgcgtgctgggtctggccaccggcggcacccccgtgggcacctacaagcagctggtcgagtggtacaacaagggcgatatcgacttctccgaggtcacgaccgtcaatctggacgagtaccgcggcctgccgaaggagcaccccgagagctattggagcttcatgcaccgcaacctgtttgaccatgtgaacatccgccccgaggccatcaatctgcccgacggcaccaacatggacgccgacgccgagtgcgcccgctatgacgcagtcatccacagcgtggg

SEQ ID NO: 14145 - DNA, 3534 bp, Unknown
  gut microbiota DNA sequence
gcttcaacgagccgggcgatgccttcgagctgggcacccactgcgtagacctgaagcccgagaccatcgaggccaacaagcgcttctttgacggcaacgccgatctggtccccaagcaggcctacaccatgggcatcaagaccatcatgcaggcccgcaaggtcctgatggtcgtcaacggcaagggcaaggccgacatcgtcaagcaggcgttcttcggccccgtcacgccggaagtccccgccagcatcctgcagatgcaccccgacttcattctggttggtgacgaggaagccctgagcgagatctgatcagcggaggaatactgctatgatcatcaaaaacgcaaaagtttacagcgacggctgccgctttgtagaaaaagatcttatcatccgtgacggccgcatcgtctttggcgcggccccgctggagggcgaggatgtcatcgacgcggacggtgcctacgcactgccgggtctggtggacatccatttccacggcgcggtcggccatgatttctgtgacgccgatgcggcaggcctgcaggccatcgcggattttgaggcgagcaagggcgttctggccatctgccccgccacgatgaccttcagcgaggagatcctgaacggcatcatggatgtggccgcagcgcacaggaacgagcgcggcgcagatctggtcggcatcaatatggagggcccctacatcagcccccgcaaggtcggcgcccagaaccccaagtatgtcatgggggcggacgcagccatgttccgccgcctgcaggcgcgcagcggcgggctgatcaagctggtcgatgtggcgcccgaggagccgggaaacctcgacttcatcaaggaatgtcacgatgaggtgcgcatttccatcgcacacacctgcaccgactatgagacggccaaggctgcctttgccgccggtgccacccacatgacccacctgtacaacgcgatgcccggcatcacccaccgtgagccggggccgatcatcgccgcgctggaggagggtgccgaggttgagctgatcaccgacaatgtacacatccaccccgccatggtgcggttcaccttcaacacctttggcgatgaccatgtgattctgatcgccgacagcatgatggcctgcggcctgccggatggcgagtacagtctgggcggtcaggccgtcacggtgcgcggaccccgcgccaccctgaccgagcagcccggcacgattgccggcagcgcgacctgcctgtttgactgcatgaagcgcgctgtcttggagatgggcgtgccccttgtaagcgccgtacgcgccgccaccctgaacccggcgcgcagcatcggtgtcgatgccgactacggcagccttgacgccggccgttacggcaatgtcgtgctggtcaatgacaagctggatattgtcaaagtgatccgccacggcgaggttatcggctaaacggggcggcagacgcgccccctgagaacccaataaggaaatcggaaggcccgcgagctgaacgaacgcagtatttctgtgcgttcgtaacgctcgcgggccttcctctgtttttgggccgggcgtccccccctttgcaaatccataggaaactgcacagtttgcaccaaaccgcggggggattttgccgccgattttacactgcgcccccttgcatggggcggcaatctcttgtataattaaatttgtctgtactattgttttaacgactaagcgaggttttcaaatgctgtcaaagtatctgagcgttttcttcatttcgatggttcccatcattgagctgcgcggcgcaatccccgtcggcgtggggctgggcctgccgctgtggcaggtgtacatcattgccatcatcggcaacatgattccggttccgttcatctttttcttcgcacgcaaggtgctggagtggggcgcggataagccgatcatcggcaaggttttcaccttctgccttgagaagggccacaagggcggcgaaaagctgaaggccaaggccggccgcggcctgccctgggcactgctgctgtttgtcggcatcccgctgcccggcacgggtgcatggaccggcacactggctgccagcctgcttgacatggacttcaagtccagcgtccgcgcctgcatgggcggcgtgctgctggcaggctgcatcatgggcgcgctgagtgtgctgggtgtttccgcattcggcgctgtcgctgcctgagatgcccagacattatcggcccggtctggatgtagttcgtctggcggcgctgctgccggtgctgtgctatcactattgcatcgaggccgcgcgccttggctttgcggtgcccacggcgctgatcggccggggcatggccgactgggtggagttggggctggcgtggttcttcctgctttcgggcgcggcgctctgcctgcaatggcaggggcggtttgccctgcggcgctatcttgcgggccgtgctgccgccacctacccgacgttctggctgggctttgcggcactgttcctctacggcgaggtgctgcacggcaacaacgccgacattccgcgctggcgggtcatcttctcgctgctggggctggacggctacctgacccccgtgactgtcaccttctacaaaattggtgagtggtttttgggcgttatcctgattttgtatctcgtgttcccgctgctgttgtggtgcatggagacacagctgcgccgcagggcgctggccgtctgcatggcggcgctggccgttgtctggccgctcatctgccccgccccgtgggaggccgggcacaccgtgctgggccgcctgcctgcgtttgcgctgggggtgtggttcggctcgctgctgaaaaaggacatccggccgtcctatcggctgtatatcgggctggcggtctgcccgctgttgcgggtggaggaagtgccgcgtctggccgtgctgttggtgccggcggcggtgctgttctgggcggtatacgccgccgggcagcaggtgcctgcgcggttctgccctgccctgcggcggctggcaggctggtgctacggggtgtatctggtgcatcatgtcttgctgacgctggtgtttctgcggtttgtggcgcggttcaatttgccgctggccgggatgttcccggtgtatctggcggccagctttgcgcttgccgccgtgctgacagcggtaagccgtccgcttggcaaggccataaaaaagctggcataaaaacaaaggacgcatgacctttacggttgtgcgtccttttttgtgtggtgggcgggggtaagtggggtcgtagggcggccagtcctctggccgccgtggccgcttgcggcagcggggaagtgcccgggagggatgaatccctcccctacgaattgaaccgtgaaagggatttggcgataagttgcgggccgggcatgcccggcccctacggactgctgtttccggtaacggggggttcggggcgcttggcggcgcgcaacgagcgccgccagccagcaaagctggcccgctcgtgcggttgcttgccccg

SEQ ID NO: 14146 - DNA, 2467 bp, Unknown
  gut microbiota DNA sequence
accgcacaatgcaagcgcatgaccgtaagttgaaattgcgcggtattgccttataaaaaaggagtgcatcccccttgaaaaacgctgaaatcatcgcaaaactgaatctggaacaaaaatgcgcgctgctttcgggcgcgggcaccttcaccacgcgtggctgccccaaggcgggcgtgccgtccatcactctgtcggacgggccgaacggcgtgcgcaagcaggccggggcggcggaccatctgggcctgaaccccagcgtgccggcgacctgcttcccgactgcggccaccgtggcctgcagctgggaccccgcactgggcgaggagatcggccgcgccatgggcgaggaggccgctgcgcaggaggttgccgtgctgctcggccccgggcttaacaccaagcgcagccccctgtgcggacgcaactttgagtatttttccgaggacccgtatctttcgggcaagatggccgccgcctatgtgcggggcatccagagcgagggcattgcggcctgccccaagcattttgccgtcaacagtcaggagctgcgccgcatggcgtccgactctgttctggacgagcgcacgctgcgcgaattgtacctgaccggctttgagatcgtggtcaaggaggctgcgcccaagaccatcatgtccagctacaacctcgtcaacggtacctatgccaacgagagcgcccatcttctgcaggatattctgcgcagggactggggcttttccggtgccgttgtgaccgactggggcggctccaacgaccatgcgctcggcgtaaagaacggctccacgctggaaatgcccgcccccggcggtgacgccgtgcgggaactgctggctgccgtacaaagcggtaagatcgccgaggcggatgtggatgcccggctggatgagctgctgacgctggtgctggatacaagcgctgccgtgcaaaagcacagccgcagctttgacgccgatgcgcaccatgcgctggcccgccgcgctgccgccgagagcgccgtgctgctgaaaaatgacggcggcatcctgccgctggccgccggtgcaagggttgccgttatcggtgactttgccgagacgccgcgctatcagggtgccggctcaagcgccgtaaactctatcaaggtcgatacgctgcttgattgccttgcgcagagcgggctgcagtgcgcgggcttcgccgcaggctttgaccgtcagggccgccccgatgccgacaaaaaggcgcaggccgtggcactggcccaaaaggccgacacggtgctgctttgtctgggtctggatgagatcaaggagagcgagggccttgaccgcgtggacatgaagcttgccgataaccagatcgagcttttgcaggcggtcgagcaggctaaccccaacacagtggtggttctgaatgccggtgcatcgctggaaacgccgtggctggcccactgcagggcgctcatctatggggcgctgggtgggcaggccggtgccggtgccatggtggatgtgctgaccggcaaggtcaaccccggcggcaagctggccgagacatgggccaatgcctatgcggagacccccgccaaggataactttgccggggcaggccgcaccgtgcagtaccgcgaggggctgtatgtcggctaccgctattaccagaccgccggggtgccggtggcgttcccgttcggctacggcctgagctacacaagctttgcctattccgacctgaaggtcactgtcgacagtgtgaccctgaccgtgaccaacaccggtgcgcgtgacggcgcggagatcgtgcaggtctatatcgcaaagcccggtgcggagatcttccgccccgcgcaggagctaaaggcttttgcaagggtgccgctggcggcaggggagagccgcacggtcacgctcccgctcgatgacaaggcgttccgctactggaacaccagtaccgatggctgggagatcgagggcggccggtatgaggtccgtgtcggtgcctccagcgcggacatccgcctgacggccgatgttgacatccgcggcaccaatgcccccgacccctatgccggcaaggcgctgccgcactacaagagcggcagtgtgcagaatgtgcccgatgccgagtgggaggccctgctcgggcatcccatcccgcaggataaggtcaaaatcgaccgcaacatgacgctgggcgagctgaaccacagccgcagcccgctgggctggctgatctgggccgtgctgacagcactgctgaacgccagcttcaaaaaaggcaagcccgatctgaatgtgctgttccagtacaacatgccgctgcgcgcgctggccaaaatgacaagcggcgccatcagcatgggcatggtggacggccttgtcatggagctgcagggcttctggatcatcggccttgtacgggtcatctatgaagctgttaaaaatcaaattctgaacgcgcagat

SEQ ID NO: 14147 - DNA, 12324 bp, Unknown
  gut microbiota DNA sequence
cgggaattgtgcggtgttgccttatataagctgtaccacaagcctagcacattttgcggtttgccgcaagggattcgacagggaatttgttgcactttggctgcagaattgctataatataaactgtactattataaggcatttctgcagcgcacggcagtctgcggcgatgccataaatcacggagggtcactcctatgaattggatcgacaaattggaacgccgctacggcaacctcggcatcccgaacctcatcaacgggctgatgatcggtcagctggcagcgggcctgatcgtgctgctgttcgactggaaatttgcctcgatgatctcgctcagccgcatctcggtgctgcaggggcagatctggcgtcttgtcacatttttgtttcagcccatctggctgggcggtgtgctgggcgtgctgaaccttgtgttttacttctggatcggcaacgcgctgacccgcgtctggggcgatttccggatgacgctgtttatggcgttgggcgtgctgggcgcctgggtgggctgcttcctgaccggctcggccgggccgagcgccatcttccagagcatgctgtttgcctacacttggctttggccggaccagatggtgctgctgttcggcatcatcccctttaaaatgaagtatctgggctggtttgagcttgcgttgtgggccatcagctttgtgatgggtgactttgcgaccaagatcagtctggtgctggggctgtccggttttctggcgttctacggccgcgaggtttttgactggtgccgcgacgccctgacaagctggaagcgccgccgcgactgggaaaaccgcaaccgctgattttgcatggataccaaactaccgatagaaagggcgaatgtattatgaaactgatcactgcgatcgtcaataaagaggattcgagaaatgtctgcaatgagctgctgaaaagcaagttctatgtcacccgtctggccacgaccggcggctttttgatggcgggcaacatgacgctgctgatctgcaccgaggatgagcgtgtcgatgactgcatcaatgtgatctcgaagtgctgcaagcagcgcaccgagatcgtgcccggcaccgccacgatgggtctgggcatcgagagcgccatgccgatggaggtcacggtcggcggcgctaccgtgatggttacgaacgttgagcgcttcgagaagctgtgatgcttgaacgcctggccggcaatgatgcgctcaagcgtgagcttggcacggcgctgcacagcgggcggctgccccatgcggttttgctggtgggggagccgggctgcggtgcgggctttgccgcgcgctgccttgcggcagattacctctacccggcgggcggcccccatgccgaggccgtgctgaagggggaggataccgagtgtctggccctgcggggcgagggcgccagcgggcagatccccgtcaaaagggtccgcgaggcccgcgaggcgatccagcgctcggcgctgtccaccgatgcggcgggccgtgtgctgttcatctacggtgcgcagaatctgaacggaacgcagggctcgtctgccaatgcgctgcttaagatcattgaggagccgcccgagggggtgctgtttttgctgacggcacccagcgcggcggtggtgctgccgaccattcgcagccggtgtgcggcctatacgatcgcgccggtgccggtggcggactgtgccgcccacctgcgcgccgaacggctgcctgccgctgcggccggggagctggcctttctgtatgaggggcatatcggcacagcgctgaaaagctggaacgacccgccgacaaaggcggcgctgggcatggcaaaaacgctgtgcggctatgcggcgcagggggatacctaccgggcactggcgctgctgacaaagtacgagcgcgacagggagggctttgccgcactgctgtggcagctggatcaagtgtgcagtgcggtgctgcgccgccccgcctacgggcaggagcagtgcggcggcctgacgcccgagggggccgccaagatattgcgggccgacgccggggcgcgccgcagcctgcagggcaacggcaatctgcggttgaatgtggccgtgctggcggggaaattgacataaacatctgccgccgcacttccgggcgggcaatgcccgcccctgcacttatttactgatataccaacaataaaggaccaacccatgaaagtagtttccgttaaattcaaagaaaatggccgggcgtactattttgacccgggtgacttcaagatcaaggagggcgactttgtggtcgtcacaacggcacgcggcaccgaatgcggtgaggtcgtgcgcgcggcacatgaggtgccgggcttctcccgcgaggtaaagccggtgcttcggatcgcggacgccgtggatgtgcgccgtatgcgccagaaccgcgccgatgtgcagcaggcctaccagatctgtgagcagcgcatcgccgcccacggcctgaagatgaagctggtcgatgccgagtacacgctggaccgcagcaagctggtgttttatttcactgctgacaaccgggtcgatttccgtgagctggtcaaggatctggcatcgcagttccacacccgcattgagctgcgccagatcggcgtgcgcgatgagagcaagatgcttggcggtctgggcctgtgcggccagccgttctgctgcagccggttcctgaagaacttccagccggtgtccatcaagatggccaaggaacagggcctgagcctgaaccccgccaagatcagcggctcctgcgggcggctgatgtgctgccttgcctatgagcagaaaagctatgagtatctgaatgccatcaccccgcaggtgggcagcatcgtccgcacgccggatggcgaggggaccgtgattgaaacgaatgtggtcgccggtacgctgaaggtgcgctccaatgtcgagattctggcaccgcgcatttacaagcgggaggaatgtgtctatatccgcggcggcaagcgcgcgccgcagcccgctgacccggaggattgacaacccgcggctgtgggagttgcttgtgtcttacccgtgaaaaaaatcaagatatggcacttgccaaaatcaaacggatatgatacactatgtataacgcagtaggcagagcaaaccgactgtgtgccgatccggggagcagccgtgcagggccggatgggtacaaaatatacaattagcacggagataaggagtacatgatggctcattccgttaacgagtcctgcgttgcttgcggtgcatgtgttgacacctgccctgttggcgcaatcactatggaggacaaggctgttgtcaatgcagacacctgcatcgattgcggcgcttgcgagggcgtctgccccaccggtgctatccaggctgagtaagctacattagcacaaattcagcgcgttctctccggcaaagagagaacgcgcttttttattttgagaacaggcgttttttattgtagcagtgccgtaggggccgggcatgcccggcccggcggtgtacggtagacgagcgcttgcgggaaggttgcgggccgggcatgcccggcccctacaggtgcgttacaggtgcgcggttattagcttcgccttcagcagatccgcgggcggctggccgggggcgctggcggctgtgccggaggtcacgccgaaggtggcgcagctgccgaaggccccgccgcaaaagcgggtgacggcgcccagcgaacccatgctcatcgtgataagcggtgtgccggggcgcgcggccatggcgcaggcggtggcctccagcagacgggcggcatcggcggcggtgtggggcatgacggccagcttggcgatgtcggccccggcgtccgccatgccggtcagggcggcggtcatcgcctcggtggcgggggtgccgtcaaagtgatgctcgctgaaaagcgcggcggccccggcggcgcgggcagcgctgcacagggcatcgcggtgggggccgcaggcgcgccactcaatgtccagcacatccacgccgccgcaggccagcagggcgcggcagcaggctgcgtaggcatctggtgtcaaggcaagctcaccgccctcggcccgggtgcggatcgtgacgataagcggcttatcggtaaggctgcgcaccagcgccagcgcggcggtatggtcggcagcgggcagcgggtcaaggcgcagctccaccagctcggcggcggggtcggcctgcgcggcggcggccagaggacgcagggcatcaaggctgcgggcgaacagcggcacgatgatgcgcggcgcagcggcggtgagggtaataccgcgaagggtcagcataaagatcatcctctcggggcgtttttcccattttagcacaatttggccgaagtgtaaaacagtcccgcattttcgcttgaaacccgtttgtcaatacggtaaaatgctgaatatgaggtgaattttatgagcaaaatcacgataccggataattcgatcctgctgctggagggcggctcgctgcgggggctgtacacggccggtgtgctggatacatttatggagaacggcctgtatttcccggcagtggcgggcgtgtcggcaggggcgctcaacgcgctgaactatctctcgcaccagccggggcgggcggccagcatcaacctgcgctaccggcatgacccgcgctacttcgggcctaaggcggcgctgcggggcggcagcctgttcggcctgaaattcatgctgtacgatgttaaaaaagaggttccctacgatgaggacacctaccggcacggcggtatgcggatgatcgccgtggcaacgaatgtcgagaccggcaagcctgcctactttgagaagggcaagacggattttgatttcaacgaggcggtgcgtgcatcggccagcctgccgctggcgtccacgccggtcatgctggacggccagccctatctggacggcggctgctcctgccccattgcgctgaactgggcgctcaagcaggggtttgacaagatcgttgtcgtgaccacgcggcagaagggcttccgcaagagtcagcccggccagcggatggtagacctctacgatgacttttacggcgataagccgctgtttctggccacgatgctgacccaggagctgcgctacaacgccctgatggatgagctggacgagttggaagagagcggccgcatctactgcctgcgcccgcaggagccgatcacgatcagccggtttgagggcaatgtcgatacattgaccgagttgtacgcccgtggccaccgcgaggggcggcaggcactggcgggcctgcaggcatatcttgcagggcctgccctgcaggggtgaacaccggcggagtctgccggaatacccccgcaaaagaaacctgaagcgccgtgggccggggtgttgcgtgatcgccaaaactgcggtacaatagccttgaacagacaaaacaaaaccgtgaaaggatgaccccccgatggttaaaggcgttatttttgatatggacgggctgatgtttgacaccgagcggctgtgggataccctgtgggagccggcctgccgggagctggggctgcccctgccgccggatatggaaaaatttacggccggcgggcgcgggctggcgggggaaaacctctgccgccatgtggcgtcctacatacccggcgacccgaagaagctgctggccaaggtctggcagctggccgacacccgctttgccgagggcgtaccctgcaaaaagggcctcagggaactgctgatggcgctggaggatctcggtatgccgcgcatcgtggcaagctccagcccgcgcaatatgatcgagatgaacctgcagaccaccggcacggcgcggtatttccatgatgtcgtctccggcaccgaggttgcgcacagcaagcccgcgcccgacacctttctgctggcggcgcaaaagcttcggcttgccccggaggactgccttgtgctggaggacagcttcaacggcatccgcgccggccgcgccgccggttgcgtgaccgtgatggtgccggatcttatgcagccgaccgaggaaatcgcgcggctgtacgaccggaaatgtgacgatctgctgcaggtgcgggatctgctgatcgaaggaaagctgtgaccgccaatttccctcttgcgttttgacggatattgcgctatactaagcgatggcggcccgcccgggccgtacatttgcgctgtactcccgaattgtaggagacggcagcaggaggaaaattgaatatgaaaaaccgtaccaacatccgttggctgacccagcttgcactgctggtcgccattctgcttgtgctgaactacaccccgctgggctacctgcaggtcggccccctgtcggcctcgctgctgacggtgccggtggcaatcggcgccatgacgatgggccccacggcgggcgcgatcctcggcggcgtgttcggcgcaacgagctttattcaggcgctggagggcaagtccgcaatgggcagcgccctgtttcaggtcagcccgttcggcacctttgtggtctgctttgtggcccgcgtgctggtgggcctgtgcgccggcctgatctttaaggcgctgtgcaaggcactgcccaaaaaggaaaagctctgctgctttctgggcggtctggcagcccctgtgctgaacaccgcgttctttatggggtttctggtactgatcttctataactgcgagtatgtgcagaacctggccggcacgctgggcgctacgaatgcgttcatgtttattgtgctgctggtcggcgtgcaggcaatttttgagtgggtcatctgctgccttgtggcaggcgctgtctcgctgccggtgcgcaaatacctcaagctgaactgaaaatgacaaaagagcgtcctttcgcaggacgctctttttttatggggtcacactgccccgtagattcccctgacgctgacctcgccggtgaaaacgcgggtgtcgccgcgctcatcatggacgatcaggcggccatcggtatcgacatcggttgcaacaccggcaccgccgtcataggtcacgcggcggcccagattgacgcagagggccttgtaacgctcccgatagggggcaaagccctctgcctcataggtgtagagcgcgcggtcaaagccgaaatccgtcagatactgcgccagccactcggggtcggcggtcgtatcgaccggcacaccctgcagggcaaggctggtgccgtgaggcaggccggcggcatcgaaataggactgcggctgggcaaggttgatgccgatgcccaccacgatgctgtggccgtccggcgcgccctcgcagaggatgccgacgatctttttgccgttcaacagcaggtcgttgggccatttgatctgacactccacgccgtagcgggcacgcagggcatcgcagacagcaaggctggcaaagagcggcagggtggcgggctgcacaaggtctacccggatgactgccgtgtaataaagccccagacccggggcatcggtccagctgcggcccagacggccgcgcccggcggtctggtgggtcgagtagaccgcgccgaccgggccgaatttgtcaaggttttgcttggcccagaggttggtgctgtctacctccggcagatagatgacgctttccttcatattgagggcaccctcttccagctgaattcacaatggccgtcccggatggtgatgacgccgtagctgccgccatcccgcaggctgccggggttaaagacggtggccgccgtgccgacgccgcgcaccagctcccggcggtgggtatggccgaaaagcgcaacatcggccccgcgctcaccggcggattcagccagacgctcgctgcccatcttgacgccgtagtggtggccgtgggtgtagaagaaaagcaccccgccgaagggggccagcccctcagacggctcgctgtagttgacatcgcagttgccggccacccggtagatggggtaggggatcggctgtctgcacatctcaagggcggcgttcaggtcatacagaccatcgcccagatagaacatggcatcggcggtttcgttcgccagcagccagcgcaggtcccgcaggcggccgtggacatcggagacgacgaggattttacacatagaaatagactcctgttgaaaaaggcttctcccctgggggagaagctgccgccgcaggcggctgatgagggagagcttgcggaggcatggccgtgaatgggcgatggcgcagggctacccctcatccggcctcgggcgaggcctcggccaccttcagtctccgcgctaagggccgcctacggcggttgcgctccgacacgcgcctgcgggcgcagccccaaagggggaaggctttttatttgataagctctttataaatttcacctttactgaacggtgtcccggcggcagcctgcttggcagcggcggcggggggcaggccgcctgcctgcagggcgcgggcggcggctacggcctgctccagcgtgggggcggcggcatcggccacggcggcggggtcggcaccggccagcaccagcacatactcaccgcgcgggtcgttttccttataataggcaacggcctcgcccagcgtggtctttttgatctcctcgtgcagcttggtcagctcacggcagagggataccggacggtccgcgccgaacgcggcggcaagatcctcaagggtgccgcgcagcttgtgcggtgcctcatagaagatcatcgtgcgggtttcgttctgcagaaaggtcagccgctcccgccggtcgcgcttaggaacgggcagaaagccctcaaacacaaagcgggcggtgggctgaccgctggcagccagcgccgtgacgcaggcggatgcggccgggataggcacgacccggatgccgcgcgcatgggcctcgcggacgatctgctcgccggggtcgctgatgcagggcataccggcgtcgctgcagagcgcgcagttctccccggcctcaatgcggtttaagatggcctcgccgtggtggagggcatgctcatagtagctgaccatcggctttttgaggccgagatggttcagcagacgcagggtcacgcgggtgtcctcggcggcgatgaagtccgccatgccgaaggtggcagccacgcggggcggcatatcatcaagattgccgatcggcgtggcgacaagatacaaagtgccgggcaaaacggcaccccctaacttttgatataatatactattatacccgcaaccgcaaagacacgcaagagcctgcaacagagtttagcgtttagatgtgatgtgcgcgcatttggtgcgcaataaaaatgcggcgccgaagcgccgcaccttatcgcaactctaaacgctcaaagctcactctccgctgcgcacggcaaagccgtactcgcggtccttggcgggcaggtcggtgacctcaacgccctcgatgcgggcccagcggttcgcgcgctcgatcgtggggataagctcatccagcgcggcgcgggtgccctgagcctccagcgtgacgctgccgtcccagttgttggcaacccagccggtcaggcccagatgctgggcggcggcgcgggcgtaatagcggaagccaaccccctgcacctcgccggtaaagcgccagcggcggcggatggcgctcatgcgtcgatgcccgtgacggtgtagtccttggcctccacggcggccttcaggtcggcatcggctacatcgcggctcagggtgacaacggccgtgccggcctcgtggctgaccgcggcaccggtcacgccgtccagtgcctccagtgcctttttcacggtggcctcgcagtggccgcacatcatgccttcaatatgaatggtcttgttcataataacttcctccgttgtatcgtttgtttcggcaggctgcacagggcagctgccggtggggcaggcagcgggcgcggcggccggtgcgcgcgccggggccttgcgcttcggcggggcatcgtgggcggtgctgcgcgggtcaaaggtgttgaggcgcagcgcattcgtgaccacgcagacgctcgacaggctcatcgcggccgaggcgatcatcgggttgagggtgatgccgaggccggtgaaagcacccgccgccagcgggatgcagacagcgttgtagaagaacgcccagaacaggttctggtgaatgttgcgcacgaccgcgcgggacagccgcacggcggcgggaacatcggccagatcactgcgcaccagcactacatcggcggcatcaagcgccacatcggcaccggcaccgatcgcaatgccggtctcggcgcgggtcagggcgggggcgtcgttgatgccgtcaccgaccatggccacgcggccctgcctctgcaggcggcggacctcagcctccttcccggcgggcaggaccccggcaatgacatggtcggcgtccagaccgaccatcgcgccgatgtggcgcgcggtggccgtgttgtcaccggtcagcagcacgacctgcaggccgagggtccgcatctggtcgatggcgggcttagaggagggcttgacgacatcggccacgccgatgacaccggccggccgccccgccagcgagaagtacagcggggtaatgccgtcgcggctcatctcggcaccggcctgcacaaggtcatcgggcagggtgcaatgcgtgccgatgaaatcggcgttgccgcccgcgatgaccttgcctgcgaccttgccctgcagccccttgccggggacggcagtaaagtccgacaccgtggcgtaggagagcttgtcggtgtcggcgcgctgcagaattgcgcgcgccagcgggtgctcgctgcgcagctccagcccggcggccatgctgagcaggaatttttccggcacattgcgggtgccgatgatccggacaacgctcggctcgccggtggtgacggtgccggtcttgtccagcaggacggtgtcggtgtagccggtggtctcaaggctggcggctgttttgaacaggatgccgtttttggcacccacaccgctgccgaccatgatggctaccggcgtggccagccccagtgcgcaggggcagctgatgaccagcacgctgatgccgcgcgccagcgcaaaggtgaaggtctggccgagcagcagccagatcaaaaaggtggccgccgcaatgcagatgacggtgggcacaaagatgccggagaccttgtcagcagtcttggccagcggggccttggtggcggcggcatcccgcacaaggcggatgacctgcgacagggtggtgtcctgcccgacacgctcggcccggcaggtcagtgcgccgttctggttgatggtggcggcgctgaccggggagccggggaacttgtccaccggcatactctcgccggtgagggctgcctcgttgaccgaggaaagcccttcggtgacggtgccgtccacagggatgctctcgccggggcggactaagaacagatcgccgacagcgacctcgctgacggggattgtgacctgctccccatcgcgcagcacgcaggcggtctggggggccagcttcatcaggcttttcagcgcatcggtcgttttgcccttgctgtaggcctccagcgttttgccgactgtgatcagcgtcaggatcatcgccgccgactcaaagtagaggtcgtgacggtactgcatgacgaggtcgtcattgccggaggaaaggccgatgcagatcatgacgatggcaaacaggccgtaggcgagcgaggcgcctgcgccgagggctaccagcgtgtccatgccgggggcgcgggtttgtatgcccttccagcccgaaatgaagaaggcgcggttgatccagcagaccggcagtgtcagcgcaagctgtgtgccggcgtacagaatggcatgccagccgccgccgtggaatacgctgccgagcggcaggccgatcatgtggcccatcgagacatacatgagcggcacaaggaagcagaggctcgcagtcaggcgctttttcagccggggggtctcggtgtccgccagctcggcactttcgctctcggcggtggcgggggatgcgccgtacccggcggcatccacagcgcggaggatgcgtttggcggtggcgtcagggtcggcatcgggggtgtaatcgacctgcatcgagttggtcagcaggcttaccgtgaccgatgccacacccggcaccgccgcaacggctttttctacatggccggcgcaggccgcacagctcatgccggtgatatcgtagcgttgcatggggggtactccttttttgtgttgctgagaaagccttccccc

SEQ ID NO: 14148 - DNA, 4081 bp, Unknown
  gut microbiota DNA sequence
actctaataactactactttataatacgaggaagtttcgtatgaaacacattaaacgcgcagccgcaatgttgctggctgttatgttgtctctgtgcctgtctttgacggcatttgctgctactgaaacctttggtaccctgaccgtaaccggcaagggcttaaccgggaaaaccgtgaccgccattcgtatgtttactgccaatgtcaatgatggtgatgaagggaaactcaacggatttgacagctattctctggagaatgcttggcttgctttcttcaaggatagttctcgaattgacgctgtcaaaactgctggcaagatcactgatcctaatccgtcggatcaggatatgaaagatgctgctgttgcgtatgtaaagagtttgaatgatacgcagcttgcctctttggcacacgatgctcagaaatgggtgcgtgatactaagcacaaggactctttctcggatctgactaaaacctccgcagcagccattgcagatactaccgacaacaccaagggtgttgcaaccattaccaacctgacttccggctactatctggttttccccgaaatgggttctaccggcaacgctatttccaaggacgataccaccgctcgtggcacggatgcaatgctggtaaatatccccaagaataagggcaacactgctgcaaccatcaagagcacctatcccacggttgataagaaagtacagactactgagggcggcgaattcaaaactgatggcaacgctcagattggcgataaagtgacttatcagctgactgcgaccgttcctgatatgacggattacaccaagtacaccttcaaattcgtcgatacgctgacaaagggtctttcttatgttgaaaactccgtgagtgttaaagttgccgatgccgcaatcactactggctataccgcaacctatgctgctgagtctaaaaccctgacggttacatttgataacttgaaaaccacaaataaaggtgagaatgctaccgttgccgcaggcgatgtgattactgtaacctacaatgcttatatcactgcagacgcagccgttactgaccccgcaaccaacactgtgcatctggaatacagcaccaaccctgatggaagcggcaacggtgaatccactccttccgaaagcaaagtctatacctatcccatcgagattttcaagttctataaagatggcgaaactgaaaaaggcttggcaaacgcaaccttcaaactgagcaccagcgtggattctaccgcggcaggaattgagcttgtacaagataaaactggtaacaattcttaccatgtaaagggcgaaggcgaaacaaccacgattaccgaggttactaccccggatggcggtaaaatcaccatcagaggtctgaaagccggcacttactatctgcacgaaattaccgcacctaccggctttaacaagttgactcaccctgtcaaaatcgaaatcaccgccgatgaaaatgaccagagcaaggcaacctataaaatcaataatgtggcaaataccggagcgaatagccatcaggtcaaagttgagaatatgaagggcaccatgctgcctgaaaccggtagctttggtaccatcggcctgaccatcttgggcgttgccgtggttctgctgggtgtgtttgcccccaaaaagaagaaggaaaaccgctaaatgaaagacaggctgcgcgggcttgcccgtctgctggtcattctggtgggcatcggcattctcgtttatccatcattaagtgaatatctggcagagatccacggcagccgcacaaccgcctcctacgatgattcggtcagcaagcttcaacagcagcagctggacgagcttctggccgaagcgcaggaatacaatcgccagctggcgcagcagagcgatggcgtagatattatcgataataccgaagacggcgacaaaagcggcccctattggcagctgctgaacatcgatgacaccggtatgatgggttatatcataattcctcgcctgaacacgaccattcccatttatcacggcacctcagaatctgtcttgcaggtgggtgttgggcacatggaaactacctcactgcctgttggcggtgaaagcacccatgcggcgctttccgggcatcgtggattgcctacggcgagcctttttaccgaccttgaccaaatgcaggttggcgaccagttctatatcaaagtgctggggcacacgctggcttatcaggttgatcagatccttacggttctgccggacgaaacacagccgctggctattgttcccggtgaggactatgtaacactgattacctgtacaccttacggtgtcaactcacaccggctgctggtgcggggaacaagaatcccctattcagagcaggagatggagcaggcagccgccgatcaaagccccaagaactggttttacactttgccgattcaattccggcatggcctgattggtgcggcggtaattcttgccattatcatactacggtggcttgtgatgctgatatggcacaaagcccaaaagaggagatgagaacatgagcttaccaaaagtccgcaggctttgcgctttgctgtttgctgttgtactcgcgttctcttttcagctggttgcctatgcagcgcataaccgctacgacgatgatgactattccattacgctggatgcacattaccgtgaggacgatggttccatttactttctggctggggatacttatgagctgaccctgattgctcacaagtcgattgacgatgatacgctggatgtgacctacaacattgtagacacttaccgcgattacgattgtgattggcctacaacctcggcttccgagaggcttgctatcgctaaagagctcgcgaaagtcgctgtgccggatgaaaccggcgtgaccaataaatatggtaagctgactttttcgaatttgaagccgggactttatcttgtggctcgcacgcaggttgcgcctgccaatcaggagtacatcctcgacccctaccttgtaacattgcccatcattgaagatggcgaggtattcaaggatattgaggtagatgaaaagttcgcccatattgacgggccgcggccttcgcctacgcccagtgcaagcccaacaccggaatcttctccggtgcctacgcctacagtcacaccggaaacgcctaaagccaagctgccgcagacagggcagctgaactggccaataccgattctgattgcaatgggcctgagcttgattctgttgggcggctggctgcaaaggaagtctgaccatgagaaataagcttggccattattgcacagtgcttggcattttgcttctgcttgcggcaatcggtttgtggggttacaactactacgatgcaaaccgtgctgacgaagcagcacaaaatctgctgaccgaagtgaccatgcagcaatcgcagcagacacaggagtcggctatcgccaaagctgcagacgatgaaaccttcctcggaacgctttctattcccgccttggggctggaactgcctgtgtataatcgctttgacgatgctctgctgaaggatactgtctgccgatattccggtgctgtagatacagaaaatcttgtgattgcaggccataattacaggcggcatttcgggaaattgagtaatttacagcaaggcgatgaagtcatgctgaaaaccatggacggaaacacttatacttatcaggttatggctttggaaacgctgaatgctacggctgtagatgaaatgacatccggcgaatatgccttaacgcttttcacctgtgactacagcggcaatgcgcgcatcgcggttcgttgtcagccaacattctaaatctagggctgcaagttgacgaaagttgcttgcagccctatttttgattgtgtaaaacagggctgctcacttcagcaacaaaaacgcttgcaatcaaaatcgcaaaatacgcatcttttttattggggattcactacactcagcggattacagcgcacaccgttttgcatgacttcaaaatgcagatggttaccggtgctgtcgccggtagaaccaacatagc

SEQ ID NO: 14149 - DNA, 7928 bp, Unknown
  gut microbiota DNA sequence
tgtccagcagcacctgattgccgtagctgtcgttccagccgctgaccagcaccgtgccgctgtgagcagccagaatgggtgtgccttccggcgcgggaatgtccgtgccgcgatgcccggcgttgccgaaggcgtccacttccccgaagtggcaggatatataagtgtgccccggcagcggccagcacaactcgccatcagcaacagcaatcccgccgcacagagcaagcaggctggggcgcatttcctcggatagcagctggtgcaaaatgtcccgctggtcttgcgtaaagcgatacaggtctgccagcgcgtccaccgatttgctgctgaccgtgatgtgcagaatgtactccgtaaccggctccgggtcgggttcgtcctcggtcggctccggtgtggtagttacggtttcgatttctgaagtgatttggtgcatggaccaaaaggtattctgaatcagcagctttttgccttcgtcgatgacaaccacatcactgtcggaattaagattggtgtgaaccgcaaagacggccagcacttcgggccaatagtttgcccaagtgtgaccgtcctcgtagtcatattcgatggtgctttcactgcactccgggtgggcagctacgatctcgttgatggcttcaccaaagtcggcattggtctgggcaacgatttcggcaatgcggattctgttcgggtcgccggattcatcggcaaacaaaatgcccattggtgagccgatcaccgccgcagcagcgccgatgaccatggccaacaccagcaccacgccgccggcgccgagcagggccaacagcgttgcagctgcctgccgggctgcacgagcaagcagcaccctgatggcactcatcaggtagcgaaacagggcttgcaatcgggtggcagctgccttttggggtgaggtcattcccggcaaggtggggctttcgatacgcattggggcggtgatacttgtggcagcgcgttgttcggcttgcctttggaagtgtctgcgcacagcctcccgaataaagtgctggcgtttcaggctttgctgccttgtctttatcagctggctttgggagatttgttcctgcggtaacgcactgtctgccttgggcgtttggggcttggctttttctatggcaatcgcccgaaagcgcccgcgcttgaattgttcgcggcgttcctgctgggaaagaacctctatggtgggttgcgaggccgtctggcttttagcaacaggggcggccttttccgtacttttctgccgctgttcacgcttgtcctgcataacgcggaattgcttatagctgattctggcggtgcttatggctgcgttttctgctgtgccaaccacttgttcggctctattctgaatagcctgttccccgtagtcggtggtatcggtatccggcgctgtggccgcttgcttagccctttgagcactgccgcgcacagcggattgcatcatcttgcgccgcaccaaattgcggctgcggtcgtcagcgctcattgtggttatcccggttgtggcggacctgtttgcgagcttgcatatcgttcatcacgcgggtatactgctgcggcgtggctttcatagggtagattcccagcggagtatccgtaaaaatgataggatcatggtacagcttttcatagcgtttgaactgttcgtccgtcaggctggtaaaatctccatcgcgcagaccgcaaacaaaaaagctgcccgcgagaatatcataatcttcgagcagccgattcagtggcatattgttcagctttccctcatcattacaaacaatgcaagcgtaatcccgccaagggtacacaccctcaatatcgccgtccacaagtttttgcatggatttcaaattgttttcaatgatacgttcctccgggtattttcccggctgaacatataaaacgcggattttgttttctttgggcatggtaacaactcctttgcaaataaaaattccgccatgccttgtcgcacagcgggttgtgggtgtaaaatagaaaacagtactatgataaggggataccaaaatgacgctttatatcagtgctgccgagtatgactaccacaccttggtcaaggtggcagagatggccggactacacggcattataggctttcacgaaaccgaggacgggtatttgttgagctttcctgatactaaggaaacgccaacacttataaatctttacaaatcctatcttaaagatttggagaataatatctgggtacattaacttccaatttatcaaatcgcggcgggcctcggcccgccgtttttgttttgcgcatagttattccacctctccgggtttagtgcttatcagtttatataccttacctgttgtcggctgcttattttcaaacgggatgatgttattgcccatcttcagaattccctgcccggcagtggccagtttcaggtattcctgctgcggctctgacagaccgtacagtttccgcagcggcagaatgtcctttgtctggcgcagcattaccacaaattcactgttggacaataccgcgcaggcggtatcgttggtcaggcaatcctgcgcgttctgggtaatgcccgtggcataggcgttatatttgcggaatcgcttccagctctggtacagaaactttgcactttcctcatcgcggagcaacagatagatttcatcaaagtatacccaagtggctgcgtttgcgtccttgcggttgctgttcataaccgcagtgttaataaattccagcatggaaatcatcgccaccggtttcagctgctcacccaaacgattgatgttaaagcaaatcagacgattggacatatccacattcgtgggctgcgcaaaagctttcatgctgccttttgcgaaaatctcaattgccaaggcaagctgctcggctctggggtgatgctgtgcaagcaagtctttccataaatccaccagtgtggggcaaggtatggtatagtgtgaatccacaagcggtttgtagatatttttcaagctgcgatcaatcaggcttttgtcgcccggaatcatgtttccctccatcaccttttcgaacagggaaagcacaaattccgacttcgcattttgcggcagaatcttactctttccatcggggtagaaatccagcggattgaagtgcgtttcgctgattggtgaaatgtctactacctcgccgccaatagcgtgtaccaaaggagcgtattcgttttcggggtctacgatataaaattttgcattcggaaaacgaagatacaacatcagaatttcgagctttacgaacagcgatttgccgctgccggaggtacccagcaccataccatttccgttcggcagttcggaacgcaggccgacaatcaagttgccggatacagcattaacaccatagaacataccgcccgcgtccatcacctcctgtacattgaacggcacaagggcgcacaaccccttggtaagcatagtgcgcacactggcaatgcgccgcaggccatacggcatggccgtgttaaaggctcgttcctgctggaaacgcagctcggtaaaccggcaattgaagttcgctgccgtggtttttagtgcagcggtttctgctttgagttcgtccagtgtgtcggcaaaatatgccgcggataacaacaccaagaacatctgctggtcatgctcggccatttccgttcggatatattcgatgttcttctcctgtgcctgtgtcttgtagggcacagtggccacaaagtcaagattctccaccgttttgcgattaaaccgcaccttttcggcatcggttttcatccgggaatcctcgatttcgcggtaagcgtcctcggtttccacaggctgaatggcaatggacaaaacgatgtacggcacctgctggagcagtgtcgcaataaacttatcgtccaactgctgcggatactgggcaatcgtcatgcacttggcataggaatcgtcaatctcgatgtggtctttgcaaaagcgcattgaatccggcgcaatggcatcccgaaaatcctgtcccaatcgggtgcagttgtcaaaatcaaactggaagtgcgtttcctctccgatgcggaaaaagttgtgcagcacttccagccgggcgttgttatccagcgcacagactttgcagccaatgttggacaactcgcccagcatattccgctgcacctgattcagccgttcgcgggcatccttgctgttctgcttgttggtggagagaatcaggtacttttgctgcttcacattgccgatttctttggcgtaggctttcatcaggcgattgcgttcgacgcggtatgcgtcgagaccatcattggcgcggtggtacagaacatctcgctcaaaggaaatctcgtccatgcgctggctgacaatgcaaagctgcgcccagcagtcggtaggaatattagaataaatcctgcccatctttgccaaaatgtcctgctttttattgtcgttctgcatggcatagttgatgtcggagacactccacatctggctgtacacctcgccggagcgccaagtgccgtccgcatagatttcatcaatcgggatggacttttgcacagaagtcggaattttgtagctgccccgcgttctgcgtgtggaggcatattcatttaattaatcgcaaactttttcaccttctttttgtgttttggtttggacaaatcatactcggttttccataaccgccaactgctgccaaggattacactttccactacagcaaccagaaattgttcaaaattcaaatcgtcatagtggaagaaccctgcggcggcaatcggcacggcagccacgatgcaaacccagctggcggtttcccgccccaacaccggttccaacgtcagatacgctaagacggctgcgccgatggcgatgacggagcagatcagctggcgcaatgttaggcccataaagatttcttcttgatagtggcgtatttctttgttgattggattctgcatagcttataaccccatcatttcatgaataatgcggtcggagcctttcacaagcccgaccagaaccagcatattaaataccgtttcggcaagatagctccacaccattgtggtcggctcaccaccagtcaccgtgggtgtgctgacaaacgccgaataaatgatgcaggccagcacgatgacagcgccctccaagcacacgccgatatagctttttacaaaagaaatacccacagactgtgtgctttccccggcaaagctcgccagcggcaagggagccagcgccgtgtacatatacaagcgaaagaaccgcccgtacacggtgaggatcatcacgaacgacagcacggtaatgaacagacttccaagaatcgtgacgagccacaaggggatgctggctaagaaaccgacattttcaatggcagactgcatctcaccgggcagtgtgaccatcgcctgcgagatgccgcccataccggcagccatatcgctgaccacgccgttgcagatggaaaagatgttgagcatgatgtccatgccgtatcccaccaaggctttggcggccacaaagcggatgagataatgcaatgccgcttcggggcgcttgagttcgtgaaagttcatggcattcttgaacaacgatatagcgaagaacagcacgatcagcgcatagcctatgccgaccatggcgctgtgcaggctttgcataacgccccacacagccccgcccttaaaagattgggggctggttgtcaccagcccccaaagctctgttagtttgccattccaagtggaaaaggcgttgtttagattttctacgatccagttttggttcaaagtttcaccctctttcggataaaagaaacgaccgccttgctgaaaagcaaaacggtcatgatttcttaattaagttgcattgtgatttgcgtaaagaattccttgcaccaaatatctaaagcggatgtatcgcgtataaaaggaatcacatcctgctttgcttgattatagtctatggaagcaaagcggtcgcatagcatagagcgaattaccgagatgtcaaaagcatcattttctgtaataacaccactttgcatcaggcgagcctgtaaatgtttctggttgacggtagctcctttagagagataaaacacataatcatagagatcgcgccctttcacgcgattctgccatgcacggcatagtactgcatgaattttccctgcaaaaagagatggttcatcatagagatttatttcatacggcattggcgcaagacagaaccgcctctcaaatgttgcaaatgctggcggcatggtatcaatttcaaatttgattttaagagcctcgtttttggtgatactgtttgccgttacttcatccgcgtaaaaaagcaagaaatgctctttggtgtttccctttaagaatgcagaacgaatggcggattctttgtttttctctttctcagaaatgacaacatttaatccgaaagagcgaacggttttctcaagttcgggaaaataagctttcaaatcaaagctcggattacttgtcataagtgaaaaatccaaatcttctgaaaaacggtcaagcccataaaaaatacgcagtgctgttccgccgtagaatgcagcttccctgaagaacccagcacggctcaacccatacagaacgatttcctgcatgacctctttcatagcatttttctggtcatagatatttttgctgtcatatttgcgcagcatttgttctattactgtgttcatgcgattttctccacaatcttttgtaatttctgaatattagtgcaatggtacttcccgctgaggaaagcgacgtcctccacgctgagtttgcaaaaagcatcccaatctatgcgcaatccatcaaacatcaattcctttagttcgccttgacttgctacaggtgattggatgtagagttcgtcacacaacgccttttccgggcttgcaatttgaatcgcatacccttgctcggtgaaacaagtaataccataaggatatacggcagacggaacatcccgataggtaaatacaccaaaaggtgttttataaagcttcttctttttcttctcaaaggtggcggaagtgaaattgtacacagcttctggaataagaccatgataagacagagcaaattcaaaggacaggtacgacggggtgcagatacagtttgcaagcctatatccgggtgtagagggatctgtttcgtacagtccctgaataatcggaacacattctttattctttaccatgcgggccagcttatcgcgcggatttctgtagctttgcaattcttgcaacaacatcgcagtagtttttatcatattttcaccaccatatccaataatatcagatacgctggagaaaatcaagtgtttttcatttcagaatcatatccagaatatcctttgcaaagtaaatcaccacgccgccgaaaaaggtcataaaaccctgcgcacgctggctggcatcgtggcctttcagggcaagtccaatctgcacgataccaaaccccagcagaatcgccccgattgccttgatggcgctgaacacaaaatcgctgagggcattgatggtcgccagcgggtcgttggcggcaaaagcaggcatggccagcgtgcaggccagtgcaatggttgtggctgtaacaagataaatctgtttgattttgcgctggctggcattgagagaagaatatccagagaatgtctttgcctcagcttttgaactacctgcgttttctgcgctggcgtcgctcgtcttccaaaaccaaggcttgcaagttttttaggtaatcgttctccgcacgcagtcgctgcacttcggccagcagatcttcttctgcctctttcggcagtttctttgggcggccggtgctgccgcggccccgtcgctcaaccgacaagccttccggcccttcttc

SEQ ID NO: 14150 - DNA, 5702 bp, Unknown
  gut microbiota DNA sequence
cacagcatccgtttttgtttttatttgagcactgcacccagatttgcgctggtgaccagccgtgcataacgtgccagccagccggtcttgatgttcggctcaggctggatgtaggcggccttgcgggcggcaagctcctcctcgctgacggccaagtggatggacgcattcgggatgtcgatctcgatggtgtccccttccttgacgaggccgatggggccgccggaggcagcctccgggctgacatggccgatggctgcgccgcgggacgcaccggagaagcggccgtcggtgatgagcgccaccgtggtgtccagcttcatgcccgccagcgcgctggtggggttgagcatctcccgcataccggggccgcccttggggccctcataccggatgacgaccacatcaccggggtggatctcgccggcgtagatggccgcgatcgcggtgtcctcgctgtcaaagacacgggcggggccgctgtggacctgcatctcgggcgcaacggcgctgcgcttgacaacgcagccgtccggggcaatgttgccccacaggatctgcaaaccgccggtctggctgtacgggttgtcgatggagcggatggccttgtcgttcaggatcttcgcgccctcaatgttctcccccagtgtcttgccggtgacggtggggaccgcgaggtcaagcagcccctttttggccagctcagcctgcacggccggaatgccgcccgcctcatacaggtcgggcatgtgggtcgggcctgcgggtgccagatggcagaggttcggcgttttggcgctgatctcattgaaaagcgcaaggtcgatggggcagccggcctcctgcgcgatggccagcaggtgcagcaccgtgttggtggagcagcccagcgccatgtcgcaggtcagggcgttgcggatcgagcgctcgttgatgatctggcgcgcggtcacgccgcggttgacaagatccatgacggccataccggcgtgcttggcaagctgcagccgcttggcgtaaacagcgggaatcgtgccgttgccgggcagggcgatgccgatggcctcgcacaggcagttcatgctgttggccgtgtacatgccggagcaggagccgcagcccgggcagcagttgcaggtgcagtcctccagctgggcatcatcgatcatgccggccttgtaggcaccaactgcctcaaacatcttggaaaggctgacctcctcgccgccgtagcggcccgccagcatggggccgccgctgcagacgaccgcaggcacatcgatacgcaccgcagccatgaccatgccggggacgatcttgtcacagttgggcaccagcaccagaccgtccagctggtgggccatgaacatcgtctcgacgctgtcgcagatcagctcacggctggcaagggagtatttcatgcccacatgccccatggcgataccgtcacagacgccgatggcggggatgaggatgggagtgccgcccgccatgcgcacaccggccttgacggcatcggcaattttgtcgaggtgggcgtggccggggacaatctcactgtaggcggaaacaacgccgatcagcgggcggtccagctcctccggggtgtagcccagcgcatagaacaggctgcggttcggtgcccgctcggggccttttttgacattatcgctgttcataaggttttctccgttttcaaataaaatgccttcccctgcgggggaaggtgccgcgaagcggcggatgcggggcggcttttcgcccgctgcccgtaaacgggatgctgcgggaactctgccctcatccggccctgcggggccaccttcccccatgggggaaggctcagagcgttatcgtataattacttcttgagccagctcatcatcttgcgcagctcggcaccgaccttctcgatgggatggttggcggcgatgcggcgctgtgcgaggaagtgggtcttgcggccgcccttggggctcatctcggtcaggaactcgctggcaaaggtgccgtcctgaatctccttgaggacctgcttcatctccttgcgggtgtcctcggtgatgaggcgcttgccggtgcggtagtcgccgtactcagcagtgttggagatagagtagcgcatcttggagaagccgccctcgttgatgaggtcaacgatgagcttcatctcatggcaggtctcaaagtaagccatctcgggggcgtagccagcctcgaccagcgtgtcgaagcctgcctgaatcagctcgcagacaccgccgcagaggacagcctgctcaccgaacaggtcggtctcggtctcctccttgaaggtggtctcgaggatgccggcgcggccggcgccgatgccggaggcgtaggccagagcgatctccttggccttgccggtgtagtcctgctccacgcagatcagggaggggcagccctcgccctcggtgtacaggcggcggacgatgtggccggggcccttgggggcgatcatgatgacatcaacattcttcggcggggtgatggtcttgaagtggatgttgaagccgtgggcaaaggccagcgccttgccctcggtcatgtagggggcaacctgcgtgttgtagatgtcggcgcagagctcatcgggcacgagcatcatgacgacatcaccggccttggcagcctcctcgacctccatgaccttgaagttctcatgggtggcggcgaactcgctggccttctcccagtgggcggagcccttgcgcaggccaacgaccacattgacgccgctctcggccagattttcggagtgggcgtggccctgagagccgaagccgatgacggcaacggtcttgccgtcgagcacgccgaggttgcaatcggaatcgtaatacttgttgatagccattgtggtgtctcctttttgcttttgataatttttatatttgtaattttaattgggaaacgaaaataaaaatccgtaggggcgcattctatatgcgcccgtgcagtgtagcctacggcgggcggatatggaatccgcccctacagacattgaaaatttacgagcagctcaatggcagtgcgtccccggcaggggcagctgcgcttcgcgcacttcctgcgcgggcttttgcatgtgctggtgcttgccgccgcgctccaaagccgtgacgccggtgcggcaaagctcaagaatgtcgtaatcctgaagcattgcgaggaaggcatcaattttgtccggcttgccggtcagctcaaagatcatgctgtcgggcgacaggtcgatgatcttggccttgtaaatgctggaaatctcccgcagggcggcgcggttcccggcatcgcacactacctttaaaagcagcagctcacgctgcaggctcttgtcggggtccagctcaaagatctggcgggtgacctcaaggcgttcggtctgaagaatcagctggttgagcgcctgatcggtgccgcgcagcgtgaccgtgatgcggctgacagcggggtcgttggtggccgagaccgtcaggctgtcgatgttgaagccgcgccggcagaacaggctggaaatgcgcgccagaacgccgttggagttgtcgaccagcaggctgatgacccgccgggtgctgttattctgttccatgcgtgtcacctcattccatgatgatgtcgttgatggtgccgccgccggggatcattggcaaaaccttctcgtccttgccgatgcggcagtcgatccagctgggacccttctgcttcatcgcatcggcgaaggccgccttgaactcggcaggcgtctcggcgcggtaacccttggcaccgaagccctcagccagcttgacgaaatcggtgcggcggtgggggtcggtgtcggagtagcgcttctcatagaaggtcgtctgccactggcggaccatgcccagcacctgattgttgaagatgaccgtgatgatgggcagctcatagctgacggcggtgcagccctcgttcaggttcatgtggaaggagccatcgccggtcagcatgacaacgcgggcatcgcggcccagcgccatctgcgcgccgatggccgcgccgtagccgaagcccatcgtgcccagaccgccgctggtcaggaaaccgcgggatttcgtgtggtgcagatactgcgccgcccacatctggtgctggcctacatcggtgacatagacggcctcggggccggcctgattgcagatctcgtcaatgatctgatggggcttcagctcggtttcgctgtccacgggcttgtagtcgtttttctgccagccgcggatctgctccatccagagcttgtgctcggtcttttcgacatagggcaaaatggcctgcaggatatagcttgcatcgccggtcaggctcaggtctaccgcgacatttttgccaagctcgctcgggtcgatgtcgatctggatgatcttggcacgcttggcgaaggtgttggggttcagagccacacggtcactgaaccgggtgccgacggcaatgacgaggtcggcctcatcaatggctttgttggcggcgtagcagccgtgcatacccagcagccccagattgtgcggctcgccgtagctcagcacaccggcggccataagggtgtaggtggcgggcataccggtcttttccagcaggtcgcgcaggggctggcagcccgccgcgctgcgcacgccgccgccgaagtagacgatggggcgctccgcctcgttgatcatccgggcagcggccttgacctcctcctcatcgtagcgggtcacggtgcggatcagctccggtgccttgggggtgaactcacagctggcggcggtgatgtccttcggaatatcgaccagcacggggcccttgcggcccgactgggcaatgcggaaggcggcgcgcatcgtatcggccagatcctcaacacggcggaccgtgtagttatgcttggtgatcggcatcgtgatgccctcgatgtaggcctcctgaaaggaatccctgcccagcagggtcgtggccacattgccggtgaaggcgaccatcggtacgctgtccatataggcggtggcgatgccggtgacaaggtttgtggcacccgggccgctggtggccagcaccacgccggtgcggccggtcgcgcgggcgtagccgtccgctgcgtgggaggcaccctgctcatgcgcggtcaatacatggcgtatacggtcagaatttttatacaattcgtcatacagattcagcacggcaccgccgggatagccgaacagggtatccacgccctgctcgaccagtacctcaacgaagatctgcgaaccggtcaatttcatgatgcttgctccttcctgttgcctgacactgcttaccgggaagcggtagggcggcatgccctatatgcccccggtatggggcaataaatgaaaacaggctttgcccctcgtattccaagagacaaagcctgtataaacacgactctgcggtaccactcttattggggctgtgcccccgcctcatggacctccaacaaggtccggcactgtaacgggtgcgcccgtaccgccctactggtgaaattcaagcggtctgctccgggatcagttcgcggtctgctgccctgctgccttgcaccgaccggcagttctctgtagggtgcgggggccgttactatcttcccatccaagcattgtctggatttgtgataaactatacctcatttttgagtatttgtcaagtttttcaat

SEQ ID NO: 14151 - DNA, 2271 bp, Unknown
  gut microbiota DNA sequence
acaagcgtattcttggacagcctgcctataatattgattattataacacacatttttgctttttgcgattcttgacaaataagacattatagcgtattataaaatagtatgtggatattggggctttgcccctgcaaatatcagtctatcggcattttcatttttgagagggaatgtatatgattcaggaaaatctccgcaatgttgcgatcatcgctcacgttgaccacggcaaaaccacgctggtcgatcagatgctgaagcagtccggcgctttccgcgccaaccagcaggtggccgagcgcgtcatggactccggcgatattgagcgtgagcgcggcatcaccattctggccaagaactgctcctgcgagtacgagggcgtcaagatcaacatcgtcgataccccgggccacgccgacttcggcggcgaggtcgagcgcgtgctgaagatggtcaacggcgttctgctgctggtcgatgcggccgagggctgtatgccccagacccgcttcgtcctgcagaaggccctgcagcagaacctgtctctggtcattgctgtcaacaagatcgaccgcccggacgcccgcattgccgaggtcatcgacgagatccttgagctgctgatggatcttggcgctaccgacgagcagctggacagcccgatggtgttctgctccggccgtaacggcacggccagctatgactggaccgacccctcctccggcaaggacctgatgcccctgttcgataccatcctgaagtatgtccagccgccggagggcgagcctgaggagccgctgcagatgctggtttccagcgttgactacaacgatttcgtcggccgcatgggtgttggccgcgtgcagaacggcgtcatcaaggtcggcagccccattcaggtctgcgactggcacaaccccgatgtgcatatgagcggccgcatcaccaagctgttcgacttcaaggccaacggccgtgagccaatcgagagcgcccaggcgggcgatatcgttgccttcgcaggtctgcccgatatttccatcggcaacacgatctgcgaccccagcaaggtgcagcccctgcccttcgtcaagatcaacgaccccacggtcgagatgaccttctcggtcaacgattccccgttcgccggcaaggagggcaagtatgtcacctcccgccagattcgtgaccgcctgatgcgcgagctgctgaaggatgtcgccctgaaggtcgaggattccgccacgaacgattccttccgcgtcatgggccgcggcgagatgcatctgtccatcctgatcgagacgatgcgccgcgagggctatgagctgcaggtcagccccccgcacgttctgacccacgaggagaacggcaaggtcatggagcccatggagcgcgttgtcatcgacgtgcccgaggtctatcagggcaatgtcatgaccgctctgggtgcccgcaaggccatcctgatgaacatgcagatgatgaacagccgttcccgcatcgagttccgtatgcccagccgcggcctgttcggctatcgcagccagttcctgaccgacacccacggcgagggcatcatgaacacgatttttgacggctacgaggaatggtgcggtgatatccagacccgctccaccggctctctgatcagctttgagaccggcgacgccgtcacctacggcctgttcaacgcccagcagcgcggcaccctgatcgtcaacgccggcgagaaggtctacgcaggcgaggtcgtgggctacaccccgaccggcgaggacatcaccgtcaacgtctgcaagaccaagcacctgaccaacacccgcgcctccggcagtgatgacgccctgcgtctggtgcccgtttccaagttcagcctcgagggctgccttgagttcctggctcccgatgagcttcttgaggtcacccccgagaacctgcgcatccgcaagcgcattctggatcacgacctgcgcatgaaggccgccagcaaaaagaataagtaattttatccatacagcaagagccgccccgagtggagcggctcttgcttttttgtttgtaggggagggatgaatccctcccgggtaccttcctgccgccgcaagcttccacggcggccagagggctggccgccctacatgtgccccgggaaagactgccgacctgcggggcgtcgaggacgccgccccctacaatcgttgccataaaccttccgcctgcttgtaggggccgggcatgcccggcccgcaacttaccgccatatcc

SEQ ID NO: 14152 - DNA, 2383 bp, Unknown
  gut microbiota DNA sequence
ggatagccctgccttttgatgttatcatagcataaacctatgcttacggcaattgcgttttacaaaaataagacaccctttggcggtaaagcgcatagtcaggggtgttgcactttcccgcaaatgcgtgtacaatatggcatatatatttctggtaagggggcgggggcttggctacacagcaggtgcagcagcgcgcggcgggcggcattgcctacacgctgacgcggcggcgggtgcgcaacatcaatctgcgcgtccgggcggacggctcggtcgcggccagtgcatcggcgcgggtgccggccgcctatgtggacgcctttgtggcggcccgcgccgactgggtgcgcgccgcccagcagcgcgccgccgcacggcgcgcacaggaggccgcgcagccggatctgccgccgaaagccgaggcgctggcccatatgcaggcgttgtgccgggcatactatccgcagtttgcagcggtatgcccgggcgggcagatgcccaaaatcgccgtgcgcgacatgcacacacgctggggctcctgcagcttgcgcaccggcacgctggcgtttgcgcagcggctctgcgtgatgccgcaggctgcgcaggaatatgtcgtggtgcatgaattctgccactttgcccacccgaaccacagccccgccttttgggcggcggtggaaaaagtcctgccggattacaggcagcgggaaaagctgttgaaaatgcggtgacggctgaaaaagccttcccccctgagggggaaggtgtctgcggccccgcccgcagacggatgaggggggagtttgccgcgattgcccgtgaacggggtgctggcggaaggtttgccctcatccgaccttcgcgttcgctcggccaccttcccccggaggggaaggcttcatactctacaaataagggaggtacacaccttgccatctccacaaaaaaagtacacaacgctggtcagcaatacgctgctgtttgccatctcaaacttcagctccaagctgctcagcttctttatccggccgtatcttagctacgcgcttgattcgcccgatgttatgggtgtgtcaagcctgctgcagcaggccacaaacctgcttatcccggtggtcagtctgggcgtggcctacgcgatcatccggttcggccttgataaggaaaacgacaaggccagcgtctttgtaaacggtgcggccaccattggggtgggctttctggtgctgctgcttgccatgccgctggtcagcctgatccccaacgcggctgagtatctgcccttcctttacctttgcgtgctggcaagctgcctgcgcacgctctgtacccagttcatccgctcccgtatgctgaaccggctggtggcgatagacggcgtgctgacaacgctcagcctgctattgtactacctgctgttcctgagcgttttgcggatgggcgcgaccggctttttgctggccaacgcgctggcggacctgacctcgatggtgttcgtcttttttgcgggcggctgttggcggtattgcaagcccaagcggtttgaccgcgggctttggcgggagatgctgcgctactgcctgccgatgatcccggcgtccatcagcttttggatcatcaacgccagcgacatgttctttgtgcaagccctgtgcgagggctacggcggccgcaccggcaaccactgggtcgggctgctctcggcggggtattttctgccgcaggtcatcacgattctgggcagcatcttctatgaggcatggcagctctccgccgtgaccgaggaggccgaccgcgaggtgtttttctccaagatattccgcgtgtatgcaagcgtgctgttctgctgcgtggcgggcatcattatgctgtgccagctgctgatgcgggtgttcaaggccgagtattttgacgcatggacctttgtgccgttcctgacgctctgctcaatgctgacctgcatgaaccagtttttgaacagcatttatgtggtctataagcgcagcacggggtcgctggtcacgatgctggccggtgcagtgctgaacctgattttgaactactgctttatccggctgtggggcccgtggggcgtcacgctggccagcttcctgagcctgatgctggtgtttttgctgcgcgcctactcgacccgcggcctgctggagatcgacttccacccggcgtggctgattttgaatctggcgctggtgctggcggagatctggtgcatgatgcgcttggagcactgggcgctgccggttgtgggcatcacggccgtggtctgcgttatgaatatccgcgaggttttgagcatgctggatacgctgatcggcaagtttttgaaaaagaagaaagcataataaaatgcaggggccgg

SEQ ID NO: 14153 - DNA, 1055 bp, Unknown
  gut microbiota DNA sequence
aaaaggtcctgaacatttatgagggcggcgaaaagccctttgcaatgatcatctgcgatatcgatatttttaagcaggtcaacgacctgcacggtcatacggtcggcgatctgatcttaaagaaggtggcgcgcctgctgacgaccaccttccgcagcattgactatgtctgccggatcggcggcgatgagtttgccgtgatcatggtggatgtcggccgcgagctgagccaaacggtcagcgacaagatcgagctgatcaatgacgcgctgtccaaccccacggacggacttcccgcagtttcgctgagcgtgggcgtggcctttaccgaccgcgaaaaccccggcgagagcatctttaaggatgccgatcaggcgctgtaccgtgtaaaacagaacggtaagcacgactgtggcttctattaagcggcgcacggaggtgacgcgcgcacggctgctggcgctgctgtttccgcgccggtgccctttttgcggggcgctgctcggggcggatgccgtgcaggggacagtctgcccggcctgcctgccggaggagatgcggctgcagcatctgccgccgcgcctgccggaaggagagcatgctttttacgcgctgggggaggcggcagccgcctactactacgccgatgcagtgcgcggcgcgattttgcgctgcaagcgcggcggccgcccgtggtatgcgcaggaactggccgaccggatggcggtgctgatcttcggcgcgctgcccgcccgcagggtgggggaactgccgcagtaccgcgggctgcatacgctgccgctgtacagctgcattgtgccggtgccgcccaacaggccgcggcccggcgtaccggggctgccgcttttgctggcgcgccggttgagcgcagtgctgggaatcccggtggtgacgccgctctacataaagaatccgggccgcccgcagaaggagctgaaccgcgaggaacggctgcgccgcgcgaaagcagcctttgcctgccgccccggtaccgacctgaccggcaagcgggtgctgttagtcgatgacattat

SEQ ID NO: 14154 - DNA, 2509 bp, Unknown
  gut microbiota DNA sequence
ccccgaccgagggcggatgaggggcaggtttgccgcagcccctcgggggaagccaaagtttttgaaacaccccgcccgtttttgtcgtatactctttatgaaaggagtcgatgccgatgacggagcatgagctggacacactgctgcgggactacggcggcgcggtgcgggccgtctgccgggccattttgccgggccgcccgcaggacgccgaggaggccgaggccgacacattttacaagctgtggcgcggcgcgcggctgcctgcggacgaggcgcaccggcggcggctggtcgttttgacggcacggcagtgcgccattgaccgctaccgcgccctgctgcgccggagcgagacgctgccgctggacgaccgcgatgacgccgagctggctgtagcgctggaaagccatcttgaaagccgcgaactgatggcgcagatcatggcattgccgccgccggacggcgagctgtttttgcggcggtacttatacggcgagacggcggcccagctgggcgcgcggtttgccatgcccgccgccacggtgcgcacccggctgcaccgcgcacggctggcgctgcaaaagctattgaaggaggactgacctatgaccgaactggaacgctggatgaatgaccacccgccgctggccgacaccctgacggcggcggaaaccgcagcactgcgccaaaaagtgctggcgcgccgcccaaggctgcatgctttgcgcggctggcgggtgatggccgccgcagcagcgctctgccttgtggcggcgggggccgtggtgctggggcttttccacccgatggccgctgccaacgagacaagcgcactggtgcagaagtacggcgtggtgctggacgagccgctgaccgccgagatcaacggccataccgtcagcgtcaaagcgctgctgcgggggcaggatacgctgcgggtgctgtatgatgtggatcatgccgaggggatggagccgaacgatcttgtatgggatacctcggtctttcagattgaagctccgaaggacagcgacccgccgaattccctgttcagtgtgtacaatgcaaacgtcggcccatgctacggctacgccgtcggttcatgggcggagcgcaacaaggccagcgaaacggatacactttcctgctttgtggatattccgcttgccaacaccaagctcacgcagcgcaccttgtatatctgcagtctgagcgattacagcgcccatgcaagtgttaaaatttctctgcccgatgcccctgccgcattgacgctgcccatccaaaagaccatcacgctgaagggcgggccatggttccactctgacctgacggacgaggaagccgcagcctaccccgacagcagctttgacattgacgagatacgcattgaaccgctggcggtcagcgtcatcggcaagagccacggcagccctgcgggggaaagctcgcggtatgatgtgcagtcccgcgtcaagctgctgcgggcggacggctccgagatgacctacggctgggatggcagcttctatgcaggggactacggccgcattgacaattccgctggtcttatgaccctgcgcgtggacacctatgacctgattgaccccgccgccattgcatatgtcgagatcgacggagagaggtttgaggtgaagtaaacgcggcaaaagcccctccggccatcgctgacgctcggccacctcccctgtaaggggcggcatgttgcgcgggcgaagcccgcggaaaggctcctcacgaagtggggagctggccgagcctgcgaggcctgaggggcttttgcaggttcacggtgacacctcgttgacgggatgccgtggtgaactttgccctcatcagccgcctgcgggcgcagctccggggggaagccaaatagaaaaaaagcacccgcatggcgcgaaccatgcgggtgcttactttattatgtcagtatcagccgaacatgttgatcaggataccagcggcaacggcggagccgataacaccggcaacgttggggcccatggcgtgcatgagcaggtagttgcgggggttgtactcctgaccgaccttctgggaaacacgggcggccatgggcacggcggagacaccggcggaaccgatcagcgggttgatcttgccgtgggtgaccacgcacatgatcttgccgaggatgacaccaccggcggtgccaacaccgaaggccacgatgcccagaatgatgatctcaacggtctggatgttcaggaaggtggaggcgttggtggtgcagccgaccgagaagccgaggaagatcgtgatgatgttcatcagctcgttgccggcggtcttggtgatacgctcgacaacgccggactccttcatcaggttgcccatcatcaggcagccgaccagaatggcggcgtcaggcagggtcagggcaacgatgatggtgacgatgatggggaacaggatcttctcagtcttggagacgcggcgaggtgccgtcatgacgatctgacgctct

SEQ ID NO: 14155 - DNA, 242 bp, Unknown
  gut microbiota DNA sequence
gtcagcccatgctctgcggcatactgcctaagcatcatgcgctgggtctggatactgccgctttccccctgtaattcatcgtcacggctcaatctcaaatatagtgcagtgttataaatcgttgtattgtatggttgtttcacggttaaaaatcctccttctaaaagaaacaacccacgcttatacaatactcgctggtacaagtatatcataagcgtgggctgattgacagtcgttattcc

SEQ ID NO: 14156 - DNA, 666 bp, Unknown
  gut microbiota DNA sequence
gaacagccggtcgatttcaactggacctaagctgtaaagacaacgaaaacgggcagagccgaagttctgcccgtcactgatgatgactcaccagtgtgcaactgtcttacagtgcacgctccttgcggacggccatgccgaggatgccggcaacagccagagctgcagcagcaaacacaacggcagtgttgtcgccggtagccttgatgacggcgctggaagaagcagcgatggggttggcattcgcattggaagcaaccacgctgttcttggtagcggtcttgacggcagcgctggtgtcagtggtagacttgttggtctcctcgctgggattaaccgtcttgacgatgtccttggaagtgccattggcggtggccttaacggtaaccgtatcaccagaaacgctgacattgacagcagcggtgatgcccgctttggtcaggatgccattgacactgttcagggcattctgcacattggcagcctgatcggcagccgggtggttgtcgttcaggtaagcctgaacctgatttgcctgagcaatcagagtgtccttgttggccatcaaaacggcaacgccgctgtcggacagaccgtcaataacgctctcgaagccgctcaagccataagcactcatcttgttcttgatcagatctctgtcagaag

SEQ ID NO: 14157 - DNA, 5002 bp, Unknown
  gut microbiota DNA sequence
cggaggttgcgaaaacgcaagccatcacaacgcccagcagaacggcgacgaacttcttgaagttgttcattggtagtttcctcctttcctcgaaaaatataggcggcataaaccgcatataccgcgcggcggaacggagatagaccatcccgactgtaacggtattaaaagtatagcacaaagaattgcaaatttccagagtagatacgaaaaaatacgaattttggataaactgacgaaaagcggccgaccacacgagattgcattgactgattttagaaaaaccacagaaatgttatgctgaaacagcccgaaaggaggctgccttatgctgcgtattgaaaatcatgcttgtatatgttacaataaccgtaactattcggccatacggaggtccgtcatgcattatcataaagtaccgctgctgcgctttttgaacgcagcgactgaatttatactgctcgtcactgtgttcattctggcgggtgtgctgcgcgcgttcagccccatcggcagccagttcggcatgtgggatgtctggaccttcctgccggtggcggggctgtacgcccttgccaatgtggcctgctatgcggtcgaggggacttaccgcacgctgcatgtcaaaaactggggcaagcagctttttcttgtcgggcttacaaacctcgccggtctggcgctgatggccaccgtgttctacaccttccgggtcaatcagctctcccgcctgctgctggtgtactattatcttttgtccatcgtggtcattgtgggcaagcggtttgcctttgacaaggccgccgatgcctatgtgcgcaggaacgacattgcctcccgcacgctgctgatcggcagcggggaactggcgcagcggttctacgccgaaactttccgcgggaaaagcccggtgtcgctgcggtacagcggctatctggcccccgccccctgcaaggccctgcccgattaccgcggcaccgtgcaggatctgtaccgggccgtgcgggacaaccgcatcgaaacgctggtgctggcgcaggatgtgcaggacgccgccgagatccgccgcatcatgctgctggcggacagctaccacctgcgggtcgcagcggtgccggtctacaacgattttatgaccgcgcgcagcgagctggacagcgtgggcagtatgcgctacaccgacctgcacctgatggacacctgcgatattatgggggtgaacattgtggtcaccgacatggacaagacactgcgcttgatcgaagaaaagcttgaggattggcgcgggaaatacatctgcgtggcaaatgtccacacaacggtgacagcccatgaggacccggactatcaggcagtgcagaacggcgcggtcatggcgctgcccgacggcggcccgctgtcgaagtacagccgccagcagggctacaccgatgccgcccgcgtgaccggccctgatctgatgaaggagctgctccggcagagcgctacaaagcactaccgccactatttttacggctctacgcagaaaacactggacatcctgcgcaaaaaggtcgaggaaaactaccccggcgccgtgatcgccgggatgtactcgccgccgttccgcccgctgagccctgaggaggacgaggaggtcgtgcgcaggatcaatgaggcaaagccggattttgtctgggtgggccttggcgcgcccaagcaggagcgctggatggctgtgcatgaggaccgcgtgcaggcactgatggtcggtgtcggtgcggcgttcgactacgaggcgggcaacatccgccgtgcgccgatgtggatgcagcggcacaatctggaatggctctaccgtcttatgcaggacccgaagcggctgttcaagcggtattttgtgacgaacaccaaatatttgtggtggacctggagacagtaaggcagttttgtaagagcatcgcgcccttttttgggcggcggtgctcttttttgtttgtttatatgttgttttcgggtttccacgctctgcggcaaaaagcggcgggcgggcgtggtatagtcatggctgtccggacatacactgtaggcggcccgcacgggctgccggtacattgcggagggtgactgtatgactgtatcaagcagagagcatctacctatcaacacagagaagctgctgcccggcgcgcgcagcgcggcgctgctgtggcagggggcggcgctgctcggcggcgcggcactgggggccgggcaggtctatggcggtgcggcgccgttcgggctggcgctcgtcatcggctgcccgcccgcctactgtgtggcggcggcgctcggcacgctggcggcagggctggcgtttcagccggcgctgctggggatcaagctgggggtggcggcagtggcggccgccacggtgcggcggcttgtcgatggcagcacaaaagccggtgtgctggccggctgtctgacgctgacggcagcgcaggtcatacagctgctgctggtgggggacatccaaaatttttctcagaccgtcacggtggggtgtaccgccctgctggcggcggggttcggctgggcgtttgcgcattttccggcgcgggagccgcggggcgtctgcctgtggctggcggtggccacggcctgcctgcagcgctgtgccgccgggcctttggctccgggcctggcgctggccgccggggcggggctgtgcgcggcgatggccggaacgctggagcagacggcggtgctgagcatcgcgctggcggcggccatcacggcatccggcccggcgcttgcctttgcggcgctggcggtcgcgctgggcagtctggcggcggcctgcctctgccccggggagcgctggcgctgcgccggggtctttgcggcgggctgtacggtgggcgcgctggcggcccccgatgcggtgcatgccgtgccgctggccgtcagtgcgggggtggggatggcggcggcgctggcactgccttccggggcgctgcgccgggtctttcccccgccggccccgcctgtgcaggcgcaggggctgagcggtgcggcgcgcaagctgtccggcgtggcggatgccctgagcgacattgccgacacggtgaacgccgtctgccagcggcagatgccgccgaagggagagtgctttgactttgtggtcgagcaggtggcgcgcacgacctgccagaactgcacccgccgcagccggtgctgggtgcgcggctatgccacggcgatggacgggctgtaccacctgaagccggtgctggagagccgcggccgggtggaggtgcaggacctgccggggcaactttcggtctgcatccacccggcagatctctgcacggcggccaaccacggctaccggctgtggcgcagccgccgccaaaaccgcgcccgggcgcagatgctgcgcaccgccctgacggagcagtacagcgcactggccggggcgctggcccagctggccggtaagctggggcaggcgggtctgcccgacccccggcgggagagccgggtcgcccagctgtttgcagggctgggccttgaggcgctggagtgcagcgtgaccgccgaccttgccgggcggctgaccgccagcgttacgatctgccgcacccattttacccgggaggaggtcgcgggcctgacggaggagatgagccgcctctgccgccgggatatggatctgcccgagatcacccactgccgcaccgtcacgatgctgaccttcggtgagcggccgctgtttgcggcgcagttcggtgcggcggcccacgcggcggcggggcagagcgtcagcggcgatgcgctggatcagttctgtgatacgagcggccgcgcccagatgctgctgtgcgatggcatgggcactggacgggcggcagcggtggacggccagatggccgccaagctgaccgcccagctgctgcgggccggctttgcggccgagagcgccgcccggcttgtaaatgtggcccttgggctgaagggagccgagcaggaggccggggccacgctcgatctgctgacggtggatctctacaccgggcgggccgggctgtttaaggcgggggcggcaccgagctttctggtacggggcggtgtgccccggatgctggacggcgccagcctgccgatgggggtgctggacagtctggtggggcggtcctcgacctttgcgctggacgccggggattgggtggtgctggtcagtgacggtgcccttgcggacggcagcgactggctgatgcagcagctgcagctctgtgcgcggctgggccataccccgaagcaggccgccgagacggtggccgatgccgccgcccgccgcgccggggaaaagcgggacgacatcacggtggcggtgctggcgctcagccgccggtgacaaaaaaagcccctgcgctgcggaaaacgcagcgcaggggcgcggggtcaaaacagcttttgcttgcgggtgggctgagggtcgaagggggtgtcctcatgatggcggcggacaaagacctgccgggtcttttccgtcacggtgcggccgttgtgccgggggaccgagtagaaggtccgggtaatgttgtagtagccgagcagatgctggacaagatactgcgccacagcgggcagacagtcggtgtcctcaatgttttcgtagttataatcgccgtagagaaagcgaacctcgccggtgccggcgtacaggatgatgccggtctcgtcaagcagcacttcgcggatgacgctctgctgcaagccggcggtgccgcattcggcggcgcgcttggtggctaaagggcgctggtcgagcggcacgctttgggggtccagcttttcggtgccgcgctggccgatctcaagcaggatgtcccgcatcatgcggctttccagcagcggacggatgcgctccttcgcacggacttgttcggttttgttctgaatggtggtgatcaggcccataggggcgcctccttgcagattttgacgatatatgcttagggcaacaccgcataat

SEQ ID NO: 14158 - DNA, 3337 bp, Unknown
  gut microbiota DNA sequence
atgtcgcgcctcgctcgccgtatcggcacttagaattatgcggtattgccctagtataccacaggcggggcagctgtgacaactgccccgcctgtgaaaattgtaaattgtgagtgggcccggtcagccgacgatgagcacctgcaggctggcggtgccgtgctgcacggtgtagcggtcggtgatggtaaaatgctgctcaagccatgtgtggaacgcggccatgtcgcggacctcggcgtcatcgtagaggatgacgcggggctgtttttcgggcagcatggtgtaatactgttcaaaccgggggtcactgtcggtgccggaaatgaccgatgcctgcgccacggtcagggtgccgtccgccatcagaaagccaagaccgtgctgctcgccgatcgcctgcagcaccggctggtccgcatagggggccagcgcctcatacaggcattcctgcatgtcggcggccttttcgtcggcccaagtcccggcggcggggccggtggtgatgcgctgcaccgccacctcccgcacagtaccgcagcgccagccggtccgctgcacaagccagaggcggggcagcgcggcggcaagcagcatacagagcagaagcagctgcgtctgcctgcggcggtgcggtgcggcggggcttttcagcgcgagtgcggcggcagcgcagagggcgggccagaacaggtacataaaggtcgtgcagagcgcgatgagggtcgagcgcaggataaaaaggtaggctgccatgccgggcagccagcccagccagaacagcaggcggcgcagtgtgcggtgctgcgcttccctgcggtcgcagtagaatgtccagccgccggccagcgcagccgccagatagaggtggcggaaatccagactgaccgcgatcaggctgtacgccgtacaccagagcgtcaggaaaaaggtgaaataccagagcagctgctccagcaggcgggcgggcgcggggcggctgccccggctagagagcacccccgcaaggacggccgccgccgcggccagcgccgggatcaggcaggtctgcaaaacggcggcagcctgcccggccagcgtgtgcagccgctccccggctgtgaagccatactgcgggtcgtgcaggatcagcgcggcgcgggccagcagggcgggcagatcaaagcccatgccctgcagcagccagagcgcaaacgcgcccccgcaggcggcgcagctcaccaaaaagaccggcgcgccgcagcggcggggcgctgcacggtcaagcagccaaagaccaaccagcaggaacggtgcggcagcggcagactgcgggtaggctaaaaagctgaagcaggcgcagaccgcacctgccgccacccgccacaggccgcggtactgctgcgggccgggggcgtagtagtcgtaaaaaaacagaaaggctgccagcgtaaagtggaactgctggctgacatagtccggcccgagaaaccacttgggggtaaaaacaaagaggaccagtgccagcaaaaaggcgctggtgcggcccagcggggcgcgcaggctgcggtaaaaccagacggacagcacagccttgaccaccagcatggtgacgcggacgaagagcagcacgccggtggttgtgccggtaacggccatgtataccgcgatcagcagcgcggcgggcagggccgaaagctggtgcggctcccacatcgaatagaacagccggtcgcgccgcacaaggcggaagcccagcgaaagggcgtattcctcgtcaatatccagccccacaaacagggtgtgcagcatggcggctgcggccagcagtaccgccgccgcagcgagaaggcatttacaggtatcgttttttgtcatggcagttcaatgttttggcggctcgacccggcggcgcagcagggtatcccgcgcccgccacaggtagggcagccagttcaggcagaaggcctcccacttgcgcgcagggaagctctgcggttttttgacggtgcgcgaggcatcgatctggataaagcgcgatttctgcagcacaaggatcgcctcgtgcccggtgggggtttcctccggcgtgcagtaatcggggggcaggatgcggaagtgctgcggcgtctcggccacaagccggttgagctggctttcatcgtggaaccgcgcaatgacgccgcgctgcagatcctcatcggtgcgggccttcagctcccggcagagggcgaggaacgccgccgccgtgccgccgttcagcccgcccgccacataatactgcccgcagttgtaggggatcgaggcacggcttttgccgctgcggtcgtaggggtggaacatcgggtccctgccgtagtagggcaggtggcagactgccgtgagggtctgcccggcggcagggtcgggcagcagctcggcggcggagatgacgcgggtgcagtgcaggttggcgttggcaaaaaataggtagtcgaattctgcaagcgcagcctcctgcccaagaaaggcgtcgaaccgctgcatcgtgctgtagggccatggcagcgcctgctgcggaatgcggcgcacatcgggcgcgtcctcatacgcaatgtggtcggcatcggtaaagacaaagaaggtgcggtcgcagtctggcaggaagtttgccttaaagttggggtaaaaatcgcgccagaacgcaacataagcgccggtgcagatataaagaacagcgagggttttcatactatcacctgtttgcaggacggttactttttcagcagctttttggctaccttgccggcatactggcgcaggtaggcggcatctttgccccatgcgtagacagccagattcagcacattgggcacgataagcacaataaggatgcggggcacaaggccgagccagccgccgggcattttggcgcacagtgcgtagctgccgcccatgcaggcggtcagcgtggcaaggtgcagcgcctgcaccgcaaggtagtgcgcaaggccgccccgcatatactggcggaaaacgacccggatgcgcccggcccacatgatgcagtgggccaccacggtggcgatcagcgcgccggtgatgtcaaaccggggaaagagcagaaagctcagcgccagattcaccgttgcggacgcgaccatgaaccactggtcatcctcaaaatggccgagaacggcgcggtagctgccgagcatccgatggttccagccgacatactcattcaggcagaacaccagcacaaagccgaggggcagcagccattgctcacccatccaagacgccatgaacggctggaacaggcagaagtaggctgtggccacaaagctggcaaacaggtagctgaacaggtccatgc

SEQ ID NO: 14159 - DNA, 1570 bp, Unknown
  gut microbiota DNA sequence
agctaaagccagttgccatgctgtccatgctggagtacatcaataccgctgtgatgagcaacgaacgcaatgacccaaaagcagccacatgggtgtactttgacgaaatctatctgctgctgcgcgattctttgagcgccaatttcctgtacacaagctggaaacgttttaggaagtacaacgcctacgccaccggcatcacgcaaaatgtgcaggactgccttaccaatgacaccgcctatgccatgctggcaaactccgaatttgtggtcatgctgcgccaaaccaaggacattgacagcgtggtggagttgtacggactgtccgacccgcagcggaaatatttgctgttggcccaacccggtgagggtatcatcaagatgggcaacagccttatcccattcaacaacccccaacccaaggatactaagacttacaaattactcacgactaaacccggtgaaatggagtgaatcctatgagtgaaaatgaaatccgcgtgctgtatgtacagcccggtaagtacccggaagaacgaataatccctaacacgttaagcgcatcacagaaacttgtcggaggcaatattgaatgttgttgcccgtggagagatagcgtctgcattgtctgcaatgattctggaaagattgacaagttaccacctaaccgtctttatggacatacagactttcttgcaggctcttttttcgtttgtggtagtcgcaggggtgattttgtcagcctgacagacaagcaacttgcccgatatgaaaagatatatcattttccaatcgtctttctccctacgccgcacggtctactggcaatgaaatgtaccccggagcagtacgagcaattccagcgcgacggcaacaaactaaagatcagacccatcgaccacggggagcgctaaccccatgattttgcacaaacaaaaagcgggctgccgcccgccttagaaataaggaaacacgccttatatataaaataggaggataccaccatgaccgaacccaagtttatgacccctccccaccgtagggcatacttaacccacctcaaccgctgcaaggcaatggacagctaccaccgcgcactgatttacaccctgactgccgtacccgcactccgcaacaacattgaaagttgcttcgactttgaaaaagatgaaatcaagccggaatcactggccgccggttggcagaccaccggcacaacgaaactgactcgttttgcctataacctttggaatgggtacgatgacaaatcttgtacgccctatgacctgttcgactgctcctttgcaccgtatatgtacgaggccgtaaaactgcgctacccggaatacacgcgccaacttgataacgtggtaatcgacgatgcccgaaattaaaggaaaacgcaaacagcttgtgcggaaaacactcatgcgggccaaggcacaaggagaacgtgttgccgaccagcgccaagaatcccccgaagaatatgcacaaggtgaggtgcagcagggcatttccggctcggttgaccgtgtaaacggcacaacgcaaagcaccgcccgcatgag

SEQ ID NO: 14160 - DNA, 5766 bp, Unknown
  gut microbiota DNA sequence
tttttctcgaccgtcttatgctcgccgaaatagacgccgccgatcagctcacgcacaacaaggaagtcgatgcccttatccacgatggactttttcagcggggaggcatcggccagctggggccagattttagccgggcggttgttggcgtacaggcccattccggcgcgcagccgcagcaggcccttttcggggcgcttttcgccgggcagtccctcccacttggggccgccgatggcacccaacaggacactgtcagcgtttttgcatttttccagctcggattccggcagcgggtcaccgaatttgtcgatggcctcgccgcccatgtaggcgcgggtgtaggtgaaggtatggccgtgtctggccgcgattttattcaggacgcgcaccgtctgggtcacgatctccgggctggagcagtcaccgtagatcagagcgatgtttttctgcatagttctgttctccctctcgttgctattgtaggggcgggacatgtcccgccctaagcctttccatcacagcacttttgccgtaaagccgcgggccgggcatgcccggcccctacaaggtatcagtccttcaagctattcatcaacccgcccttggcaatgatgttctggataaacggcgggaacggcgcggcctgaaaggtctgaccggtggtttcgtccgtaatgacgccggtgtcaaagtcgatgcttaccgtgtcaccctcggcgattgcctcgcttgcggcggggcattcgaggatcggcaggccgatattgatggcattgcggtagaagatgcgggcaaagcttttggcgatgacgcagctgataccggacgccttgatggcaacgggggcatgctcacgcgaggagccgcagccgaagttttcgccgcccaccatgatgtcaccggccttgacgcgggcgacaaagctcttgtcgatgtcctccatgcagtggctcgccagctcggcggcgctctgggtgttcagatagcgggcggggataatgacatcggtatcaatgttatcgccgtatttaaaaacaggacctcttgcgttcatagctcaaacctcccttgggtcggtgatgcagccggtcagtgcgctggccgccgccgtggcggggctggcaagatagacctcggagtccacatgccccatgcggccgacaaagttgcggttggtggtggagacacagcgctcccccgctgccaaaatgcccatgtagccgcccaggcaggggccgcaggtgggcgtggagacgatgcagcctgcatcaataaacgcctcggtatagccgcgcaggatgcactccttgtagacggccatcgtggcggggataatgatgccgcgcacacccttggcaatgtgcttgcccttcaaaatctcataggcagcctgcatatcctcaatgcggccgttcgtgcaggagccgatgacgatctggtcgatcttgatgttcctgccctctctggcctggtgggtgttttcgggcaggtgcgggtagctgacggtaggctcgagcgcatcaaggtcgatcgtgatggtctgctcatacacagcatcagggtcagcctcatacttcgtccacgggcgctggctgcggcccgtgagatacgcctcggtgatcgcatcgaccgggaagatgccgttcttggcaccggcctcgatggccatattgcagatgcagagccggtcctccatcgtcaggctgcttacgccctcgccggtaaactcaaggctcttgtacagtgcgccggatacaccgattttgccgatgagatgcaggatgacatccttgccggtgacaggcttgcgcagagcgcccctcagctccaccttgatcgcggcggggaccttaaaccacgccatgccctttgccatgccggcggccatatcggtggagccgacaccggtggagaacgcccccaccgcgccgtaggtgcaggtgtggctgtcggcaccaatgatgcagtcaccggcggtcacgatgcccttttcgggcagcagggcatgctcaacacccatctggcccacatcatagaagttgagaatgtcgtacttgtcggcaaattcgcggcactgcttagactgcgttgcgctcttgatgtccttattgggaacaaagtgatccagcacaatattgacgcgggtcttatcaaacaccgagtcaaacccggctttctcaaattcattgatggcaaccggggtcgttatgtcattgcccagcacgatgtcgagtctggcgttgatgagctggcccgccgtcacggctgcctcgccgcagtgggccgctaagattttttgggtcatggtcatgcccatggtgtgtacctccgtttatttttctcttggctccctcttcagggaaaggcaaatcagctatctattattgatcgcactcaccaatgccttaatgcctgccacgataatatcggtgtgggtgccgcagccccatgtttcctcaccggaggcccatttcagcccgacataggagcaggcgcgggcgttcgtgtcggcgtccagcgcatgctcgctgtagtgtaccagcgtaaagtgcatcccggtctgcgtctcgatggccgttgccacagcatccagacgaccgttgccagtggccgtgcagggggtcgtgctgccgccgctgttgatcgtcaccttggcggtgatgctgccgttctcgttctggacaaagtgcgcctcggacacattcagcggcgcggtgtggttgaggtagctcttctcaaagacggtgaggacctcctgcacgcccagttcacgatgctcatgatcgctgacctccttgacgcggtagccgagatcctcccgcattttgggcggagggttgtagccatagttctgctgcagcaggaagccgatgccgcccttgccgctctgagagttgatgcggataacatcggcatcgtaggtacggccgatgtcatgcgggtcgatgggaatatacgggcaggtccattcatggagctgcttttccttgcgccatgtcatgcccttggcgatggcgtcctgatggctgccgctgaacgccgcaaagacaagggtgccggcgtagggggtgcgctcatacacatgcatccgggtaacgcgctcgtacacctcgcagatggcaggcatattgctgaaatcaaggtgcgggtctacgccgtggctgtacatattcatggccagcgtgatggcgtccacattgccggtgcgctcaccgttgccgaaaaggcagcactcgatgcgctgggcaccggccagcacggccagctcagcatccgccacaccgcagccgcgatcgttgtgcggatgggtggacaaaatgacactgtcgcggtatttcaggtgcttggagcaccactcgatctggttggcgtagatgtgaggcatgctcatctcgaccgtgacgggcaggttgatgatcatcgggcggtcgggcgtgggctgcatgacatccaatacagcgttgcagacctcaaccgcgtagtccggctcggtgccggtaaagctttcggggctgtactcaaacaggaagttgccctcatattcctcgctgagctgcttgacaagctttgcgccgtccacggcgatctgcttgatctcctccttcgactttttgaacacctgctcgcgctgggcaacgcttgtggagttgtagaagtggatgatggcccgcggtgcgcccttgacggcctcgaaggtcttgcggatgatatggtcgcggcactgggtcagcacctgcaccgtcacatcctgcgggatgcggttgccgtcaatgagggtgcgcagaaactcatactcggtctcgctggccgccgggaagccgacctcgatctccttaaagccgattttgacgagcatatcgtaaaacgcaagcttttcctcaaggctcatcggtacgatcaggctctggttgccgtcgcgcagatccacgctgcaccacgccggggctttctcgatatggtccttctgcgtccactcgtagacatggccgggctcgaccggcggcggataataccctacactgtactttgttgcgtccatcataactaaaaatgcctccttcaaagcgttcggttcgcactttgagggagacaaaaagaaaccgtcccccaaaggcgaaagacctttgagagacgggagcaaaattcaaacttgctgtacccgcggtaccactctcattgctgtaaaacagccgctctgtacgatcagccctgcgggcgaatcgcgcctgtgtgataacggtcaggctccgtccgcgcctacctgtcagcgcggctgctctggggccagtatacagcacccgccataccaccttgcaccgaccggcggctctctgtaatgggatgagtgctgctttttccccttcactgcatttggaatggttttattgtagcggattgcagcgggaatgtcaagagatttttgcgattttctcaaggatgtgttttggttgaagcaacaatgtctgtaggggggcggcgtcctcggcgccccgcgggcgcatatagaatgcgcccctacttttctttttttattatgtatgctataatgttttcacctgatttgaaaggattcatctatgctttatcataaatacaagccgatggccgcgcgggtctactgcgcagggctggcgctgctgctggtgctgagcgaggttttcagctccaatattcaagctacgctgccggggttcagccgtctggcgcgactggggctgaccggctgcgccgtgctgctgctggcgggcaagatcgtgctgctgaccgagtatgagacgcggctgcaaaaagtgctggtctgcgcggtgctggcatatacagcctttaccgcatggtacggcggcgaccagtggttttttctagcagcgctggtcgggctgggggccaaggatgtggacctgcaaaaggcgctgcgggtctatctgatcaccgctgcggcggggctggcgcttgtgcagctcctgcactttgccacaccgctgatgccctacaacttctactgccgcaactgggatttcggctacggccactacaacgggttcggcgcacgactggtcggcgtcttttttgcgtggggctggctgcgtcatgaccggctgcgggccttcgactgggccgggctggcggcgctggcgatcttcacctacaaggtgcccggcagccgcggggcgttcggcggcatggcggtgctgtttgcgctgttttttgtgcagcgtttcctgccgaggctgttcgacaataagatcttttatgcgctggcacttgccctgccggtcgcgctggcggctttcagcctgtacgccggatatgtctacaatccggaatggccgtatgagcgtatggcgctgctcttgttgagcattgccctgtccggccggtttgaaatctggcacaatgtgttctggagtgcgcccctctcgctgctgggcggtctgcctaccgacggcgacgagcatcacgccatcgacaacacctttctggcggtgccgatgaacaagggcgtgctgggcgcaatcttagttgcagcggtctttctgctgctgctgtggcggctggcaaagaagcatcgctcaaccgaggtcatctgcctgatggcgctgactttatatctctttatggagaataagccgtttttgctctccgccaatccgtttttgctgatgctgccggtggtgttttttaacgcagaggttggcaaagcacaatctgaatcgtaaaaaagccgccgaccggtttgtccggtcggcggcacaggctgtcgat

SEQ ID NO: 14161 - DNA, 2165 bp, Unknown
  gut microbiota DNA sequence
atgcatagtgccaaacgcccagattggaaaattgctttctgtctgcttttatttttaatgtgtcaccggcactgtcacggctgtgctgtacatgccgtcatccgctgtcagggtcaggctgttcccctcccctgcacgcacgatggccagcgcctcgccgtagtaggtgtcggccacacagtccagataactgcgctcatgatacgggcaggcgttgcccagcccgaccagtgtaccgccatctacctccaccttgatattgccgcgtgccagcggcttcgtgatacccttttcatcggtgtagcgcagccggatatagcaaagatgcccggcctgtacggtgctttgctccggccccgcagtgatttgggtttgctgccctgccgtcatcagggtgcagcggccgagctcacagccctgcgcgtcatagctgacggcctccagcctgcccggttcatagggcacggaaaacttcgcaaggcagtcgtttttcaatgcttttctgccgacgatacggccattcagccacagctctgcccgcgcagcgcgagcgtacacctcgatgctggccttttggccctcgcagcctgtccagctccagcttggcatggcgttggtcatcttccacgcactggggctgtgccggtcgcccgtgtggttgaccggacagacggcaatgtacggtccattgtccttttcgagcgccacgcgggtatatagggcttctcccagcggctttccggtcagatcaatgcggcccgatcctgccgaaacccagccaaggccgccgtcaaagtttttggcatagtcctcatactcccacgagccgaccatgacctcgcccagataatccatgcccgcccagacaaaatcaccgaccagacgcggctcagccttcgccagctcacggaacctataggcatcattacagaaggtctcgctgcccaaaatcagccgctgcgggtactttttcaggtcgtgcctgtagcgataaatgccgtagttatagcccgcaatatccatattcgcaaaggcatcgcgggttttgacatcacagccatgcagcgtcgcgccgcgtttcatgaattcatcacccaaaagccccgccagatcgttgaagaacttgctgcccaccgactttttcttgacggcttttcccttagccttggctttttctgccttttcggcctcctttttggccttttcatcgctgtacacgccgaagccgatggagctcaaaaagttgaagaagatattcacaccgcaggtcaccgggcgggaatcgtccagcccatgcaaaaagtctgtcatttccttggtcagcgcaatacccctggcctgtgcggtctcgctgacctcgttgccggtggagtagagaaccacacaagggtggttgtagtccttctcgaccatatcggtcaggtcctgccgccaccactccataaaatacggtacataatcgtattccgtcttgtggatataccagtggtcgatgtattcatccatgacgagcatgccctgacgatcacactctgccagcaaagcccttgagcagggattatgcgccgagcggatggcgttgtagcccgtttctttcagcaggcgcaccttgcgggccacggcatcggggtcgcagacagcgcccagcaggccgttatcgtggtggatgcaggccccctgaatgatgacccgctcgccgtttaaagtgaagccgtttttgccccaactcaccgtgcgcacgccgaaggtctcggtcacctcatcgccttcaaattgtacgatgcatcggtataaatttggcgtttccggcgtccagagacgggcattgtcgatggtaagcgtaaagactgcttccccatcagattcctgccgcacagcggggagtccctcaaccatcagctgaaccgtgccgggcgcattggtcctgacacggatttccaccacagcagggttcagcgacagcgtgcggatgcgcacaccgttgagcaaaatgtgtttctcccctgccgtccacagctgaacgggacgatacagtcccgcgccggaataccaccggctgttgggctgatcggcgttgcgggcaatcacccgcagttcgttatcccctgtgcgcaaaaacggcgcacagtctacataaaaattggtatacccataggggcggaacg

SEQ ID NO: 14162 - DNA, 932 bp, Unknown
  gut microbiota DNA sequence
ggatcagaaaccgctcaatggcactaccaattatgagtaccgtattgtggaaggtacggtgggtacggacgacaactttactgcgaaagatagcagcatcacgattgacggtaacacatataccatttcggctgtagccaagctaaccggcgcgaccggcagtgtaacgggtggaaccataaccggcggcagcggcgagattgaactgaccaatacgctgcaggacccgaagtttacgctgaaaatcgttaagaagggcactacaacaggcgaagacggcaaggaaacgcagaccccgctgggcggcgtggagtttaagctggaaagactgacggaatcgtccggcagtggagagccgcaggttgatacgacctacgacttcggcagcgaaaacataggctccattaccggcataaccggggatgacggtcagattacggataacccgttcaagaatctgaaacccggaagctatcagttgaccgaggtcaagacagcggaagggtacaacctgctatccaaaccgatccgaatcgaatttaacacaaagggtgaatgttatattgacggggttaaggatagcgcgcatgttacacaagccggtaacacctataccatgacccttaccgtcctgaaccgcaaaagctttgagttgccgcatacgggcgcggatgcacccagcctgtggcttttgataggcttgcccgcgctggtggctgtactgctagtgttggtgttccgctacaataagaaagggggccggcgttaataacgaagtccccctctacacaaacaaatttaaagagaaagaggtacgaagcaaaatgaaactgaaacgcttactcaccgcagccctcagcgccgtcatggccctaagcgtctgcgccctgcccgcaatggcagccggggaaaaaaattatacatttgaccag

SEQ ID NO: 14163 - DNA, 4707 bp, Unknown
  gut microbiota DNA sequence
catcgacatcgaaggtcgcatcaaaggcctttgcggcagcatccgccaacagatcgacatcgaccagctcactgtctgccatgacatacagcagcttatcctcaaagctgaccacgcgggccttatctgcctccacgcagacccacttgcgcatgctgatgttttcctccatcgaatcggcgatctcgcgggcatcggccttgtccttgaggcgcagcagcacaaggctgtacgcctgactgccggtcatcggctcgctgactacggcagcgtccaccttgcccacattgtccggggtcagacctgccagatagccgtaccagctctcgtcagtcaggtcgatagccaccgtctcgatgcccatcgcctcaacgggctgaagctggtagatcgcgtccaccataccgctcagctcggcgtccggctgcggctcggcggtctcaccggtatcctcgccgtccacactgaactccgggtccagctccgcgccctcctcgggccttgtagcgggctggttcgccagatcgttgctgtcagccttctggctgccgcaggcagacaggaacagggaggtcagcagggctgttgcaaaaagcagctttttcattgtaaaattcctttctcagtcaaaatttcgtcaggggcaaagcgggcgtcccagtcatcggcaggcaaatccgccagcagggccgctgccgggcagagcagcagcctttcccccttatactgtgccaaaaaacggtcataatacccaccgccgcggcccagccgcacgccgtccgtcccggccgccaaacaagggatcagcgccagcgtggcagcgtccccgccggggtcggcggcgggcaggtctgcgggcggctccgggatgccgtaggcaccgggctgcagcagagacaggctcggtatctccacccagtccatctcggtgcggctccgcacacggggcagcagcagccgtttgccgtcagccagcgtgcggcgcagcatcgcagctgtgtccggctcgtccggcatggccgcaaacgccagcactgtgtcagccgccgcccagcagggcagggcaaacagcgcccttgccatgccgcagccgaccgcctgcatatccagctctgcgcgccgggcctttgccagcgcgcgtgcctcccgttttgtcattgtgcatcccaccttttgaggtatcataccatatctgccctcaccctacaagacggaaaacggccgctgttgttacagcagcgacaaaatttttccgccatcttgcccgcagaggcagaatagagtataatataagctgtatcgctatgtatatgctgacatttatataaaaaggagattcaacctcatgggcaagtttaattttatcaagaccgacattcccgaagtgcagatcatcgaaccgaccgttttcggcgatgaccgcggctatttcatggagacctaccagatcgacgattttgccgccgccggtatcgacaagccctttgtgcaggacaaccagagccgctccaccaagggcgtgctgcgcgggctgcacttccagaccaagcacacgcagggcaagctggtccgtgtgacgctgggcgaggtgtttgatgtggccgttgactgccgccccaacagcgcgaccttcggcaagtgggtcggcgtgaccctctcggctgagaacaagaagatgctctggatccccgagggctttgcccacggctttgtggtgctgtccgatgtggcggagttctgctacaaatgcaccgatgtctacgaccccaccgccgagggcggcatcccctacgatgacccgaccgtcaatgtccagtggccggactgcggctgcgcgcacaagaccagcgccaaggacaaggagcacaccccctttgccgaccagaagttcgagtattttgaaaagtattgaggatacaccgtggagaaactgaaaaacacctttgccggtttctggaagtaccgctacctgctgcaaaacctgatctcccgcgattttaagctcaaataccgccgcagcgtgctgggcgtggcgtggagcgtgctgaaccccctgctgacctgtctggtcatgtgggccgtgttcggggcgctcttcaacgcccgcgggcagggcatcgaggatttcccgctgtttctgatcatcggccagctgatgttcaacttcttccgcgagagcacgaccatggccatggagagcgtgctgaaaaacggcccgcttctgcgcaaggtctatatccccaaatacatcttcccgctggagaaatgctgcttcgcgctggtgaatttcttcttcagtctggtggcgctctttattgtggcgctgctgacatggtcgcatatttcgctcaggacagtactgctggccatttaccccatcgtcatgctgtttattttcagcctcggcatcgggctgatcctctccacgctgtatgtctttgtgcgcgacatcatgcacatctgggaggttttctgcaccctgctggtctacggcagcgccatcttctatgacccgcgccagatggaaagctggatgcagttcgtcatcaacctgaaccccatctactggtacatcacctcggtgcgttcctgcgtcatgtggggcgagggactgaccgcaaacatgctgctgatcccgttcctctgcgccgcactcagtctgggactgggcatctttgtctttaaaaaatatcaggacaaatttgtcctgtacatgtaaggagggcatcgaaatggcagagcagaaacccattatctcaatcgaccatgtttcgatgcgcttcaacctcgccaaggaaaagcatgagagcctcaaggaatactttgtagcgctgctgcacggcggtgtccggttcgatgaattctttgcgctggacgatgtgtcgtttgatattatgcccggtgacttctacggtctgatcgggctgaacggcagcggcaaatcgacgctgctcaaggtcatctcgggcgtgtacaagcccagcgcgggcagcgtcacggtcaacggcaccatcgcaccgcttatcgagctgggtgcaggctttgacatggatctgaccgcgcgggagaacatctatctgaacggcacggtcctcggctacacgccgaagtacatcgactcgaagtttgatgagatcgttgatttcagcgagctgcaggatttcctcgatgtaccgctgaagaactactcctccggcatggtggcgcggctggcctttgctgtggccaccatgacaaagcctgacattctgattgccgatgagatcctgtcggtgggcgatttcctgtttcaggaaaagtgcgaaaagcggatggctgagctgctgtccggcggcactacggtcattcttgtcagccactcgatcgaccagattgagcgtatgtgcaacaaggttgcttggctcgaccacggccacctgcgccgcctcggccccacaaaggagatcacggccgagtaccgcaaattcgagaaaaaggacgccatgccggcaaaagtcaccgaggaataaatcatgtctgaaacttccaataagaaacctgacaacgaacgccctgccgatctggccgtacaggacagtgtgggcggcatggcgcgccgccttttggatcccgcccatctgcgggatctggccggccgcagtgtcaagaccctgcgtgaggagggcgctgaacagctgtggcgtgatgtgaaattccgcgttggactggccctgcaccacgatgactggcggcaccgggcagacatcccgctgcgccgcgagctgaaggcccagcgcgctgccgccctgcaggggccgaccatcagcatcatcgtgccgctctacaacaccccggcaaaatttttcgatgagatgctgaacagcgttgtcaggcagacctacaccaactgggagctggtgctggtggatgcaagcgatgccgacaaacggctggagcgccgcctgcccaaggccgtgccgggggtgatcgtctacgagccaatcgagaacggcggcattgccgccaacacgacccgcggctttgcactggcccacggtgattttattgccctgctggaccatgacgatgtactgtatcccaacgccctttttgaggttgtgcagaccctccaaagcaccggggcagattttgtctacagtgacgaaatcgttctctcggctgatttgaagcagctgggcgggtatcacttcaagccggattttgcaccggactatctgcgcggcgtgaatttcatcacccatctggcggtgttcagccgcccgctgctggatgcggccggagcctatgagtcgaaggagtttgacggcgcacaggaccacgacctgatcctgcggctgactgaaaaagcacagcatatcgagcatatcaagaaggtgctgtacatctggcgcggccatgcaggctcaacggcagccggcatggaggccaagccctacgccatcgcggcgggggagcgggccatcgacgcccagctgcagcgcctcggcttgccggggcgcgccatggccgtgcccgatgcccccggtgcgtttcaggtcaggtatgagctgacggggcacccaaagatcagcgtgctgattcccaacaaggaccacaccgatgatctggaccgctgcctgacgagcctgtacaaaaacgccgggtatgacaattttgaggtcattgtcattgagaacaactccaccgacccctccacctttgcctatt

SEQ ID NO: 14164 - DNA, 1661 bp, Unknown
  gut microbiota DNA sequence
ggcaaggatgtgaaaacccaaagccttcccctatgggggaaggtggccccgcagggccggatgaggggagagcttgccgcggcagcccgtgtacggggcatatcggcagacccgcccctcatcagtcagcggtcggggccgctgacagcttcccccaagggggaagccgctcgatggaaaaatctgcaaaaaccctattgacacgcacttgcttttgtggtaaactaatcgttgtaaaaaaagcagcaaccggcagtaggccgtcggctcaccttgcagggtttgtaaaaaccccgggtcatacctgttacgcacattcggtgcgcgattttgtatgttcggcggctgctttcaaatggcagccgcttttgtctttatcatacacttgtgggaggtgtgttacaatcgccagcaacagcaaatccaacgaactggaaatcaatgagcagatccgcgacaaagagatccgcctgatcggggcggatggcgcgcagatgggcattatgagcccgcgcgatgcactgaagatggccattgacaaggatcttgaccttgttaaggttgcaccgcaggcaaagccgccggtgtgcaaaattcttgactacggtaaataccggttcgagatgcagaaaaaggaaaaggaagccaagaaaaaccagaaagtggttgagatcaaggagatccgcctttccctgaacatcgacaccaacgacttcaacaccaaggtgaaccaggcagccaagttcctgcagcagggccataagctcaaggtgagcatccggttccgcggccgcgaaatggcacataccagcttaggtctggatgtccataagcgttttgccgaggcgttggagggcaaggccgtcatcgacaagcagcccaagcttgagggccgcagcatgatgatgttcatgtcccccgttcccaacaagtaagaaagtaaactctcaggaggaaacaacaatggctaaaatgaagctcaagaccctttccggcgccaagaagcgcttcaagatgactgcttccggcaagatcaagcgcaatgcgtccaagcgccgtcacattctgaccaagaagaccaccaagctgacccgcggcctgcgtatgcccaagtacgttgacaagaccaacgaggctgccgtcaagaaaatgatgccctacggcggctgatctgcccgggacatttaaaggtcagttactacctgttatagacaaaaggagatataaaacatggctcgtattaaaggcgctaccatgacgcacaagcgtcgtgctaagactctcaagctcgcaaagggttactacggtgctaagtccaagcacttccgcatggccaagcaggccgttatgaagagcggcaactatgctttcgttggccgtaagcagaagaagcgccagttccgcaacctgtggatcacccgcatcaacaacgctgttcgtgctcagggtatgaactactccaccttcatgaacggcctgaagaaggccggcgtcgagctgaaccgcaagatgctgtctgagatggctatccacgatcccgccagcttcaacgctctggtcgagaccgccaagaaggctctgtaatagcttgcataaaagactcgcgcacacgcgcgagtccttttgtgtttaaagggaagtttgcggcgcggcggccaggc

SEQ ID NO: 14165 - DNA, 673 bp, Unknown
  gut microbiota DNA sequence
gattcaagaaggagaaacactatgcctgaactcctttgcccgcactgcctgcagccgctggaaaacggctaccacggcgagtgcgtccactgcgggcgctcgctggagaaccgcaaccccgagggtgcgctgcccctcggcacccagctgggcggcaagtataccgtgggcgcatacctgagcgccgacggcgacggcctttcctaccgcggtgtgctgaacgcagaaaagcgctttgttcttatcaaggaatatttcccggtcacgctctgcaacgggcgcagcgcgtcaggggcactgatgcccaaggaggaaaaagaagtccttttcaagacgagccgcatggacttcaaggacctgtacgacgatctgcacaacctgaccccggccaccggcctatccaccatcctcgatgtcatggaggaaaacaacacggtctacgctgtggaggagaacgagaagggcatgaccctctcccactatctccatctgcgcagccgcacactgacccccgccgaggcacgcaccctgctgcagcccatcatggagggcgtggcgctgctgcacacctccgggctgatccaccgcggtatctgccaggacaatatcctgctgcccattgacggcacggcccgcctgacgggctacggcacgctggcgctgcgaaccggcg

SEQ ID NO: 14166 - DNA, 1060 bp, Unknown
  gut microbiota DNA sequence
gctacgccgcgccggagcaatactccgccgccgagttcagcggccgctataccgatgtttacgcattggcggcagtctgctacaggatggtcacggggcagacgccggtggctgcgccccagcgcagagtgcgggacagtctggagtctgcccatagtctggaggcaggcgtccccacatggttctcgcaggtattggcctgcgccatgcggctggacccggccaagcggatgcagacggtgcccgagctgatgagcgccctgaccgacccgaatgtcgccaacgccatgtttgagcggggcgataaccagatcagcacccgcaagatcatggcggtgtcgctggtcgttatctttgtgctggtcgtgctgctgctctggagccttgcgggcggcagcagcaacggcggtacgccgtccgccacgccgcagcccacagcggccgcagcagtaggggagaatgcagaagctgcgaccgtgccgaaccttgtggggctgcgctatacgaccgacatcaagggcaacgatgcctacagcgaattccgcatcgtcatggtcgagcaggggtccgacaccgtgccgcagggcgttgtcatcagtcaggacccgcccgcgggcacggaaaagctgatgaaggatcagattatccagatcgtagtcagcagcggcccgaatcttgtggagatgcccgacatcatcggctttacgcaggcaaacgccagcaaaaagctggacgcactgggcatccagtacaagatggtcatggtcgataatgacggcacgatggccgcaggctgtgtggccaagaccgactatacggcgggcaccaagatcaataccgagaatgtgacggtcatcgtcagcattgccggggagcgtgacgatacgctggtagcccagacggggaatgcgggggagagtacacccgaaccgaccccgcagccggaagcgtgagtgatagcggcaggtgggaaaagcccctccggtcatcgcttcgctcgaccacctccccactgcgtgaggaggctttttgaggcggccaaaggccgccgtcagaaagg

SEQ ID NO: 14167 - DNA, 1566 bp, Unknown
  gut microbiota DNA sequence
cttagcagctgccgcacctcgctcgccgtatcggcacttagaattatgcggtattgccctaaaagggagtcagccatgggacgcacatcgacaaaagagaataagaacagctatcagcttgcccgcgaggagttgggcctcacccgggaaaaggccagcgaactgctggagaccatcgcccccgagcgcattgaaaagattgaaaacgagcgcaccgtcccccgccccgatgaggtgctgaccatggccgaaaaatacaaacggcccgcgctgtgcaactactattgctcgcgccagtgccccatcggccgggagtatgtgccgcaggtctcggtgcgggagctgtccgccatcgtgctcgagatgctggcctccctgaacgcaatggacaagaaaaaggaccgcctgatcgagatcactgccgatggccagatctccagcgatgagattgacgatttcatccgcatccgtcaggagcttgagcgcatctcggtcacagtcgaaacgctgcagctctggaccgagcggatgctcgccaacggccagattgatgccgaggcctacagagccaagctgtcgcagccataagacgccgccgcgcagctgctattttctctgtcaggagagaataaagccctctatttttcttttttcttcctgtttttgcaataagccgcatgctaaaatcgtattacagagtaaggcagccccgattgccccggcacatcgaaggtggcttgcccgtctgcagcttgtatcggcacacagaaaaaaggagatagatcgtatgtttaccctgtttgtcatttttgtttttgtctggcttttcgtcaaatcggtcggattggcgtttcatgtcacctggggccttgctaaaatcgccgccacgctgctcttcgtcatcgcactgccgctgctggtggtttttgccattctgggcagcctgctgccgctgctgctgcctctggctctggtagccgccgccttcggcatcctgaaaaactgcgcctgatcgcgcagggcctttgccgcatccatccaacacaacgccgcacggtgtctcccgccccgggagtcccgcgcggcgtttttgtgacggttttccccgcctatgtacgcaaacatcaagcatacctgccgcgccttaggagcaccgccctcccgcacatcacccgccaaattttccaacttcccgcccccgaagaattgacaacccccgccgcagctggtataatactatatgcgcaatttgctttgcacagcagctcgccgagtaagcagctgtactcaagcggtcgtaagagggagcactcgaaagtttgcatccggcaggttaccttgtccgcaggaaatcccataacggcgggctttatcgggtgtcgcgtacccaacttttcatcgttatcttgcatcgaaatctcgcatttttccaaacgctgtgcgaggcggtgcgataaaaactaaataagcagacgtatcgaagcggtcgtaacgagattgactcgaaatcaatttgacagcaatgtcacgtgggttcgaatcccaccgtctgcgccaagtatcact

SEQ ID NO: 14168 - DNA, 9470 bp, Unknown
  gut microbiota DNA sequence
gcccacaggaaaaaagaacaatatgtctgcaccgttctgtagctttacaaaaggcaggcagaaagggtataatctgaacaatcggcataggaaatatacggtaaggcagacagagacgcacagtagcagttgatgcagggtggttgccatattggacgggtaggctgcatcagatgacgaaacggggatttaccatgatacgcatagcaatcgtagaggatgatatagggtatcgaagtcaactcggaaagtacattgatcagtatcaaaacgatttttcggaaacggtcagtgtatcggaattttcagacggattggaaattgtcgaaaaatataaatccgagtatgacataattctgatggatatccaaatgaagcatatggacggtatgcaggctgccatgcgcatacgggatatggataaaaatgtcatcatcatatttattacaaattctgcgcaatttgctgtgcagggatataaggttgaggcattggattatgtattgaagcccatccaatactttgccttctcccaagtgctgcataatgcggttaaaaaagtacatggaaaatccaagttctatattcacctgatgcaggaaagcaagatgatccggcttgatgcagaccagatactgtatattgaaagccgcggacatacgattatctaccataccgagatcggcgagtatgcagagagaggatcgctgaaaggtgctgaagaaaagcttgcacagaggcattactataagtgcaacaactgttatttggtgaatctggcgcatgtggagcgtgtgaatcagttggtcgtaaccgtaaaagggcaggatctgcaaatcagccgtgcgcggaagaaaagctttatggaagcccttgcggcgtatatgggaggcgaatagcaggcgtgatacaggatattccgaaattgtataccgcgctggcggagtggctggcatgtgtgctgtttgtaaggctgctgccccagcgctataatgcagcaaaaacggccgggatcctggcagcagcgctgcccttattcggcttggtgcagtggttgatcggcgttgttccgctaagcctttggattcccggcatgattgtggttttggttttgatgtacgctacgatctggctgtgctgccgcttgaacttttgtgatacgggtttttggtgggcgctggcgttcacgctggcagagtttattgcatcgctggagtggcagctctattcattcggcgcatcaaagatgccgggcagttggtggatacagggactgttcctgctggtcttttatggcggtggctttggtatttttctgcgacttgagcagaaaaggctgagcgataaagcgccactgcatatgacaagacatgaaagcatatcggcggctgttatagcgatctgcacatttttaatcagcaatatcagttatgtgacgaccgacacgccgttcagcgggcgtatgaccacggaaatattctggatacggacactggtggatttcgcggggatggctgtgctgctttccatgcaggataggtggcaggacatgcagacacaacacgaattgacggcaatccagacacttttaaagcggcagtatgagcagtaccgtatcagtcgtgataacagcgaagccatcaaccgcaaataccacgacttgaagcatcagatacaggtcattcggatggagtcggacgcggtcaggagagaggaatacctttcgcaactggaaaaaggaatgcagagcctgggtgtgaatcagcataccggaaatgatgtgctggatacgattttgtcggataagcagttgtattgcagtcagcatcagatcacgctgacgatcgttgcggacggtgcaaggttggattttattgaaacgatggacatctgcagcatattcggcaatgcgcttgacaatgcaatagagagtgtggaaaagctggccgacccccagcagcgcctgatccgggtggctgtctatacacagaatgtgtttttgattatccgagtggaaaactactgtacagcgcagctttctgttgtggacggcgagtaccgcacaacgaagcgtgataaggatatgcatggctatgggataaaaagcatccgctatacagcagagaagtatggcggatcggtttctgcagattgttcagataactggttccatctgagcgttctccttccattgccggaaaaagcctgaccctatacagtacggctgtgcggtgttgccttaagtatgtgggagcggtgcggagttgatctgcaccgctttttttgcggaatgcacaaaagggagcgcgtctatttgaaaaaagtgttcaagaatgcaagttgtgccactgtggtgacggattatgccaaaagtacccgaaaaaagagggagttgtgctacactttgaatacaacagcagaaaggaaggaggtgaaaactgtgaacagacaagcagtgaacccgtatttgccgtcgtgggaatatattccggacggggaaccgcatgtgttcaatggcagagtgtatgtctatggctcgcatgatcgcttcaacgcaccaatcttctgcgtaaatgactatgtttgctggtcggcgccggtggaagatctttccgactggaggaacgagggagttatctaccgcaaaaaacaggaccccaaaaatccattgggataccatctgctttttgcaccggatgtctgccaaggcccggacgggcgctactacctctactatgcgtttgacttcttaggcattatgggcgtggcggtctgcgatacccctgcaggagaatatgaatttttgggtcatattcactatgcggacggcacactctggggacggcgaagaggagatcagcttccgtttgatcccggcgttttggcggatgatgacgggcgcgtatggctgtattccggcttttacaatactgtgcctgctattctgacaggcggacacaagcttagatgtgacggcggtacagttctggaactggaaaaagatatggtgacgataaaaacggagccgcgcgtgattttccctaaaaaagggccgggagcctttcaaggacatgagttttttgaggcaagctcgatacgcaaggaaggaaaaacctatatcttcgtatattcctctcgtcataaccatgaattgtgctacgcgaccagccaaagccctgacagagatttctcttacggcggcactctggttagtcagggtgatatctttctggacagcaacctgtccgaaaagcacgcagctaattatttgggcaatacacatggcgggctgctcaagctagaggacaactggtatgttttctatcataggcaaaccaaccgccattcgtattcccggcaggcctgtgccgagaagcttcggcgtaatgaaaacggagcgtttcttcaggcagaggtcacaagctgcggcctaaacgatggacccttaaagggaaaaggccgttatgaggcgcgtattgcctgtaacctctgggggaagaacggtaccgggcgctatgacggacctttcccgaaatggcggctgcgcaatcacccctatttcacgcaggacgggccggacagagagaacagcggcaatcagtacattgccaatatgcgcgatggtgcagtggcaggattcaagtactttgcctttaaagatgctgctgagataaaggtacattgtaccggctctgcaaacggacgccttcaggtgtcaaccgcaccggatttttccacgctgtgtgccgatattttcataaagaacggcagccaggtgggggagaaggtgacccttacgatcccggacggaacctatccactgtatttccgttttatgggtagtgggaaaatgaatttccactggtttgaattacaataaataccacatagccatttacttttgaaggagaaacaaaatgaaaaataagaagaggcttgtgccgtggctgattgctgcagttatcattgcagcattggcggtaatcgggaaaaagctgtacgatttgatgtttggcggctccctggcagttacgaccgaggatttgaagaacggcatcattgcttgcagcccggctatcatctttattgttgtagtactgatcgcggcgctcatcgtagtggccgcggccggaaagcttaagcagccgaagcgtgcgctggtgcgcgcacaggccccgattgccattttgctggctgtcacgctttctgtcaactgggttattctcggcgtggaatactctgtggtgaacagtgtttttgctgaggatgtcaaggtttcggacgaaacaatggcatccggccgtgcgattgcagaccagatcgcatccgagggcatcgttctgctgaagaatgatgacaaggcgctgccgttgagcgccggcacaaagctcaacttgtttggctggtcgagcgttcgaccgctgtatggcggcaccggctccggtgacagtgatacgagcaatgcagtttccctgattgacggcctcaagcatgcaggctttgaagtcaatgaggagcttgtgaaattctacgagaatttccgtacagagcgtcctgtcggtacgattcgtctgcgtgagattggcagcaagcgcggcgattttaccgttccggaacctaccattgcagagtacgaaagcgctaatatttttgagaatgcgaccgcttactcggatacggcggtggttgtcgtcagccgtaccggcggcgagggcttcgatatcccgcagagtattaccggtccggatgaatacaatgcacagtacggcgggctcgcacagttctatgattttaccacgcaggcagaagacctcgatgccggcaagagttacttggaattaagcaaccgcgagattgcaatggtagatcgcgtttgtaaagagttcaagaatgttatcgttgtggtcaactcctccaatgctatggagcttggctggctggatcagtatgacagcattaaggccgccgttctctgcggtgcgcccggcgagcttggctttgattccctcgggaaaattctgaacggtgaagtgaatccgtccggacatctggcagatacctatgtctacgatctgctcgcaacacccacggtcaacaacttcggcggctttgcgtatgataactatgcagaggtgacagggagcgtggacaaccgtgccatgtttgtcaactactgcgagggcatctatgttggctacaaattctatgaaacggctgccgcagagggccttattgattatgataaggtggttcagtatccgtttggctatggcttgagctacactacctttgactcttcgattgcagctgtcgaggatgatggcgagaaaatcacgctggacgtagcagttactaataccggcgatacagcaggaaaatatgttgcggaaatcttctatgagccgccgtattataatggcggcatcgaaaaggcagcagcaaatcttgtgcagtacgccaagacggagatcctgcagcccggtgaggcacagaccctgaagatcaccttccgttatgaggatatggcctcctacgattcaaactgcatcaagagtgcgaatggtgcgtatgtgctcgaggctggtgactataagatcaatctctgctcggattctcatacgattctggatacctatgttgccaaggtggacaaagatgtcatctatgacgatgcacatgatggtgctcgctccacagatcaggtgactgctacaaaccagctcacctttgcgcagggcgatgtgacctatctcagccgtgccgatggctttgccaactatgcagaggctactgctgcgcctgtaaaccatagcctgagtgcgcaggcattggcagaatatgcaagtgcggcaacctttgatgcggcaaaatatgatgatcccaacgctgttatgccgaccaccggggccaataacgggttgaagctctctgatctgaccggcgttgcttacgatgaccccaagtgggagcagcttctcgatgaactcacggtcaatgacttgttcagccttacggcagacggtggttaccataccgttggtattgaatccattggcctgtccgcaacggaggactgtgacggtccgaccggtgtacacagcaactacaatcctgccgcaggtccgagctatcccggctctgtgatgctggcttgcacctggaaccagccgctggccaaggcgcgcggtgaacagattgcaaaagagtgtgccgaaatcaactgcacaggctggtatgcacctgcaatgaacatccaccgcagcgcattcggcgggcgtaactttgaatactattccgagtgcggtgtgctctccgggctgaccgcagccgccgaggtgtccggcgcaaccgaaaatggtctgatttgctatgtgaagcattttgccttcaacgatcaggacaactatcgtcagaacaacatctgcacatggctgaatgagcaggctgcccgcgaaatttacctcaaggcgtttgagcagccgatcaaggcaggcggcatgggcgttatgacctctatgaatgcggtcggacctgtctgggccggcggctgtaaggcccttttgacgaacattctgcgcgatgagtggggcttccatggctctgtcattacggacgcagtcgtcagcccatggtatatggacggcaatctggcaattcgtaccggcggcacaaagatgctggcgtttaacatcacgaatgagttctaccgtgatttgaactctgtcggtacggtaacggctatgcgcaaggcagcgcacggcacgctgtatgcattggcaaactccttcgccgtgacgcgtgcggtagctgtgccgaagtgggtaaagacgacctacgcagtggatgcagttgttgcaatcatccttgtcgcttgggaggtctgcgcgatctgcaaataccgcaaggcaaaaaaagaggacgaaggtactgagcaataagatgtcttatgaaagataaaagggatacagcaaaaacagccaatcaggatataatgcagtggatccgtgagggtggcttgttcgtaattgtatgcaacctgattacggtgtttaagtacatattgctgcagtttctgcctgctgcttttgcaaatatgcccaaggtggattttggctggccgggaatcgaagtgaccatgctgggagcaaccttcaaatggaacattttgggctatgacgcagaacatggtggtttgccttatttttgcgcttatatgatagccatggtactgggtgaggtaatcaatttcccgatacagagaaatgtcgttttccgcagcaaggggaatcttacccggcagatcgtttggtatgcggttgcattttgcgtaataacctgtattgtaaattctataaactgcatttgggtcgcaacagctgcgcaatatgtgccggattttatttacaatattggtacaacggtattgaacggcggcatttccatggtaatcttctttttcgtcaacaaggtcattttcccaaccagcgagtagggcgaagcctcttatcttctgcagaaatcacctgagcaatgcctgaacgcagcgataatgcgtttgcccgctcagaaagcgtaaaacacgcccggacagcttgcacttgtgcagttgtccgggcgtgttgttgttttttgcaagaccgccaaaagcaggcggctgaaactgtgcaatactgcttgtgtgaggaaggcactgcgcgtgctgctgtgccggtcacaggctgatcatccagctgcgtcttttgaacatgacaagcgagacggtcaggcggaaaatctcctccgttgtaagcagtgcatatacgccgacaatgccccagtgcaaaccatacgcggccagcaggcacagcgggatgccgatgccccatgtgccgatggtgtcaatgatcatgattaccctggtattgccgccgctcctcaggatgccgccgcttaaaatcatgttttccaccttgacgggggcatacagggcaaacacgaccagcaatactttgcccagcgcctgtacatcagcgtccacacggtacaagccggtgtatgcgcccgcaaacagtaccagcagcgaggctacacctatggcaccgaccaacccggtcagcatgatgcgcctggcatccctgtaggcgtcgtcgaaggctttccttcccagctgcttgccaaccatcacaccggctgccgccgacaacccgctcgacgcgcctacaatcagcgactgaatcgggcaggtgagggtataagcggcaaggttggctgtgccgagatgcccatacactgcagactcgacattttgccccagactccacaaaaactcactgagcaaaatcggcaggatcatgccgccgtatgcccgcagggtgattctttcaaaatgcagcgcccactgggggtgactgccatctcgtctgaggcagaccacaaagcccagcaaaatcagcaaggaattcagtagctgcgaaacaagagtggcaatcgcagcaccctgtacccccatgggggcaaacccgagcttgccgaatattagcaggtagttcagaccggtgttggcagccaccgcgccaaggctggcccaaaagggaacggcagcgtgttccttgcagcgcagccacgcagataagaccgtgctgagcgccatcggcagataagcgaatgctacaattttaaaatacacggcaccggcttgctgaatacgcccatcggcggtgtaaagctgcaaaatctgtgccggaaagctcccggcagccagcaaaaacagcaccgacagcaaggccccgcaaagcagactgacattcaggctgcaccatgcctcccgctcgttgtctgcgccggtgaactgggcaatcaggattccggcaacggtgccgaccgagcccatcaccacggaaaaaatcaacgaaaaatttccgtacaagcctacagcggcaatattgacctcgcccagctgcccgatcatgatttgatctattatggaaaaggatgcctgcagcatactttgcagggtgacgggaatggcaattttgctcaatgatttcataaagtccgacatggcatcttcctcgtgctttctctggaaatcagtgtgaccggcagaacgatttgcgcctcgcactttttgccgctgcgcatcgctttaaggcaggccagcgcggttttatgccgcgaaaatgacagtgcaataccttctttttattcgctcttattccatggtacaacacaagagaaagattctcaatggttaaacgcataatctataacaaaaatcgaatccgatttttgtacaagatttctaatagcagtgtgctgcgtgattacagccttgaaaaccgccgttatggaatttggtggatttgcgcagaaaaaggcgggaaagttgtgcattgtgtcaacgggtaaattggtttgtgcgtgaattttaacggtttgtgaaaaggcgcacctattttgtttcagatgtggtatagtacaggcagaagaac

SEQ ID NO: 14169 - DNA, 2255 bp, Unknown
  gut microbiota DNA sequence
cgacccgctgcttgatgtcggcgaggtctttggcgtctgggtcatcgagggcgataccaagctgaacgatgtgctgcccttccgcaaggcaggccttgaggaccatgtctttgtcacccccgacatgagcccgtacaagaagcgtaaggtccgcatcctgaacggcgcccacaccggctttgtgctgggtgcctacctagccggtttcgacatcgtgcgcgactgcatgcatgacgagaccgttctgggctacatgaacaagatgctgctgcaggaggtcgtgcccatcctgccgctggatcaggacgactgcaagaggtttgccgccgccgtggaggatcgcttcaacaacccgttcgtcaaccatgagctgatgagcatttctctgaactccacctccaaatggcgcgcccgcaacatgccctccttccttgagtatgtcgagaagaacggcaagctgcccacctgcctgaccatgagctttgccgcatacattgccttctacagcaatgatgtgcaggcgctgaccgacaagggtctggtctgcaagcgcgccaagggcaacgagtacaatgtctccgatgaccgctgggttctcgagttctacaatgcgcacaagaacgacagcatccccgcgctggtccatgccgtcatgaccaacgagcagatgtggggtcaggatctgaccaaggtccccggctttgaggaggccaccgtcaagaatctgaccaacatccgcgagaacggcgcgctggccgcttacaagagctgcctgtaagcccataaaggcttctccccgagggactgcgcccgcaggcgcgtgtcggagcgcaaccgccgaaggcggctcttagcgcgtagactgaagctgtcaccgaaggtgactgatgaggggcgcgttcgctattgctgcccgcaaacgggttgccgccgtaacgccgcccctcatccgaccgcgcgtcgcgcggccaccttcccccaagggggaaggcttaaaacgtaccccattggggccggaggatgccctccggccccgcttttattattagtaaggaggcatcttatgcccattgccattaagatcaatcccgccgataacgtagtcgttgccctgcaccccatcgccaagggcaccgctgttcccgttgacaacaccaccgtcaccgctgttgaggatattcctcagggccacaagatggccattgccgccatcaaggcgggggagaatgtcatcaagtacggtttccccatcggccatgccacggcagacgccgtgcccggcacatggatgcacacccacaacatcaagacgaatctttccggtgagatcgagtacagctaccatcccgatgtccacccgctgaccccggttgcaccggagacctttatgggctaccgccgcaaggacggccgcgccgccatccgcaacgagatctggatcatccccacggtcggctgcgtcaatgactgcgccaaagcgcttgtgcgcgacaatcaggatctcgtcaccggcagcattgacggcctgtacacctttacccatccgttcggctgctcccagaccggccacgaccacgcgcagacccgcaagctgctggccgcgctgacccgccaccccaacgccggtgccgtgctggtgctgtctctgggctgcgagaacctgacccatgaccagttcctgacggagctgggcgagtacgaccacgaccgcgtcaagttcctgacctgtcaggatgtcgaggatgagctggtagcaggccgcgagattttgaaggagttggccgcctacgccgggcagttccagcgcgaggcgatccccgcaagcgagctggtcatcggcatgaagtgcggcggctcggacggcctgtccggcatcaccgccaacccgaccatcggccgcttcagcgatatgctgtgcgcccgcggcggctccaccgtgctgaccgaggtccctgagatgttcggtgccgagggcttcctgatggaccgctgccagaacgagcaggtgttcgagaaagccgtcaagatgatcaacggcttcaaggagtatttcatcagccacaatgaggtcgtctacgacaaccccagcccgggcaacaagcagggcggcatcaccacgctggaggataagtcctgcggctgcgtacagaagggcggctccgcgccgatcatggatgtcatcgactacggcgagcctgtcaccaccaagggtctgaacatgctgtatggccccggcaacgatctggtcagtgcta

SEQ ID NO: 14170 - DNA, 1804 bp, Unknown
  gut microbiota DNA sequence
gatgtattccaccgtgtaagcggtcaggtttattgtcttttcggttttcatttgcttttttcctccgtataggttatactgagggcggtaaatccgcgtgtgtcaaacgctttaccgcctgccgctttgggtgttggtcgcacctaaggcggcttttgttttggggtgggtatccgccggggctggcgtgtccagtgtggacacactgccagtaggggcacatttttttgcgggggtggacattcagcccggagaaaagcatttcaggaaaaaagaacatagctgcaagacaaaggcatcccacttctgttcttatatttctttcaggtgcatccaaaacgacatcattttttataaataaacgcatagtatcgtgaaatccgagggcatacccccggcatttgttccttttcctctcctttctcccctgcacccctcttttctcttcttatctttttgcttctcttcttttcttttctcttctgtaagccaccctatagggtggtatagggggggctatccgtttttcttctcccagcgggtatttgcaccattacggccataggaaaccgcttcttcgtacgcctgctttgattcgtcgatgtaggggcgtatcacggaaaagaccgaaaatgcaccttgcgtcagtgtcagttcgtcaacatcctccccgctaaaatattgaaatgctgctttcaggccctttcccgcatcggcgtctgatacgctttctataacaggccgctgaaattcaaacatcttccaccatgtcgggccttttttctttctcatcatcaaacggcccttttgtggtcaaagaaatacttgccgtattcctccggcgagatgcccagcgcggcggcgatcttctcgatctgccatgcatcgaagggctgtgcgccggtcatgcgggcggtcatcgtgctggacgccatcccggcggcgcgggcgacctcattttgcgacatttcgcactgcgcaaaacgaacgcgcaggttataaaatggcttgtacatgctttctccctcctttatggcctgtaagcccgctcaaccgtctcggccagagcgacggcctgctcctgcgccccgttggagcattgccgggcataatcgcgcagggcctgcacgatcaactgcttttcgtattcagtagcgtagattaccatcagaccttcacctctttcagtttctctgtaaactcctgctgcaggcgggcttgcacggccacgacctgccgcagctcggtaatgctgccatccgcaacgccggcgcggacgcaatcagcaacagcggcccgaagcgctgcatttaagctaacataatacttggcgtttgccagcatcgtactttttccaccgcgaatcggcttgccgactgcgtattgcagcgaatccgctgtaatggctacttcatcggataaaataatcatgcttctaaactcctttgtgtttgaatacccgtcagcgcctgaaaatcggcagtagcggcggttttgacgggtgggggtatatcccagtatacccggcgggtacagtgcccccaaatatgcatattttagcccccttcccggatgatttcctccggctcacagttcagggcgcgggcaatgcgtacaacggtaattgccttgcagctgccccggcggcgaatcgtgttgaagttctggttggtcatttccatggcctgcgccagctccgtgacggtcataccgcgctttgccgctaatagctcgattttctgcgtgttgattttcatttgtggttcacctctttttcagaaacatttattactgtactagcagt

SEQ ID NO: 14171 - DNA, 13545 bp, Unknown
  gut microbiota DNA sequence
tagaggaaatcgaagttcagattggcgaattgcaaagtcagatacgcagcatccagcaggagaaaatctccggcgataacatttatcggctcttactggcatttgatgaagtctaccattccgcaacggaagcagaacagaaagagtttatgaaagcctttatcgagcgaattgagatgttcccggaaaagagaaaagacggaagctggataaagaagattgtattcaatttccctgtgcctattgatggcgaggaagtgaaagaacttcccttggaaactgaaacaacagtcgaaacggtttgcctgctggtgaagtaaggcggtaagtttgaaacctgtttggcctttttgctatgcgcggccctgcacaatacatggcagaaagcgctgtgctgtccggttctggttgtggacggaacggcgcctctggacgaaacggcagcccgcgtggaggaattgctatgatctgcaaactgacccctgaagaagaagtccggatgcacattcttttgaaagggattgccgatgaccctaatgcgctggagatgcagaaattcatccagcatggcagcgtcacgacctatgagcactgtatgcgggtgacccgcatcgcattctggctcaacatccatctgcgggccaacgccgatgaggccagccttgtaaaaggtgcgttcctgcatgacttttacctgtatgactggcacagctgcagcaatattacccattggcacggcttcaagcacccgcgcatcgcgcgctataatgcggagaccgtgtttgctctgagcgataaggaaaaggacatcatccaaagccatatgtggccgctgacgcccaccgatattccccatagccgcgaggcagcgctggtctgcatggcggacaagatgtcgtccagctacgagaccgtactggaacgcaaggcacagcgaaaggaaaaacaagagaggtaacgactatgatcgatcaatatacacgcacccgcgcccagctgggcacgcccgcgctggacgcattgcgcaaggcccatgtggcggtgttcggcatcggcggcgtggggggacaggccgttgaggtgctggcgcgcagcggggtaggggagctgagcctatttgacagcgacacggtcgcgctctccaacctgaaccgtcagctggtggcgctgcactcaacgctcggcctgtacaaggtggacgctatggccgcccgcatcgcggacatcgaccccaccctcaccgtacacccaaaccggatgttttacaacgccgagaccgccgacagcgtggatctgacgcagtttgactatgtgctggactgcatcgacacggtcagcgccaagctgctgctgatccgccgctgcaaggaggccggggtgccgatcctgtgcagcatgggggccgccaacaagctggaccccactgcctttaaggttgccgatattgaaaaaacagcggtggacccgctggccaaggttatccgcatcgagtgccgcaagcgccgccttggcaaggtcaaggtcgttttttcggaggaaccgcccctgccgccgctggcggaggagacactcgagaccccggttgccgcgcgccgcaccgtgcccgccagcaatgcctttgtgcccgccgcctgcgggctggtctgcgggtcggaggtcgtgaaggatctgctgcgcaaggcgggggtctatcgcggtcaaaaataatttttgtgcgccctgtttcagaaaagcggggcgttttgcatgaaaaacactactttgcgccccggttcttcttgacaattacaccaaagcaaagtaaaattatatataggaaataaagagccaaacggcaggtctgccctgtgcgtggctccttaaagggtgtcgcccaccgggaacgccgcttttttacgatattcaacgtcgctaagacggttctgtgtatattctgcgtgtaggggcattgtgcgcctttttggccgacctgccgcgtttcttcctgtaacaatatcataacggaaaagcgtcccgctgcgccgcatcctcctattttaataaggagtgaaaccaactatgtcaccaattttgatcgtggtgctggttcttgttgctgctgttgccggggcgcttggtttttacctcggcggtgaaaaccgcaagcgcactgctgaggcaaagatcggcagcgctgaggacgaagccaagcgcatcgtaaacgatgccatcaaggctgcggaacagaagcgtaaggaaaccatcatcgaagcaaaggacgaagcatttaagctcaagagcgatgctgacaaggagatcaaggaccgccgtgccgagatcacccgtcaggagcgccgcatcgaccagaaggaggaggccctcgacaagcgcaccacccagatggagcgcaaggaggaggacctgaagcgccgcaccgagacggtcgaggcccgtctggacgagctggagcagctcaagctgcgccagaccgaaaagctggaaaccatcgcggccatgtccaaggaggatgcccgcgccgtcctgctgaagcaggtggatgacgaactgacccatgaaaaggcgatgaagatcagcgcctatcaggcaaacatgaaggacgagtgcgacaacctcgcccgcgagctgatcggtcaggccattgcccgctgtgcggccgatgccacgagcgaggccaccgtcagcgttgtgccgctgcccagtgatgagatgaagggccgcatcatcggccgcgagggccgcaacatccgcgcgctggagaccgccaccggctgcgatttgatcattgacgatacgccggaggccatcacgctgtccagctttgaccagacccgccgcgaggttgcccgcatggcccttgagcgcctgattgctgacggccgtattcatcccgcccgcatcgaggagaccgttgacaagtgccgccgcgagctggagatccagatgaagcgcgagggcgacaaggccgttatggagttgggcgttcacagcctgcaccccgacctcgtcaagcttatcggccgcctgaaataccgcaccagcttcggccagaatgtcctgagccactctctcgaggtggcatggctggccggtctgatggccggcgagttgggcgtcaatgtccagctggcacgccgcgcaggtctgctgcatgacatcggcaaggcccttgaccatgagatcgagggcagccatgtccagatcggcgttgacatctgcaaaaagtaccgcgagaacccgcaggtcatccatgccatcgaggcgcaccacggtgatgtcgagcccaagaccacgctggcgttcatcatcatggccgccgatgcgatctcggccgcgcgccccggtgcccgccgtgaaaacatggaaagctatatcaagcgtctggagacactggaggccctctgcaacggctttgagggcgtggaaagctcctacgctgtgcaggccggccgcgaggtccgcatccttgtccagccggataaggtcggcgatgacgaggtcattctgctggcccgcaatgtcgcaaagaagatcgagaacgagctggattatcccggccagatcaaggtcagcgtcatccgcgaaagccgcgccaccgagtacgcaaagtaaaatttatagcaagcaacccaaaacaggcagaccgtcagaaatggcggtctgcctgttttgtgctgttggaaagtctatatgccgctttccacggttcgtaggggagggtcttgaccctcctggaaaccctgtgactggcgcaatgtacccggaagggatgaatccctcccctacaaaataataagcccccggcgtaataccgtacagcggcaggcgtcgggggctaaacttattctattacagatgcagcactcgatccttgatctcggcggtgcggccctgattccagaactgggtgccgatgtagccgcaggtgcggcgggcgacattcagcttgttctggtcgcggttgtggcacttcgggcactcccacaccagcttgccgtcctcctgtacgatctggatctcgccatcgtagccgcagacctggcagtagtcactcttggtgttcagctcggcgtacatgatgttctcatagatgaactgcatgaccttgatgacggcctcgaggttgtcctgcatgttgggcacctccacatagctgatggcgccgcccggggacagcttctggaactcgctctcaaacttcagcttggtgaaggcgtcgatcttttccgtcacatggacatggtaggagttcgtgatatagctgcggtcggtgatgccgggcacaatgccgaagcgcttctgcaggcacttggagaatttgtaggtcgtggattccaacggcgtgccgtacaggctgaaatcaatgttgtgctggctcttccatttggcgcaggcatcgttcatatgctgcatgacatgcagcgcaaagggcttggcggcagggtcggtgtggctcttgccggtcatatacttgcagcactcatacaggcccgcatagcccagactgatcgtggaatagccaccgtagagcagcttgtcgatcggctcgcccttcttcaggcgggccaaagcgccgtactgccacaggatgggcgcggcatcgctcagcgtgcccttcaggcggttgtggcggcacatcagggccttatggcacagctcaaggcgctcgtcaaacagctgccagaacttgtcaaaatcgccgccgctggacagtgccacatccaccagattgatcgtgacaacaccctgattgaagcggccgtaatatttgggcttgccgttctcgtccagatagggggtcaggaagctgcggcaccccatgcaggtaaagcaatggccttcgccgttggcatcgaccttgtactccagcatcttcttttcgctgatatagtcgggcaccatccgcttggcggtgcacttggcggccagcttggtcaggtagtagtagggctggccctcatagatattgtcattttccagcacatagatgagcttggggaaggcgggggtgatccagacgccggcctcgttcttgacgccctgatagcgctggcggagcatctcctcaatgacgatggcgagatccgacttcaggcgctggttgtcaccggcctcgttcaggtacataaagaccgtgatgaacggtgcctgaccgttggtggtcatcagcgtgacgacctgatactggatcgtctgcacgccgcgcttgatctcctcgcgcaggcgcttttcaacgatctcggagagcttctcctcgccggggtcaatgcccaaatcctgcatctctgcctcgacatcgcggcggatcttcttgcggctgatgtcaacaaagggggccagatgggtcaggctgatgctctggccgccgtactggctggacgcgacctgtgcgatgatctgggttgcgatattgcaggcggtggagaaggaatgcggcttctcgatgagggtgccggagatgacggtgccgttctgcagcatatcatcgaggttgaccagatcgcagttgtgcatgtgctgggcatagtaatcggcgtcgtggaagtggatgatgccctcctcatgcgccttgacgacctcctgcggcagcagcatacgcatcgtcagatccttgctgacctcaccggccatatagtcgcgctggacgctgttgacggtcgggtttttgttggagttctcctgcttgacctcctcgttgttgcactcaatcagcgagaggatcttgtcatcggtcgtgttatgggtacgcttgaggctctggacatagcggtaggtgatgtagcggcgcgcgacctcgtaggcgccggtcgccataatggcatcctccacaaggtcctgaatctcctcaacattcatggcgtggctgcggttatagcagacctcctgcacatggtcgctgatctcgatgatctgctgcttcgtcaagcgctgggcttcgggtacgaccttatttgcctttgtgatggccgaaatgattttggtaatgtcaaagacagcctcgctgccgttgcgcttgatgatcttcatggtaactcctctttttgcaattaatagacagggtgcgtatagtacaaatcgtatagtttgtcaaatcgtactaagcccgctttgcgagcaagactatcataccgcaccgggctgcaaaagtcaatcggcaaaaccacaatatatagtgggtgaagtgtgaaatttaacaaaatgttccgttttcatcgtttcatcgttcaaaaacagagatgccaaaaatcaggcgtaaattttagctattttggttgattctactctgcataacgatgtatcgcataatattagcatgacccgcagaaagtcccgcttgaattgtaccggataaactggtatactggttgaggttttggggtagtatgccccaatacatacaagatattgggtaacactgtacaaggcagggcagggatggcccgcaggagaaccgctatgaattacgctacgatcaaatattgtgacattgccaacggcgagggcgtgcgcaccagcctgtttgtatcgggctgccgccgccactgccccaactgcttcaatgcagtggcatgggactttggctatggtgcgcccttcaccaaggaggttcgcaacaagatccttgaaagtctggcacccggctacatcaacggcctgtcgctgctgggcggtgagccgtttgagccggagaaccagcgcgagctgctgccctttgtcaaaaatgtcaaggcgctttacccgaacaaaacgatctggtgctataccggcaacaatctggagcatgagatctggcagcccggccccggccgctgtgaggtcaccgatgagttcctgcaatatattgatgtgctggtggacggcgattttgtgcaggaccagtatgatatttcgctgcggttccgcggttcaagcaaccagaggctgatcgacatgaacaagacccgcgcagcgggcagggtggtcctgtggcaggacgacccgatctttgccgaccacagcatgtaacggccgccccattattataaataggagaagtataaccagatcatgagctgccaagcgaaatccaaatccatgaccgagggcccgctggccaaacagatcctgctcgtcagtctgccgctggcactgtccaacctgctgcagatccttttcaacatgtccgatgtcgctgtggtgggccgctttgcaggctcgaccgcattgggcgccgtcggctccacctccacctttgtcaccctttttaccggctttctcatcggcctgagcaacggcgtcaatgtcttggttgcgcggtattatggtgcccgccaccccaaggatgtcagcaagaccgtccattcggcgctggtggtcagcctgctcgccggtattttgctgctggccgtggggctgttcggctcccccgcgctgctgcggctgctcaacacgaaggaggatctgctgcccggcgcgatcctttacctgcgtgtctattttctgggcatgccggcgctggcgctctacaactacggcaatgcggtattcagcgccatcggcgagacaaaaaagccgctggcctacctgtccgtggccggtgtggtcaacatccttctcaacctgttttttgtcatcatctgcaagctggatgtggccggtgtcgcgcttgccagtacgattgcccagtgcctttcggccgggctgatcctacacgccctcaccaaggtggaggactgctatgcgctggatctgcacagcatccggctcgacctcggcacgacaaagcgtatcctgatgctgggcataccggcgggtctgcagaacgcgatctttgccatcgccaacctgtttattcaggcgggcgtcaactccttcgattctctgatggtcaagggcaactcggccgccgccaactccgatgcgatgatctatgacgcgatggcggccttctatatggcctgcgccagctttatgagccagaactacggtgccggcaagctggaccggatgcggaaaagctattttatctcgctggcctactccttcggcgtgggccttctgctgggcggcgggctactgctattcggccgccagtttctggcgctcttcacgactgaaagcgctgtcatcgacgccggcatgaaacgcattatggtcatggggcttgcctactgcatctccgcctttatggactgcacgatcgccgcctcgcgtgggctgggaaaaaccatcggcccgaccgtcattgtgattctgggctcctgtgtgttccgcgtgatctgggtctacacgatctttgcacatttccacacgatcccttcgctgtacctgctgtaccccttctcctggctgctgacggcagcggccgagatcgtctacttcatcttcagctatcggcaggcgatccgcatcttccatgagcgggaggcccttgcacagctgtaaaagcgccaaaaaaacagagagcagctccatgcggggcgctctctgttttttataggacttacttccggtatttttccattttgcgcagcctttgcaaaatagcgccgggcttgctataatagatgcagaaaagtcgaaggtctgtggcgggaatagggccgcagccttcagaaagcaagggtgaaagcaatgcagacctatacctatgtctcgaaagggaaatttgagcggcgggaaaagcccaagccggtgctgcaggatgcgcgcgatgccatcgtcagggtgacactggcgagcatctgctcaagtgatctgcacatcaagcacggcagcgtgccccgcgccgtacccggcatcacggtcggccatgagatggtgggcatcgtcgaggccgtcggcgatgcggtgacccatgtaaagccgggggatcgcgtgacggtcaatgtcgagaccttctgcggggagtgcttcttctgcaaaaagggctatgtgaacaactgcactgacaaaaacggcggctgggcactcggctgccgcattgacggcgggcaggccgaatatgtgcgggtgccgtttgccgataccgggctgaacaggatccctgacggcgtgacagaccggcaggcgctgctggtcggcgatgttcttgccaccggttactgggcggcgcgcatctctgagatcaccgaggaggacaccgtcctcatcatcggcgccgggcccacgggaatatgcaccctgctctgcgttatgctcaaaaagccgcagcggatcatcgtctgcgaaaaggaccccggccgcatccgctttctgcaggagcattatcccgaggtgctgacggtcacaccggaggagtgcgctgcctttgtgcaggccaacagcgcgcacggcggcgccgatgtagttctggaggtcgcaggcgcatcctccaccttccgccttgcgtgggagtgtgcaagacccaatgccattgtaacggtggtcgcgctgtatgacacggcgcagaccctgccgctgccggagatgtacggcaaaaacctgaccttcaagacgggcggtgtcgatggctgcgactgcgaggaaacgctgcgcctcatcgcagagggcaagctgaataccgagccgctcatcacccacacttaccccctgagcaggatcgaggaggcctacgatctgtttgaaaacaagcgggacggtgtgataaaggttgcagtcgaatgtcaaagcattgactgatgccgccgcaccgcaaatcatcaactgtaaaggaatgaccgtatgacgaatcagaaaaccctttcctgcggcgcaggccgctttgacatcagcacagcgggcctgcacattctggcaatgacccttatgctgatggaccacctctgggccacgctgctgcctgcgcaggagtggctgacctgtgcaggcagactggcttaccccatctttgcctttatggcggtggaggggtacttccacacccgcagcttccgaaaatacgcgctgcggatgctggttttcgccgtgctgtccgagatcccgttcaatctgatgtgcggcgggacatggttttacccggtacaccagaatgtgatctggacgctgctgatgggtcttttgggggtgcatctgctggaaacggtgcgccgaaagcaaaaacccgccctgtttgcggcggctgcagtcggcgttattctggcgggggcggtgctggggatcctctgcatggtcgattactacgctgtcggcgtgctgacggtgttggttttctacttcttccgtggccgggcatggtggtgtctggcagggcagctgctcgcactgtactggctcaatgtcgagatgctgggcggcctgatgtaccctgtgcagatgttcggtgcttcgtttgagatctgccagcagggttttgcgctgctggcgctcgtccccatctggctgtatcgcgggcggcagggataccacagccggtggttccaatatttctgctatgcgttttaccctgtacacatgctggtgcttgcactggccctgcagttcctgaaccgctgacgcccaataagcaacaaaaacacccctctcagcacaggccgagaggggtgttgctttattgcagggggcttacgcgccggcgggatggcttagtacagcttggcgccggcagggatgcggtcatctactatgagcagatgcagaagatggaacccgttgaatccgagtaagccccgtcagacagagagaacagccgagtgagagtaggcaattttataatgcactttttaagctgaaggagtttcaaatgaactggaaatatgattattataattgccccgatgacccagataccggcgttcctgcctgcggcgacctaccggaatgtaaaagctgtgaatggtatcacctcattacttccgcgcagaaatgcacaactacataaacaaaaaagcagagagtcatccgtaagaggataactctctgctttcttgtaaagccttttctgcacaagtttggtgtcaatgtggtgtcaaatcagccaaaccgggttgataaaaggcgtgaaatcaatgctttttagtcaatgggcttcatcgtggggattatatttagaatcacttcacaatgcttcgtgatgctttactatcacggttttgtgtgccttccaaatattcgtgacccttcgtgattatccagtaagtcattttgatgtcagtagtgaatttttgctgtcaatagaagtactcagtagagcacttcttcgctgattaaaaaacatccagtgttgcagccaatcgttcaaacgattcttgttttttctgttcggttgcttcggcataagtgtccatcgtagtctggatgtctttatgccccataaccgattggataaccttcaggttggtctctttttcgcaaagccttgtacagaatgtgtgacgcaaattgtgtgcagaaaagtctggaagcaaaaccgcattacggtgctgtttctttgatgccacttcttcgcccgcattgtaatctgcaatgattcgcttgatagcacgatttacagattgcggattggggacattgccgaaacggctacaaaagacaaatcctgtcattccgtcaatttcaacatcgttccagccagactctttctgctcttcccgcagcatttcaaaggcatctttcacggcatcaagcatcggaattgtccgaatgccagcattcgttttaggctttgagatatgctgaatagaactgcggttctctcctaccgggtaataaactaggctatgattgatgttgatagtacgccgctcataatccagatcatcccagcgcaagcccaatgcttcaccgatgcgacagcccgttcccagcagcaccgtaaacagcggccaccagtggcagtagaccgggtgattggcgatatgctccatgaacgcccgctgctgtggaatcgtcagagcatggcgtacaccggtggtctgttcggagcttttctttatctctgtcagcacaccatcggtggggttcttccgaataatttcgtctcgaaccgccaactgaaaagtgggatgaagaagtgtatgaacgctctccaatgtattcacctgcaagtcttgcttgtccagtaaataattgtaaaactgcaatacgtccgaataccgaatcacggcaattttcttcttaccaaacatgtcccagacaaagcgatcatacatataaaggtagttgctccgggtagtctggcgcagatttgttttcagactcatatagcggtcaaaaacaaagttgaccgttgccttgcctgcaacgtaaatgtccaaaccatctaactgatctttagtgagttgagtttccttttcccgaagggttacaaggtcatttgcgtagatgtatttgcgccgccccagcggatctttataggaatacgcataccgtttatcggagctgcgctgcatctcgcctttgcgcagggtacgtccccgcaagtcttttcttgtcgttgccatatcaattctccttctcgaaagaagaagggcatgatacttattctggatctgataaaatcttattcagccccagcaaaacaacttctgtcatactcatttgatgttgtgcagcataagaacggatacgctcgtatagggcatcctccacccgaacatttacggatttcttttttgcattatcggattttggtcgtcccatctttgccatagcagttctcatccctccacgacagcagtatacttattgtgaagcagaaagtcaagttcaaaattttcccttccgaatttagcaatgtacaatttatggctttgattacagaatatgaaaggattccagatagcgttcaaaaatctcacagtttaccaaagcaaccttgtcaattttgtaaacagctttagcttccttggcgagttcttgaaactttgtcaggccaagactgtatttttcagctccttcttgataccggacaaacttcttagcattcatctttgatttctcaacgtctttacgcgaatatcccatataaaacacctctgtctgtttgaaatttgggtaaacatcattctataacagcacaaaaataccgtggaagatgattcttccacggcacgatctgtcgttatagctgtgcgtttttctccccctgcaattccagacaggcaacctttcccggcgctgtgccctacaatggccttgcgaccattgtagtatgttttctcgcatcttggcacgctcgcagattcccggtcatggcgctgcttccccaatgcggtacaaacagaggacgctattctctttttcggaggcttttaaccctcctatagtataagagaacacgttcccggaaattttcgcagaatttttcaaatttcttctaaaaaagttaaaagtattcgaagctgcgcatctttgtgattgaaatataatagttggatgaagctgattggacagtattgtatttcaatggcttaaagataaagaaagttgctggagaaaaaaatattctccagcaactttgtctttgatgaataaaggtcaattttttatttaactattctcactattatttgatttagtgatttttttcttctttggagaaaccagtttgtgaccggaataaatggacat

SEQ ID NO: 14172 - DNA, 7234 bp, Unknown
  gut microbiota DNA sequence
cgcggtattgccttacaaataattcactgccaggatcgccgcccccagcacgaccagtacaacaccggtggcgcggttcagagtggcgggcgcggccttgttggcaaacttggcggcgatacgcgcccaaagcagggtgctgacgacacagcagataaggcagaatacatccggcataccgccgatggcgaaatggctggccgagccggtgaacgccgtaaaagccatgataaagacgctggtgcccacggcggttttcagctcataccccagcaccgaggtcaggagcagcagcatcatcatgccgccgcctgcgccgataaacccacagatgaacccgacacccgcaccgcagagcagggactgcacaaaccgcttctctgcgctgacggcgttcattgagcttttggtggtcatgaccggccgcacaatgaattttacgcccagcagaagggtcataaaggtggaaaagccgcccatcgtgcggccgggcacaaggctggccacatagctgcccaccagcgtgaagcaaagcaccgaggccatcatgacagcgccgtttttgatgtccagattcccgcttttgccgtaggtataggcagagacggcgctggccagcacatcgctggccaatgcaatgccaacggccatgtaggggtccatgcccagaaaggtgatgagcatggggctgatgaccgccgccgcgctcataccggcaaagccggtgcccagccctgcgccgatgcctgcgacaaagcagacgatgaatgcgataagatacgtcatagggttactcctttttcagctgacgctggatgtttgcgtccatgcgggacagatattcctgcagcctctgctgctcctctgcggtaaagccctcaaacagcggctcgaccgttcggtgctgtatctctgccagtgcggcggcgatgcgctgaccgtccgcagtaaaggccagcagccgctggcggcggttggccggggcggtgcagaccgacagcacgccgcgcgcgcgcagccgctctaccgctgccgatacattggatttcgccagcccgcggtagcggcagatgtccccggcggtgtgacattcggggttgttgtgcagaaacagcaggatgtcgatctccagctggttaagcccatatgccgcagaggcggcctcgaactgcgcggcatagtattttttgtagtgctgtatataggataatacaggcagcacaggaaaccctcccttacaagtaataaaaagaacagttctaattataactatctaaactgctggtgtcaatacaaagcgccgtataaacaaaaaaatcccgccggaatacggcgggatttctggtggacctggagggattcgaacccttgacctctcggatgcgaaccgaacgctctcccaactgagctacaggcccatgtctttgcgactaaaccagtgtaatccattttgcgcaaaaagtcaagagcaaaacaagaattttgtggggccaaagggggacaggtcgtgtaacatacgatttttattgcaggcggccattttccgcacgcttattgcgctacgctataaatagtgctataataatacaaatcttgctctggccgtataaaatcgtatacgcggtttggattgaaccagcacagatgttgcactatagtatttttaagcaaacgggagcaacattatgtggagggagatttttgtatggatacgcaacggatcgcaagctatcggcgggaattttctgcgctggcagacctgcaggcggctgggaccgtgacctattcactgctgcgcgaggcagacgcctttgtcatctgcgtgcagcgcgatgaagaaccgccggtggagcggatgctgtgcgacacaggggaggagcgcgccgggatgctgacacgctttctgtatgaaaatgcggtggagcctgaccagatgcccgcaatcctccgggatatctgcggatgggcggtgggctgagatggcagtggcattgatggacaaggctgccgggcaggccaaactcccggaaacaccggccgttgtggcgctttttgcattcggctcccgccttgaccgggatacgatgcagctgtttgcccggacccacagcgaggaggtccgcgcggcggcgatcgcatccaccgggcaggaggttctggagctgctgcacggcggccttcgcccgcaggtgctggtgctggatgcgctgctcacaaagcctgccgtgacgcaggtgctgcaggagatcggcaaaatggatctgaagccggagccggctgtgctggtgcttgtgcctgtgccggaggagacggccgcccgccgtgcgctggggctgttctcccggtatgagatcatgctgcgtccctacggcatgaaaaacctctttgatgagatctaccgcatgggcaccgatgaggaagaaaaccggctctacaggctgcgccgctgctgtgaggatgtgctggaaagctacggcgcacccacgaccctgaacggctaccgctacgccgagcggatgctgctctacgccctgtatgcggacaagccgcagccgatcggcgttttgcagcagtatgtcgcagcggaggaggacatcgaggtcggaacggtgacctcggcgctgaaccggctttccgccggcatggcaaggcgcggcaccgaggcgtaccgggcgctctgcctgcggtgcggccgcccggaggacggcgtgctttccaacggacagctttttaaaggaatgtttcagcagctgcgcggtatgacagaacgataaagggaggcgttttccatggaggaaaagcagagcaaggcagacctgctggccctgcgcggcggactgcgcggccggttccgccgtgtgtttgacggcatggaaaacgcttttgaggttctgctcgaccagcttgaacaccccctgagcccggcggaccgcgccggaatggcgcagcttgtgcaggatatgcagacgcagctgctcggtgcgcgccgtctgggggatcaggcctccgatgcggcgacagccgccgtgctgcacagcacctgcgtgccgcgccccatcgacctgctgagccagctgggcgagatctgcgacatcctgcgggaggaggccgcccggtatgacctgccgtttacgattgaactgcagaccgccgggcaaaatgtgctgcccacggtaggggatgcggcccttctgaatggcctgatgacaaacctgatctccaacacgctctccgcagacccgggggcctgcatcacgctgcgctgtgagccggggctgttctgctaccgggacaacggccccggtctgccgcccgatgcaaaggcgctgctgaccgatggctgctggagcgcccggctgctctatgcgggcgggctggggctgccgctcatcgcggcctacacaaaggccatgggctggtcgctggccgtggggccgggaccgggcacagagctgtgcttcaccctgccgcccgcgccgccgctcgatgatctgatgctggaatcccccgttgagcgcatggccgagcggcagacccggcggctggcgctgcgccgcgagctggctgtgctgcaggcacaggaattgctgtaaaatgacatggcaccgttgtcccggcagggaaacggtgctttttttgctgcaccgctttactttgcgcgcaaattattgtaaaatgtaatacaaaaagaatggtttactatgcctgtacggcagggtagaccgccaaaataactacaggtggtgtttttatggcaattcagtataaacgtattcttctgaaggtcagcggcgaggcactttccggccccaagggcacgggctttgatgaggaaaccatcgcctctatctgtgccggtatcaaggcggcgcacgatctgggtgcgcagatcggcattgtcgtgggcggcggcaacttctggcgcggccgttccagcggcaggatggaccgcatggacgccgacaagatcggcatgctggctaccgtcatgaacgcgctggccgtcaaggatgcactgcgccagcagggcgtggaggccgttgtcatgaccagctcctttatgccgcaggtggccgagtgcttcaccagcgacaaggccatcgctgcgctggagagcggcaagatcgttgtgttcggcggcggcaccggcaaccccatcttctccaccgatacggccagcgcgctgcgcgcactggagatcagcgccgatgccatgttcaaggctacgatggtggacggtgtctacgataaggacccccacaagtatgccgatgccgtgcgctatgatacgctgacctttacccgcgtgctggacgagcgtctggccgttatggactccaccgccgcgaccctctgccgtgataacggcctgcccatccttgtgtttgatctgggccagcccgagaatatcgccaaggctgtgcagggcgagatggtcggcacccttgtgaaggagtaaatcagaaaagaaaagctggagctttgaaaaattcataattttcccctatactattttacgaataaggagaatcttactatgagcagcacgaccaaaccctttgaagaaaaaatgaacgccagcgtcaaccatctggttcatgagttggcttccatccgcgccggccgcgccaaccccgccatcctcgacaaggtggcggtggactactacggcagccccacgcccatccagcagatcgccgctgtggccgtggccgaggcccgcatcctgaccatctccccgtgggaccgctcgatgctcaagcccatctccaaggcgatccagaccagcgacatcggcatcaaccccattgatgacggtcaggtcatccgtctggtgttcccggccccgaccgaggagcgccgcaagcagctgaccaaggatgtcaagaagcagggcgaggatgccaagaccgccgtgcgcaacatccgccgcgatgcgatggacaagttcaaggccatgaagaaggccggcgagatcaccgaggacgatcagaagaagctggaggaggagacccagaagctgacggacaagtatgtcaagatgatcgacgacacctgcgccgacaagaacaaggagatcatggaggtctgatctctccatgaacgatagcctgtgcgggcatgtcatctgacacgcccgcataggctgttattgcaagaaaatctattccgcgaaagggaatcactgtttatgaagacccgcatcatcactgccgttgtcggcctgggcgtcctggccgtcgtactggcgtttttcgacaccttcctgtttgacctggtgctcagtgccatctgcctgctggccatccatgaggtcttttccgccatgggctttggcaaaaagcaatggtatctgtatgccggtgctgtgccgctgaccctgctggtcatgctcagcagctcacagatggtgcgcgggctgctgctgccggtggcgttcctgaccgtgctgttctacaatgtctgccagatcgcacatgtccagacgctggatttcggcaagctgacgggctttgtctacttttcgggcgtgatcaccttctgcttttactcgctcatccatctcaagcggatgctgccctttgcgcagtatcgctatgatgccatctatttcatcctgctgatcctctgctttgcatggggcggggacaccgctgcttactttgcgggccgcgccttcggcaggcacaagctggcccccattgtcagcccccacaaaacggtggagggcgctgtgggcggcgtgctgggcagcatggccgccggctgcgtgctgacactggtctactcgctgctgtcaaagacctataatgtgctgagcatccatgtgctggcgcggcactatatggtgctgctcggcatgggtgccgtggcatcggtgctgggcattctgggcgatctgtttgcctctgctgtcaagcgtcaggcgggcatcaaggactacggcacgatcttcccggggcacggcggtattctcgaccgctttgacagcgttatgttcattgcgccgttcgtttccatcgcggtacgctatttcttctatctgctgtgaggaatgtacaatgagtaaagttatcacactgctgggctctaccggttcaatcggcacccaaagcctcgatgtctgccgcatgcacggctatgaggtgttcggtttgtcagccaactccagcgtagacaagctgctggcccagatcgctgaatttcacccgaagtatgtggctgtcaccgacccggccgcgttcgacaggctgtccgccgcgctggcagggcagacgggcgcgcccaagctgctgaagggggcggacggcctgcgtgagctggccgccatggacggcgcaggcacggtactgaacgccgttgtcggcattgccggtctggatgcctcactgacggctatcgagagcggccatgatctggcgctggccaacaaggagagccttgtcaccggcggccatctggtgaccgataccgtcaagaaaaacggtgtccacctgctgcctgtggacagtgagcacagcgccatcttccagtgcctgcaggatcagcacagcgccaaaacgctggaaaagatcctgctgaccgcctccggcgggccgttcttcggcatgggcaccgaggagctgcgcaccaagacgaaagcggacgccctcaagcaccccaactggaacatgggtgcaaaaattaccattgattctgccaccctgatgaacaagggccttgagctgatcgaggctgcgtggctcttcggcctgccggaggacaagattcagatcgttgtccagcgggagagcatcatccattccgcggtgcagtttgccgatcattccatcatcgcgcagcttggcgtgccggatatgcgcatccctatccagtacgcgctgacctggccggagcgtctgcccagccctgtgccggagctggatttcacggcactgaccaagctgagcattgcaacggcggatgacgagaccttccgctgcctcaaggcctgcaagaaggcgatccgcaagggcggtctggccccctgcgccgccaacggcgcgaatgaggccgccgtggcgcacttcctgcgggatgagatcggcttcctcgacatcggccgccttgtggagggcatcgtggacagcgattccttcggcggggattacacgcttgccgatgtccatgagtgtgaccgcatggcgcgggcctatgtggaggcacatatctaaggcaacaccgcacaattccc

SEQ ID NO: 14173 - DNA, 11005 bp, Unknown
  gut microbiota DNA sequence
aatgataactacttcacccgtttcactatccttgccttacagagcagaaaacaagcgtttttcgacccttaaacgcacaaaaacaggcggcatccaaccgaagttgaatgccgcctgttttgtccgatcctgtttcgcagttgccgatttcgtaattctctcaaattactgtcttaccggcacacgcctcagggaggccgtttgttactttacttctcctgcgccgcaaacagctgcggagcggccttgtagatcagcacggcggcaacagtcgtcatgatggtctccggcagcatatagctgccgttgtaggtcaggctgaaggtccaagcggccagaccatcgctcaggttgccccagatcagaacgccggacaggaagctgcacagaaagcggataccgcacaccgctgccgtgccgacgccgacaccgaccagcttgttggcaaacggcttggcaatggcagatgccagacccagcagggtaaaggccagcacatagtccagcaggatcatgccgaccagcggcaggatgccgggtgccgggggtgcgtagaagcccagcagcatctgcagcaggctgttgacaaaaccggtgaaaaggccccacttcacgccgtggcggaaagagatcatgatgaacggcagcatgctgaacagcgtgatggagccgccgttgggcagctcatagatcttgatgttggccagcaccgtgccgagagcgatcatcagggcgcactcgacgagggtacgggtcttggaataggttttggacatggtatccactcctcaaaaaaatgtaacacaaaacagaaaaagcgcccgcagggtatacctgcaggcgcaaaaagtgttatgacgggggtcaaacttcctacgccggcattacccggatcaggttcaaggtgacccaaaactgcggtttgttttgatctcagccgaggatgccccccagcgcccctgttttaatgtccaacccttattatacacagtatccgcggtttgtcaagccaaagcggcgcgttccggcggacgctctgtttttacttgctgaccttgatgagatctgcgcccggctcgacatcgccggaggccacgacctcgacagccttgaagtcatcggtgttggtcacgaccgtgatgaccacggcagggtgaccggcagctgcgattttgcccagatccatctccagcagcagatcgcccttctttactttgtcaccgaccttgaccttcgggctgaaaccgtcacccttcatctcaacggtatccacaccgacatggatcaggacctcaacgccgccgtcagccataatgcccagcgcatggccgctgtcgggggcctgggtgatctcaccgccggccggggcaaagaccttgccctcgctggggtcaatgccgcagcaggtgcccagaataccctgtgcaaacacctcatcggggatgttctccatcggtacaaaggcgcccttggcatcagcagccagcatcatggggaaggtaggctccgcaggtgcggcaggtgtggcagatttcttcagaaaatcaaaaaatcccatcgttcattttctccttcgtaagccctttgcgggcggtttcacggttctattataccccccgccgtagcaaaaagcaaggcgggcagacacttttacagctgctccatcacggcgcgtatcgcctgccaggtaatgcgcgcgatctcggcaggcggcggctggaactgattttcctgccaggctgcaatcgtgccaaagcagccgttgaccgcaaaggaaagcatatatttctgatcctcagtcccgccggtgggggcaaagttgccccagcagcgctcggcgatgagccgctttacgctggaggtaaactccgactcccagcttttgccgtagagagcggcgcacaggtcggggttctcggtcaaataggtaaacagcgccaccagcgctgtggggacatcctcctgcgagatgctggggatcagggtatccatcagctcattcagccgcttcagctgggcggcctccatctggtccatcagggcataaatatcggtgtaatgaaagtagaaggtaccgcggctgatgccggccagctccgtcaattcgcgcaccgtgatctcgcgcagacttttttgctgcagcagcgtgatcagcgcctgatacagccgctgcttggtcatgcgcacactgcggttggcgtcccccttggcgttcattgtatgcaccgccttcctcacgatttactactttaagaatagccgtttttagcactgatgtcaaggatttttaaaccatttgtactaaaatgtctttctttgtggatggttttttatcaaattcgcggtttgcacgccggtgcggttatgctacaataggggcggggagtgatactatgaaaatcgaccgcgcccgcgcgcagcgggcctttgccgactatgctgcgcattacaacaccgccgacccgaaggtaaagctcaagatcgaccacacctaccgcgtggcagccctctgcggcagaatcgccgaaagtctttcgctgccgcagcaggacatcgaccttgcatggctgagcggcatgctgcacgatgtgggccgctttgagcagctgcgccggtacaacacctttattgatgcgcagtcggtcagccatgccgcgctgagcgtctcggtcctgtttgacgaggggcatatccgggactatctcgatgatgccgacgccgacagcctgctgcgtgcggcggtggaatggcacagcgccttccgcctgccggacgggctggatgaacgcacgcagcggttctgccagatcctgcgggacgctgataaaatcgacatcctgcgcgtcaatgtcgagaccccgatggaggaaatttacaatgtcaccacagcccagctgcgccaaagccctgtgaccccggctgtgctggacgccttttatgagcatcactgcgtgctgcacagcctgaaaaaatggcccgcggacaacgccgtgggccatgcatctctggtatttgagctgtgctatcccgaaagcttgcggatcgtagacgcgcaggggtggctctggaagctgctggccttcaaaaccgacaaccctgacaccgcacaggcgtttgaaaaaatcaccgcagaaatgaagcggtggctcaaagccaacggctgttaaagtccctgcaccagaatcactgcgatcagcacgggcagtacatatttgaagtagggcttgacccagcgcggcattttgaggccgtcaccggtgttgcactcggccgtgtagccgtcaaagccccagccccagcgggtgacgcagaacagcagatacacaaggctgccacccggcagaagcaggttgctgacgaggaaatcctcgaaatccagcacggtagagccggcacccaaaggctggataaagctccagacattgtagcccagcgcacagggcagtcccagcaggacaagcgccgccatgccgataacgcaggccctgcggcgctcccagccaaagttttcacaggcgcaggcgatgaggttctcaaacacggcaatgaccgtggaaaagcttgcaaaggtcatgaacaggaaaaacagcgtgccccacagccggccgcccgccatattcgtaaagacattgggcagtgtgatgaagatcaggctcgggcctgcatcgggcgcaatgccgaaggagaagcaggccgggaagatgatcagccccgcgcagaccgccacaaaggtgtccagcacgcagatgcgggcagcctcgcccggcagggtaaagcggcggtccatatagctgccgaagatctcgatcgcgccgatgccgaggctcagcgtaaagaaggactggttcattgccgccgtaatgacattgccaaggccctgcccggcagcgcgccctgcatccggcagcaggtagaaggcaagcccctcgcccacgccgggcagcgtaaagctgtggacgaccagcaccagaatcagcaccagcagggcgctcatcatccatttgccgaccttttccagcccgccctgcaggccgcggccgcagacgatgaagcccgccactgtgatgacagccatccagaacaccatctcggcagggttggccagcatctcgccaaagacgctgctcgcctgctcggcgttcagtccgtcaaagctgccggtcaaaaaccggacaaagtaatcaagcatccagcccgagacggtcgtgtaatacatcatcagcagcgtgcagcccgccatgcagaaccaaccgtggatatgccacttgctgccctccggctccagcgccttgtacgcggcgcgtgctgcaccgtggcctgcccggccgactgccagctccattgtcagcaccggcagccccataagcaccagaaaaagcaggtagaacagcacaaagataccgccgccgtactgccccgtaacggtgggaaaccgccagacattgccgatgccgatcgcgcagcccgcgctgacaaggatgaagcctaggcgcgagccgaagccttcgcgttgtttttgggattccatacgattcctcttttcttaccaaaagtaatatcattatagcgtatcgcggcgaagcttgcaagcacggaatcacagtgttataattactgcaacacctgcagcgtacatactaatgggtaaggagttaagaatatgcttcgttttgaatgtgactatggcgagggcgcagcccccgccgtactggaccttatgcaaaggaccaattttgaccagacccccggctatggggaggacgcctactgcgccaaggccgccgcgcagattcgtctgctctgtgacgcaccggatgctgccgtgcatttctttgtgggcgcaacgcaggccaatctgacggttattgccgccgcgctgcggccgtggcagggcgtgctgtgcgctgacacaggccacatccatgtccatgagaccggctccatcgaggccaccggccacaaatgtctggcactgccgtccaaggcaggcaagatcaccgcacgccagatccgcaaagcggtcgaggagcatcgcgccaacgccagccatgagcatgaggttcagcccggcatggtctacctctccaacccgaccgaggtcggcaccctttatacaaaggaggagctgaccgccatttccgccgcctgctatgaactgggcctttacctgtttgtggacggtgcccgcatggcctacggtctgaccagccccgccaacgacatgacgctgcaggactatgcggcgctctgtgatgtgttctatctgggcggcaccaagtgcggcgcactcttcggcgaggcagtcgtcatcaccaacgatgagctgaagggcgatttccgctactgcatcaagcagcacggcggcatgctggccaagggccgcctgctgggtgagcagttccttgccctgctggacggcgaggacggcagcggcagcagcctgtatttcacgatggccaaaaaggcagacgagcaggcgctgcgcatccgcgccgccttcgaggaaaagggctgtggtctgctgcacgattcacagacgaaccagcagttctttgtcctgcccgatgcatggtacgaaaagctggctgagggctatgccatgacccacatgggtaagcccgacaagcaccataccgccgtgcgcatctgcaccagctgggccacgcaggacgcggctgtagagcagcttctcgccgatgtaaaagccctgtaagcgtcttttttcagtacccccgcagcaaaaaaatcccgcatcgcaaggatgcgggattttttgttgccggttaaagcggtagccgtgttatacaatcacttctgcacgcgcttgtcgcatcggattgccagctttgtgccgatggtctgcaggatctgcaccagcacgaccagcagagccgttgcaaagaactccagcactacattaaagcggtaatagccgtagttgatggcgatcttgcccagaccgccgccgccgatgataccggccatagcgccgtagcccatgatggtggtcgctgcgatcgtcacattcgccacaaggctcggcatgctctcggggaccatgaccttcgtgatgatctgcagcggcgttgcacccatgctctgggcggcctcgatcacgccgccgtccacctcacgcatgctcgtctcgaccagacgggacacaaaggggaaggatgcgatgaccagcggcacaatggaggccaccgttccgatggaggtgcccacaatggcgcgggacagcggaatgacaatgatcatcaaaatcaggaagggcacgctgcgcagcaggttcacaaggccgttgagcagcgccatcagccagcggggcaggggacgcacgccgccctgctcaccggtgacaaggcagacccccagcggcaggccgatgaccagcgccagcagggtcgcaactacggtggaccagatggtctcccaggtttcaaacggaatggtgggcaggatctgcatgaatgtctgccagtccttgcctgcaaaaaactctgccatcagccgttcacctcctcataggtaatgccgggatagttcttgatgtagtcgagcgctgcggccgccttatcatcgtcaggcagggccagcagcatggtgcccagcgtctggccgttcacaatgcgggtatccgccgccatgatggacaccagcgcgccgcactcaatggcaaggcttgcgaccagcggcttatcggtggtctgggtgccgccgaacgctacgcgcaccagcttgtggccgggcagcggctccgcctgaggcgcaccggcaggatagacgagccgccgtgccgccttggaggtggggtggctgaagatggcctgcacctcgccctcctccacgaccgtgccgttgtccagaatggccacgcggttgcagacctcctcgaccacgctcatctggtgggtaatgataacgaccgtgatgcccagctcgcggttgatcttctggatcagctgcaggatggcgtgggtcgtgttggggtcgagtgcgctggttgcctcatcgcagagcagcaccttcgggtcggttgccagcgcgcgggcgatggcgatgcgctgcttctgcccgccggacagctgggccgggtaggcgtccgccttatcgggcaggcctaccagctccagcagctcgcgggcgcgggcctcggccttatcctgggggacattggccaactccatcgggaacatgatgttgcgcaggcaggtgcgctgcatcagcagattgaactgctgaaaaatcattgtgatctcgcggcgggccgcgcgcaggtcggctgcattcagctcctgcatctgctttccgttgacgatgaccttgccctcgtccgggcgctccagcatgttgatgcagcgtaccagcgtggactttccggcgcccgacatgccgataatgccgtagacatccccgtcctgaatcgtcaggttgatgtcgttcagtgcaatgaccgtgccgccctgcgtggcaaagcgtttggtcaggtgttgcaattcgatcatgggttttctccctcatttacaaagatagcgaatgagcgcaaaaactcattcgctattgattgtactctatatttcggcaggttgcaagggttttctttgcagctgccggcggccggcggctgccagcgggcgcatatggaatgcgcccctacaatttcgctgcttgccgtaccgtaggggcggattctatatccgcccgtgcccgttcacggctgtacgaggcattttcttagaagatgggcacgaccgcgccgtcataggtgctgttgatgtactccttgaccttgtcgctggtcagggcggcgtacagggcctgaatggcggggtcgttctcgttgccctccttcacgaccagcacattggcgtaggtctgggcagcctcagaggatgcatcctcggtggcaagggcgtccttaccgaccgagaaaccagcctccatcgcgtagttgccgttgataacggcgaaatcaacatcctgcacggtgcggggcagctgtgcagcctcgatctcctgaatcttcaggttatgggggttctcggtgatgtcgttgatggtcgcggtcagaccggcaccgtcacgcacggtgatcaagccctgcgcggccagcagctgcagggcgcgggcctcgttggtggtgtcgttgggcacggcgatggtcgcaccgtccgcgatagcggcaaggtcatcactcttgcccggatagatgccgaacggctcatagtggacagcgccgacgctgaccagatgggtgccgttctcctcgttgaagctgtcaaggtaggggatgtgctggaagtagttggcatcgacctcgccgctctcggtgacgaggttgggctgcacatagtcgctgaactcaacgacctgcaggtcgatgccctgctcggccagaacctccttggccacattcaggatctcggcgtggggcgtgggggaggcggcgaccttcagggtcgtgccggccagctcgctggtttcggcggtggactcggcggcagattccgcagcgccggaagcagtgctttcagcgggggcggcctcggaggtggaggcggaggagccgcaggcggcgaggctcagggccagagtagcggcaagcgttgcagaaatgagttttttcatgatatattctcctttataattgtcaggtgtgttgttgattgaatgtgtgttccctctattttcaacacattcgcacaccgggctgcttgtaaatggggcctcttgtcatggttacaaacttcctttccaaacaaaagcgggatgtcggcttttaccccggcatcccgctgcaagttttcattacgcgctgtattttgcgcacaagaaagctggcacaggctgccggagcaacatgcacatgcacatcatcatcataccggaacgataagccgtcattggtctgtacccctttctctcgtgattggtcagcggtcatttgctttccatggctcacagtatacgcctgtgaaccggttctgtcaacaccttcttgcataaaaatgcatatttcgtcattttgtatatatcctactgtgttagtaggtagtagacttgcaaaattcccagtattatgctatgattagtcttactaattccgataaagggagcatcaccatgaaattttcgacccgcgaccgttatgccttgcgcctgatggtggagctggccaaccgccccaatgacctgatcccgctgaaggatatcagcgacaagcagcgcatcagcttaaaatatctggagcagatcgtcaccccgctggcaaaatccggccttgtttccagcgtgcgcggcgcacagggcggctaccgtctggcccgcccggctgcacagatcacctccggcgagatcctgcgcgccgtagaaggggagctgacggccattccgtgtctggcttcctcggtggattgcccccaccgcggccagtgccacacgctggatttctggtccggcctgaacgatttgatcaacaaatatgtggacggcattacgctcgaacagctgcgcaccatgccggaggtgccggagataggggaaagctgcgagtaaggccttgcaggcaccctgagatgggggcctttttgcgcgggcaaggcccgcggggaagcctcccctcacaggggaggtggtcgagcgaagcgatgaccggaggggcttttcgacctcgcctttcctgtcacttcacgaaaagggactcttgctatgtcggaatacaaagagttgctctcccacgcccgccagttgcggcgggaaatgaccaaagaggaacgccatctatggtatgacttcctgcgtaattacacaccacgctttgcacgacaaaagcttgttgtaccctatattctggatttttactgtgcctcagctcacctcgcagtggaactggacggtggccagcactgcgaggacaccgggaaagcgtatgacgaacggcgcactgcctatttgcagcagaaggggatacaagtgctgcggttctccaatttggatgtaatgcggaattttgacggggtatgtatgcagatcgaccttacggtcaagaaaattctggtccaaaagaggtaacagccgtaaggcagtaaagcccctccgatcatcgctatcgctcgaccacctccccgctgcgcgaggaggctttctcgcgggcttcgcccgcaaaaaggctccccattctgggaagctggcccagcctgcggggcctgaggggccttgcaccttctttccttttctgctcacaaaaaattcccgcctgcaacacagatgttgcaggcgggaattttctatcgcactatttcaatcacagattaaaatactgctttgcgttgtagtagctgatgccctcaacgatcttctgcagggccttctcatcgttgggatactggccgttctcgacccagttgccgatcaggttgcacatcaggcggcggaacagctcatggcgggtgtagctcaggaagctgcggctgtcggtcagcatgccgataaagttgcccagcaggcccagacgcgccagcgtcttcatctgctggtacatgccgtcgtccgtgtcgcagaaccaccaagcagagccaagctggatcttgccgggaacttcatcatcctggaagggtcccagcagggtgcccagcatgtcgaagtcggcggggttcaggctgtacagaatgaccttcgggcaggcatcggccttggtcagtgcgctcagcaggctgctgatggtcgcgctgcaatcggtcacagcgatcatgtcaaagccggtgtcggggccgagcttgcggtacatcttctcattgacgttgcgcaggcagctgtagtgcatctgcataacgacattgtacttcttgtacagggcacccagcttcagcagcaggtaggtggtgtaggcgtcgccctcctccttggtcagggtctcgccggccatggccttcttgaaggcggcggtagccttgtcggcgttggtctccacgaagggaatgtaatccagaccgtggtcagaagcacg

SEQ ID NO: 14174 - DNA, 748 bp, Unknown
  gut microbiota DNA sequence
gcggacgctcgcgagcgtccgcttttgctttagtcgtcttcctcttctgcttccagaatctcctgcgcgacctcgccgcggctgcggcgggtatccatcgcgcccttctcaataaggcggtgggcctcggtctcggtcatgccccttttctcgatcagatagcattttgcgcggtcaacaagccgcagctgggcgattttatccagcagctttgcattctcggcgcgcagcacggccagccgcttgtagttgctggccgcgatctgtacggcctgccggaactggaccgccgtgaacggcttgcccagcaccagcacaccgaaatcctgcagcttgtcggcaatctgctcggcggtgccggtcttggccagcagaatgacgccggcatcggtcttttgcaccgcgtctgtgcccagctcatggccgaactcgtcaggcaggggcgtattgatgatgatgacctcatagtcgtttgtgtccatgcggcggcgtgcctcaccgccgctggcaacgatcgtggggcgggtatagcccaactccccgatgtgccgtgccagatactcgttggcgttgtttccggccgaaacgatcaatgcttttcccatgggctgccctcccttcctgatggattttttgtgcctgccgtgtgcgggcgcatatggaatgcgcccctacgggtggttgtagggggcggcgtcctcgacgccccgcgggcgggcactgcccgcccctacatagcggccttcac

SEQ ID NO: 14175 - DNA, 1375 bp, Unknown
  gut microbiota DNA sequence
ccgcgggtcgatgcaagcatcgaccccaacatttcacaaagtcaaataatcaggaagctgtgcgcccgttcccatgcctcggtgtcgggggcggattcggcgtcatggcaaagctgggtctggtactcaaaatacttgttctgcagcgcaacgggcagctcggcgctgataaattcgctctggcccgccacggtgatggcctcccgcagggtgcggggcaggctttccagacctgcggcggcgctggggtggaaaaggttgcggttgacggcctcgggcagaggcagcttgcgcgcaatgccgtcaagccccgcggccagaatcagcccgatgacaagatacgggttgccggccgggtcggggccgcgcagctccacgcggcacaggtcgccgtgggcgctgggcagccgcaccagctggctgcggttctggcggctccagctgacatagagcggggcctcgttggcaccgagccgcgcgtaggagttgggcaccgggttgcagaaggccgtcagctcccgcgcgtgggccagaatacccgccacaaaatgcccggactcactgtcgggggtaaaggcaccgtcaaacaggttcttgccgtcccgcagcagcgagatattgacatgcaggccgctgcccggctggttggcaaggggcttgggcataaagctggcaaacagaccgttgcgcgccgcaatggccttgacggtgcttttgaaggtgttcagattgtcggcggatttgagcgcggtcgtgtagcggaagcagacctcgttctggccgtggccgctctcgtggtggctgtgctcggggtgcaggcccatttcctcgatggcaaagcagatctcgcggcggatgttctcgcccttatccagcggcggaatgtcaaagtagccgcccatgtcaagcgggatgcgggtggggttgccgttctcatccgtctcaaacagatagaactcgcactcgcagcccacattgcaggtcagtcccatggcgcgggcgcgcttgacgacggattgcaggtagccgcggcagttgccctcgaacggtttgccgttgggcagcgtgatatcgcagtacatgcggataacgcgcccctcggtggggcgccagggcaggacggtggcggtgtcggggtcaggccagaggaccagatcactctcctccacattcataaacccggcgatggacgaaccgtcaaagctgacaccctcggcaaaagcgcggggcagctcactggcaaagagcgagacatttttctggttgccgaaaatatcgcagaatgtcaattttgcgaacttaacatcgttgtcctcaacaaaattgagaatgtcctgtgcggtgcgtttcataggaacctcctgtaaaagccttc

SEQ ID NO: 14176 - DNA, 3451 bp, Unknown
  gut microbiota DNA sequence
acatgagttttctcctttcaacttccgatttgtccgccttaaacaaacccgactgcccgccgcgttataccaaaaacgcctcaaacctatgcaaatcgtcaatttttacggtggcgcggtaaaaaacgccgtcctcgcggtattcctccgccgccacgctgccgcggctgcgcaaaatgtcggccagcgccagcttgtcatagggcagcaccagctcaatggtgcgcacgcggtggcccagtacatcgtcaagcttggccagcagtccgggcaggccgcagccggtcttggcgctcgtcagcagaatgtccgggtcaaacgcaacggcgttcgccatatcgcatttgttgtagaccaccagctgggggatgctctcgcagtcaaggctgcccagaacctcatcggtcacggccagctgctcggcagcctgctcgtccccggcgtccgccaccttgatgatgacatcggcaaaggcggcctcctccaatgtggatttgaacgcctcgaccagatggtgcggcagccggctgacaaagccgacggtatccaccagaatgatctgcagaccgctgggcagcaccagcttgcgggctgtggggtccagcgtggcaaacagcatgtcggcctcaaagatctgctcgccgcacagggcgttcagcaggctggatttgcccacattggtgtagccgaccagcgccaccacgggcacattgttcttttggcgggcgcggcgggtctcgctgcggcgcttttccatttccttcagcttttcttccagatgctcaatgcggtggtgcaggtggcggcggtccagctccagttttgtctcaccggcgccgcggcgcgcaccgccgccgcccccgccgccgccgccctgacggctcaggctttcgcccagcccctgcaggcgcggcagctggtagcgcagcgtggcaagctcggtctgcagcttgccctcgttcgtggtggcgcgggcacggaagatttcaaggatcagcatcgtgcggtccagcacctcaagctgcagcgcggcagagaggttgcggatctggctgccggtcagctcgccgtcaaaaatcgcggctgccgcgttcacattctggcagacaaggcgggcctcggcgaccttgccctcacccagcatcgtggcggcctcgggcgtggcgcgcttctgtacaacctcggccacggcgtccatgccgttggcatcggccagtgcgcgcagctcgtccagactgcgggtcatatcatagcggccctgatccagcgccagcagcaccaccggcagtttctcggcgttggtggttttctgggcagtcgtgccaaagtcaagttctgtcgtgttatcgctcataattcctctttcagcaggtggtaggcgcggcaggggaccggggtgccgtcaaacttgcggtcggtcacatcatggtcgtagacaaagcctgccttttgcagcacggcactgctggcaatattctcgttggcgtggacggcggccagccagtcggcgcccaccgtgtcaaaccagtagtcccgcacggtacagagtgcctcagttgcatagcctttattccaccatttgcggccgagtgcgtagccgacctcccacgcagagccaagccgctccgtattcaggtgccagccggtcttgagcgccggcgcggggaaaaggctgatcgagccgaacagcacgccggtgtgccggtcggtgatgccccactggtagaaggcagggtcatcgtagtgcttttcccactcgttcagcgtctcggcggtctcgccccagctgcggtgggcgttccagcgcagatactgcgtgacctgcttgtcgctggcccagttgttgtacatcatttcgctgtcatccatggagagccgccgcagaacaaggcgctgcgtctccaattcctgtgtgccgcaatgcttcatgatttccctcacctcttgtggaagatgccgcgcagaatgcccagccccatggtccagagtctggccagctgcgcgcggtagagtgtgcagtagataaacaaaatcacgccgaccagcgcgaattttataaagaagtgctgccacagcagcgtgccgaccgccgcgactgcaaacgccagcagaaagccggagatcgtcttggggtagctggccacggtgcggtaatacatctgccccgtgacgctgcggtacaaaaaggcggcaccgttgctggcggccagcgcgagcgctgcaccggtcagcccaaagcgcggcaccagcaccacgcaaagcccgaagttggacagcgcccccagcccgatgccgatcgtgtcatgccacggcttgcgggcgatcgagttgccgtagaccgtgccctcgcacaaaatgttgaacacaacggccagcatcagcagcgggaagatcgccagacacccccgcttgtcggggaagatgacaaagacgatgtcctccagcatgaccagcacgcagaaaaagccgaagatcagcaggtccagcacatcatgcacgcggcagatgcgctcctgctcgtcgcggtaatggctgtagacgtagggcccccagtaggtggaaaagcccgcctgaatggccgttacaagctgcgcaaggctgtagccgaaggcaaaaagcccctgtgcgctctcgccgcaggcgttgccgacaaacgaaaggcagataccgctggacaggctgaacaaaatctgtgccggggccagcgcgatgccgtagggcacggcctgccgcgcaatgccgcccagctgtgccgcgggcagcggtgccagcacggcggcgcgatacttgtacccgaacgcaatggccaccacgccgaagctgaggatggcggcgaccgccagcacaaagacctcggaggtgaaaaagcccggcagcagataaaacaggttatagcagccctgcatccagagcgtttcggccgtgtaggcgcgcaggtcgttttccagccgaagcaggacattcagataccgcaccagcatataaagcgccgcattgagaaagagcagcggcacgatgcccggcccggcggagccaaggccgaacgcggcagcgaggggctgcgcaaaaaacacgctgcccgcaacgcccagcagcatcataaaggacgccgagatgcgggtgcaggccgcaaacagctggcgcggctcggccccggcgggcggctcatggtaaaagcgcagcagggcctggtccagaccaaggatgccgatgttcatgatggtggccgtgtaggtcataaaggtgaccggcgcgcccagaacctcggcgggcagcagccccttgacgataagggccagccccgtgatggcgaagcccagataggtcgccaccgaatatttcattacattcccggcgaaggattcgccggaggtttttttctggtctgacatgattatttgtcctgtcgtagagttgtaggggccgggcatgcccggcccgcggccttgcc

SEQ ID NO: 14177 - DNA, 9199 bp, Unknown
  gut microbiota DNA sequence
tctgccgtacagtgcagggccgggcatgcccggcccctacatgctcagcggacgaacggcttaatgcgttccgtcattgctgccacctgctccggcgttacatgcgctttgtccacatagccgtagatgcgctgcgcaaagtctgccagcggcgggcagaaggcgaatacctttttcggcttccagccgtgcttataaaggaaatgcaccccggccagcgcgcagagcttcagcttgttgaagtgcggggtaaagcccgcgcccatcggctcgtcccgcggcggatttttgtagacatcctccaaaaggtcggccatccgcttgtaggcgggcgtttcgctcgggtcaaaatatccctcgatgacctcccgcgcgatggggaagggcggctccggctcggccatggcggcggcgaacgcatcgtaacttgtcacatagtgcgcgtccttatagatgaccgggtcgtactcatgctcgatcggcaccgggcgcaggatgtggcagcttttgcctgccatatacacctcggcgatggcggtgctcatccagatcgagatcgagtctgcggcaacgatccactgcttgaccgagtcggcaaaaataacatggaagttcggccgctttttcgccagcgcctccagcgcgggggagttccactcgctggggtggcggcggtagacaagctcgacctcggggtgctggcccaaatattcatcgaaccagcgcagtgtttcctgcattgagatgcggtttgttttggcaaagccggtaaagtcggtgcctgccattttggaaagctcggctacctcctcctcgctcatgctggcatagccgaagcttgagatatacaggtgcagctgcttttccgggtcgaggccgaactccctgcacagcgccgccttatccttgaagtatccgttgaactccgggcgcagaaagtccatcatgacggcgccggtcacgggggtgtttttggcctccatgccgtgggcctgcaggcgggcggcggtgcgcgtgccccagcaggtctgcacacagcgcttggcattgccgttcatgttgaaccagtcgccctcctcctgcgtgtcggagagcatctgctcccagtggaggttgacgatcttgttgcagcgcccgatgttgttgtacacatggctgttgatggcctcgttgtcgtacatgcagctggccaccagcacctccggcttgtccttgccgaagaaccgcagccgcttggggtcaagcagctggcggatctcggcggtatagccgcgccgctccagttccagcttgagcaaaaggtcgctctcatactcgcggacggtgtgttcgtataaaatcaggaaatctaatgccattgatagctactcccatgcaatgtcggctgtaggggcggatgccctttttcgcgtgctgcagggcggggtgccctcaccccgccgcggcggcatggggcatgccgccctacatgtcaacctgtaatatcgtcaaacagctctttcgtccaaagcggcaggccgtatttttcatcaaggtggaaaccgtcaaaaaactgcgtgtcatcgtcattgatgcagctgccgccccactcgtagtccagcagggtaaagccgtagctgtcggcccatgtgcgcagcgcgggcagcacttcatcttccatcgcatcgctgatgccgaaggcatcgcagacctcggtgcgcacattttccgccatcggcggcaaaaccacgatgagccgcacaccctcggcctgacagcgctcggccaaagcgcgcaggcgctcaagctgctcggtgttgagcgaccagtctctgcagcgcggggtgatggtggcggtgtagtcgtacaggcggcggtgcagcggcagcaccgtgccgtcatcggccagataatcgctctcggtccagtcgccggactcgatcgtatcgggtgtgccgcgcagcgtgtccatcgccacggtcagggcgtttacattgtactcaaggttaaagcagtaggcgaggggattgttcagcgtctcctccagcgcggcaaagcggtcggtgttgtacccggcgttcagcgtatagaacgaaacctccgccagcagggtatcgacctcatgactggagttgagtatatagtccgccagatcaagcgtttccttgagcgaggcaccgccgaacgcaaggttctgccacggctgcccggtcaggctgttgaccagctgcatatcaaaatgggcaaggcggctgtcccctaagatcaaatttgtgcccggctcctgctggtaggcgcgcacccgcgccaccggctggctggacgaggcggaggccttcagcccgaagtagttgttgggctcaaacgcaacaaagaacgcgaaccaaagaaccacagggatcgccagaagcgccatttttttgagaatgtttttcatgggccaagcagcctcctttcgttagaatggcttccccctgcgggggaagctgtcagcggctccgcccgctgactgatgaggggcgacggcaccgatacaacccttaaatgggtggttgcgggaagcccgcccctcattcggcgccgcggcgccaccttccccccctggggggaaggcttggagttaaaaccccgcatacatgccgaagccggagctgccgaagccgccgctctgcatgatatagccgatcagcagcgcaatcaccagcgcataatagacagcccagcggtgcttttctttggcgaggcagatctcggcaggcttgttcttgaacgcaaacgcccggcgggcgtccagataaaacgccagtgccagcaccagcaccgtgaaggcgtagtacgcggccaccatgatggcgttggcgtaaaagccgttggacgcggcggcgtacagctcggccgcaaaccgcgcgggcgcccagttaaggaaacagccgcccagataccggaacgcatcgcccacggtcagcggcgcggcggcaggggaggaccccacccggaaaaagaccatgctcacgcaccacagcgcaaacacaccggcgcgcttggcccactgcacgcgggcgggggccttctttttgggcttgccgaggcggcggtgcagcaattcctcacccaagcggtagcaggcctgcaaaagaccccacaccacaaagggcagcgtattgccgtgccagaagcccgacacaaaaaacaccgtgaatacgcagacctcggcgggcaggcggctgagcctgccgtgcgttgcgcccgaaacatcggcccacgccagcggcataaagagatagtcctgcagccatgacgaaaagctgatgtgccagcggctccagaagccggaaaagtttgtggcaaaaaacggcgttttgaagttttccggcagggtcaggccgagcagcagccccaccgcgcgggcaacctcagaatagccggagaagttgaaatacagctggaaggtataaaacacagcggccagcaccagcatggggccgccgtagctgccgtagtgggggaacacctcgtccaccagcaggcccagcacatcgctgacagccaccagcttaaaaaggcccagcgccagcagccgcagcgcctgcacggtgcgggcggcgtcaaagcgatgctcggccttgagctggggcagcagcgccccggcacggcagatcggcccctgcgtcacagtggcaaaaaagttcagaaacagcgcaaagtcgatgaagcttgtctcgacctcgcagtcgccgcgcgcggcgtcgatcaggtaggagatagccgcaaaggtgtaaaagctgatgcccagcggcatagccacggcctgccagccgccgtccgccgcaaacgcgccgttgtatttgaagaaggcaaggatcgccagcagcccgccaacgccgaggcgcagcgctgccgttttatgcacgccgccccacgccgccagcccgcggccgcacaggtaggtgaacaccgcaaccgcgatggtcacgggcagcatggctggcatggccagcgcgtagaacacccagctggcccccagcagaaaaacgctttgcagccgctgcggcaggtgcagatacaccacggccaccaccagcaaaaagccgaagaacccgaaactctgcaggctcatggccgcacctcccaatatactatcagtaataatccattatacatgatttgacgcaataccgcaagggcgatttgcgcccccctgcggcgcgcggcgggcggtaaaaaaataaatttggtcatgcagcagaaagtgtgctataatacagccaatgcaagcagcaggagggaaaataccatgcagcatatccgcaatgcagtccaacaatttttaaagacgcagcccccggcgcggatcatcgccatcggctttgcgctgctgatcttctgcggcgctgcgctgctcatgctgccgttctcggtgcatccgggggtgcatgtcacaccgctggatgcccttttcaccgctaccagcgccgtctgcgtcaccgggctggtcgtggtggacaccggcgacaccttcagcctgttcggccagctggtcatcgcggtgctgatccagatcggcggtctgggcgtggcgtccatcggcatggggctggcccttgtgaccgggcggcgcatcggcctgaagagccgctcccttgtgcgggaggcgctgaatatcgaaagcctgaacggcatggtcaagctcgtgcgggctgtcctgctcatgacggtgctgtgcgaggcagcgggcgcggtgctgagctttccggcctttgcccgggatcacatgccgctgcgggcggtctggctcagtatttttcactcgattgcttcctttaataatgcggggtttgacgcactgggcggcggcaccagcctgatcccctaccgggatgatttgctgctgaacatcgtcaccgatgcgctcgtcatcgtgggcggcatcggctttatggtcatcctcgatgtcggccgttgccgcggcaatttccgcaaaatgagctttcacaccaaggtcgtgctttccaccacggcggtgctgctcttcggcggcatggcgcttttgcagctgaccgacggccttggctggatgacggcgtttttccagagcatgacggcccgcacggcgggcttctgcacggtggatttcagcaccctgagcaacgcgggcctgctggtcattatgctgctgatgtttatcggcgcatcgccggggtccacgggcggcggcatcaagacgaccaccttttttgtgctgatgcagcaggtgcggtcgatcttctccaagcggcggctcggcgcattccaccgccgcctgccggacgctgcgctgtccaaggctgcgaccatcaccctgatgggaatcattgttgttctgggcggcaccttcggcctctgcatccttgagccggagacggattttgtccggctgctgtttgagcagatctcggcctacagcacatcagggctttccaccggcatcacggcggggctttgcgccggcagccgggtgctgctgatccttaccatgttcatcggccgcgtgggtgcggtgacgctgctctccctctgggttgagcgccccgagcccacctcccgctataccgaagaagctatcacgattgggtaaatacgaagccgcaaggcaaccaccgtaggggcggattccatatccgcccgtgcccgcctgccacaggcacgactccgcgggcgcatatagaatgcgcccctacatactctgccgcccggcgcggcgcagaaagggtacacatatgtttgataaaatgaaaaattccaccgaaagctacggtgtcatcggcctgggccgctttggcactgcactggtaaaaacgctgtcggacgccggcaaggaggtcatcgccgttgacaaggacgaggccaaggtcaaggcggtgcgcggctggactgattacgcctttgtcgttgacgagctgaacgaggccgcgctcaaggagaccggcatgcagaactgcggcaccgtcacgatctgcatcggtgagcggatcgacatcagcatcctgacaacgatgcttgtcaccaagctcggtgtgccgcatgtgatctccaaggcggccagcgaggtacacggcgaggtcctcaagcggctgggggccgaggtcgtctacccggaggccgacatggccgtgcgcatcggcaagcggctgatctcaggcaacctgctggactatgtcgcactgggggacggtgtcgaggtgcgccgcatcgctgtgggcggcaaaatgctgggcaagagtgtgcgggagcttgacctgcgcaaggtctacggcatcaatgtcatcgcggtggagcatgcccaccagaccaatgttgagttctccgcagactatacctttaaggacggcgatgtcatggccgtgatcggcaaggtcaccaagatcgcccggtttgagaaggagatgtgaggctgaaggatgaacggcatcctcccagaaggctgttctttcttttgccaacaaaagaaagaaccaaagaaaattgccgctgttgcgacgcagcggacccgcgccttaggggctgcacgcccctaagaaccccaataaggaagtcggaaggcccattggctacgcgaacgcagtattactgttcgcgcttaacgccaacgggccttcctccacttttgagtcgggtgttcccccgaacccccgcagtgggaatgggatgtgcgtaggggcggggctctgctccgcccgcgccattatagccgctttcccttattcatccctcttgttaaaaaactaaccgcacggattttgcgctttttgccttgcaatccgccgcgcaatgcggtacacttaatctaacgaattacggcaaaaacaggaggacttccaaatggagcacagcaatccgatcctgatgggcaacaacagcccgcagaaattcatcaccatcggcgaggtgatgctgcgactgaccccgccgaactatgaaaagatccgcatgacctccacctttgaggccagctacggcggcagtgaggccaacattgcgctggcactggccaaccttggggtggattccaccttcttcagcgtggtgcccaacaactcgctgggcaaaagcgccgtgcgctggctgcgctgcaacgatgtacactgcacgccgatgatcctctccaccaaggaggagacccccagccatcgtctgggcacctattatcttgagaccggctacggcatccgccccagcaaggtcatctacgaccgtatgcacagtgccctgaccgagtatgacctgagcaaggtcgatctcgatgtactgtttgacggctttgactggctgcacctgtccggcatcaccccggcgctgaaccgcaactgcgccgactttatcctgcgctgcctcaagaccgccaaggagaagggcctgaccgtcagctttgacggcaatttccgttccaccctctggtcttgggaggaggcccgcgactactgcacccagtgcctgccctatgtggatgtgctgttcggcatcgagccgtaccacctgtggaaggatgacgagaaccacgccaagggcgactggaaggacggcgtccccctgcagcccagctatgagcagcaggatgagatcttccagcattttatcgaccgttaccccaacctcaagtgcattgcccgccatgtgcgctacgcccattccggcagtgagaacagcctcaaggccttcctctggtatgaggggcatacctttgagtccaagcttttcaccttcaacatcctcgaccgcgtgggcggcggcgatgcctttgccagcggcctgatctacgccatgatgcacgattacaagccgatggatatggtcaactttgcagtggcgtccagcgccatcaagcacaccatccacggcgatgcgaacatcaccgacgatgtggacagcatccgcaacctgatgaatatgaactacgatatcaaacggtaaatcgtatataaaacgcgccgtctcgggtctggggcggcgcgcttttgtttggaaagccttccccctcgggggaaggtgtctgcggcccccgaccgcagacggatgaggggcggcgtttccgtgattgcccgggaatgggctgccgcggaaagtccgcccctcgtcagtccgctttgcggacggcttccccctcgggcggtaagccttttggcagcagctccgcattcagcccggccccgataaacagcagattgatgatcacatacagccacaggatcagcaggatcaccgccgtcagggagccgtagatatacgaccgccgccagaaatgcgcgatataaaaggaaaacacccgcgaaaaaatcagccacccggccgtggcaaagatcgtgcccggcagctggctgcgcagcgtgcgccgcccgcccggcacataggtgtagatcagcagcagcagcacaaaaagcagcaggatcgtcacgaaccggccgatgtcggccacccgccgcagatgatgcagcaccgctgcataatgccggataaacggcagcgtatcggcaaaatgcgcaaacagcgaccgcataccctgcagggccagcatgacgagcagcaaaagctcaaatacaaaggtgtacccgatggcgagcagccggttcagaaaggtgcggcgggagccgggcgtcagccgctgcagccccacctgcagcgcgctcacaccgccggacgccgagacgatggtggtcagcacggccagcgaggccacaaactgggccgactggccgctcaggctctgcaaaagctgcacggcggcggcctgaatctcggggatcgggggcagaaaatccgccagcagctcggccacaccctccaccgaaaaggcggggatcagattgacaagcagcagcacccacatcaaaagcggaaaggacgctgtgagcaaaaacagtgtggccgacccggcgtagaccgtcatatccagtgccagatagcggcgcagcacggccagggcggtgtttgtccaacgggtcagcttcggcttcatggcaggctccttgtctgtgcaggcgtttttttgatatatagtgcattatagcggattccgctgcggaacgcaatgttcatacggcggattttgtttgggacgggccttagaattatgcggtattgcccttgtgcgattgcaaaaaatgtggtaaaataacattgattctttaatgataaagactgccaacaaaattgcgtcttgacgctgaaaaaatccgggggggggggg

SEQ ID NO: 14178 - DNA, 2693 bp, Unknown
  gut microbiota DNA sequence
cagggccgttgggagcgctgcgcccgccactgccgttccatgcagcggcggtatgcactgtgctgtgacgaaaaatttgtctacggactggactacgccgaggtcattgagctgatggagctgtggctgtactgggcggcgctgcaggacctgtacgccctgcccggcacctatgagggcggggcctttgccgctgcggaaaagacgcttgccgcctttatagacgagggggaggctgcggcccagcggcagagggcagctgatacctaccgcactttccggcgggaatagtgccgtacacagaaattttacacccctgctgcggcaaggcagttaaaaatatatcaaaaacacttgcgcaaaaggttttttgtgcgtataatagaagaaaccccttggggcgcggtgcgccctgccaaaaatgtgaaacataccgagaggagcttttactatgggtttgggtaaaaagaccattgacgatgagaactacgccggcaagcgcgtgctggttcgctgcgacttcaatgtcccgatgaaggacggcgttatcaccaacgataaccgcatcaatgccgcactgccgacgatcaagaagctgatcaacgacggcgctaaggtcatcctgtgcagccatctgggcaagccgaagaacggccccgaggccaagttcagcttggcccccgttgctgtgcgcctgagcgagaagctgggccagcccgttgtctttgccgatgatgacaatgttgtcggcgagaatgccaaggctgccgttgccaccatgaacaatggcgatgtcgttctgctgcagaacacccgcttccgcaaggaggagaccaagaacctgcctgagttcagcgaggagctggccagcctggccgacgcttatgtcgatgacgccttcggctcctgccaccgcgcccactgctccaccgccggtgtgaccgactatgtcaaggataccgctgtcggctacctgatggagaaggaaattaagtacctcggcaacgccgtgaacgatcccgagcgtcccttcaccgccattctgggcggcgccaaggtcgctgataagctgaacgtcatctccaacctgctcgagaaggtcgataccctgatcatcggcggcggcatggcctacaccttcctgaaggcgcagggctatgagatcggcaagagcctgtgcgatgactccaagctggattactgcaaggagatgatggccaaggcacaggagaagggcgtcaagctgctgctgcctgttgacgctgcctgcatcaaggacttccccgatcccattgatgcccccatcgagaccgtgatcgtcctcaccaccgctatccccgccgacatggaaggctgcgacatcggccccgagaccatgaagctgtttgctgacgccgtcaaggccagcaagaccgttgtctggaacggccccatgggcgtgtttgagaacccgaccctcgctgccggcacgctggctgttgccaaggccatggcagagagcgatgccaccaccgtcatcggcggcggcgactccgctgcggctgtccagcagatgggtctgggcgacaagatgacccacatctccaccggcggcggcgcttctctcgagtacctcgagggcaaggagctgcccggcattgccgtcatccagaaggcctgattttttaagaaacccgcagagcgcggcggcaaagccgccgcgctttttatgtaaaggcttccccctcgagggggaagctgtcgccgcaggcgactgatgagggtcgagtttgccatattatcccgttgacgggtcatatccgcacacccgcccctcatccggcgcttcgcaccaccttcccccgcgggggaaggcttattatggaaggagtaaatttaccatggataaacagaatcgtaaagctatcatcgccggcaactggaagatgaacaagaccgctaccgaggccaaggccctcatcaacgagctgatccccgctgtcaaggacgctgcctgtgaggtcgtcatctgcgttcccttcaccgatctcgtcactgctgtcgagatgaccaagggcaccaacatccatgtcggcgccgagaatgtccacttcgagaagtccggcgccttcaccggtgagatcagcgccgatatgctgaccgacctcggcgttgagtatgtcgttatcggccacagcgagcgccgccagtattttgccgagaccaacgagaccgtcaacaagcgcaccaaggcggccttggccggcggcctcaagcccatcatctgcgttggcgagagcctcgaccagcgtgagcagggcgtgaccgaggagctggtccgcctgcaggtcaagatcgccctgaacggcgtcactgctgacgagctgaagaatgtcgtcatcgcctacgagcccatctgggccatcggcaccggcaagaccgctaccgcggatcaggccgaggaggtctgcgccgctatccgcaaggtcgtcggcgagctgtacggcgaggacgctgccaagggcctgaccgttcagtacggcggtagcatgaacccgaagaacgccgaggagctgctgggcaagcccgatgttgacggcggcctgatcggcggcgcttccctgaaggccgaccagtttgccgtgatcgttgacgctgccaccaagggctgattgcagcaaaggcttccccttgggggaagctgtccgcgcagc

SEQ ID NO: 14179 - DNA, 117128 bp, Unknown
  gut microbiota DNA sequence
ttcttcaacaaactgcataacggcgtatccgtgttttggtgtataaagagagagtaaaatataaaaggtcacttctgtaagtgcgccactttttgcattgtctctcatagtccaacctccgtattacggttactgtaataaatatatcactaaccgtaatatgagtcaagcaggttcaaggaaattatttaaggggcatgaaaatggagcagcaacattttcgtgttgctgctcaactttcatacagaatagaggggttcgttgttctcattttgtgttgttgcttttttaccgtatatgagcgtttttgcttgggtatgcagcacggcagacaggcgtttacgctaaggctgcagaggcggtgattttacagtacccccagtcccgtcagcagcgttttgatgccgatcaaaatcagaacgataccgccgatgcgctcagcgggggcgcggtatttgtcaccgaacatcgcgcctgccttgacgccgacagcggacagcaggcaggtgatgatgccgataagcccggcagcaggcaggatatccacctgcatggcggcaaagctgacgccgacagcaaaggcgtcaatgctggtggcaatcgccagcggcagcatcgccttggcggaatagtcgtcgtccagctgctcatctccggcaaagctctccttgaccatgttggcaccgatgagcgccagcagcacaaaggcaatccaggggccgaatttcgtcagcaccacggcaaagcggtcacccagaaaataccccagcgtgggcatcaggaactggaagccgccgaaccagacgccgcagatcagcgcgtgggacaggctgaccttgcgcacggacagccccttgcagatggaaaccgcgaaggcatccatagaaaggctgatggcaatcagaatcaggtcaaacaaagtcataattttttcctccgttttcagggaataaaaaaagacctatctgccccgtttgcgggcagataagtctcgtcttttaaagtaaagccagagccgcaaggctcattgtgttggcagaactgcgcggcggctgctccaccccgcgctgactactcccttattgcttcaaatattgtagcatgtggaagaattcttgtcaatgcgttagaaataactaatccttgcgataaggcttccccctcgggggaaggcaaggaactttaaccatcttgcatattccaccattttagagtacaatatacacaaatctgcaatctgtatccgggggaatcaccatgcaatataaaattctggcactggaccttgacggcacactgaccaacacggataaaatcattacgccgcgcaccaaagcggccctgcaggcggcggcgcaaaggggtgtctgtatcgtgctggccagcggccgtcccacggtcggcattgagccgctggctaaggagctggagctggaaaaatacggcggctgtatcctgagctacaacggcggtaagatcatcgactgcaagaccggggaaacgcttgtgcagtacgccttcccggcacagctcatcgggccggtctgcaccttcagccggtattggaatgtcgtgccgctgacctatgaccgaaacggcatcgtgaccgaggaccccgccagcccctatgtgcaggaggaggctcgcatcaatcgtattcccgtgcggcaggttgagaacctccctgctgaggtgacctaccccatcaacaagctgctgctgaccggtgacccggcggatatcccccatgtcgaggagctgatgcagcaggaatttgccggcaagctgtctatctgccgcagccagcccttctttattgaaacgatgccgctgggtgtgggcaaggatacctcgctggagatcctgctgcgtgccaaggggctgacccccgccaacctgatggcctgcggtgacggctggaatgacctgccgatgatccgtctggcgggtctgggcgtggccatgggcaatgcacaggccccggtcaaggccgcagcggattggctgaccgccgacaacgaccatgacggcgtgggccttgcggtcgagaagtttattttagaggagaactgacctgtgaatctgatcgttttcgacttggaatggaacatcggctatcagccgaaaaccttcctctatcacggtgcagagctgacgctgcgcggtgaaatcattcagattggtgcggtccgcatcaatgcgcgcggcgatgtactggatacctttgaggtaaacctcaggccgcgcatcttccgcaagctgcagcaccatatcgccaaggtcaccggcctgtcccaaggggatctggacgcgggtctgccgatgcgggagggcctgcagaaattccttgactgggccgggccggacgccgagctggccgagtggggtcttgatgatgtgccggtgctgaagcagaatctctttctggtcgggctggacgaaaactggccggaccgctggtatgatctgcagcggatctttctgcaggcctacccccgcagggagggcgagggcctgacgctggaaagcgtggttgaccggctgggcatccccaaggtggagcccttccacaatgcgctcgatgatgcgctgtacacggccaagatctgccgcaagctgccgttggccgagggacttgccacctacccgacggaggaggagctgctgaccgaggcactgctcggcagtgaaaagacaggctgtgatgtgcagctgttcatgaaccggctggagcatgatgactaccgcaatctgccggagctgtacaaggcaaactgccccaagtgcggcgcaccgctgacgaatgacgaggtatggctcaagcgcggcaacacggggtatttcacccgcagcagctgcccctattgcgggcactggtatctgcgcttcaagctgagccgccgtgacggcctgcattggagcttcggccgctgcctggatgctgccaccccggagtatgacgccaaatgggataagcagaaggccgccctgttagagcgcacaaagcgcaagcaggaacgggaaaaccgcacataacacagaaaaggctccctgcggggagcctttttgctttccggcttgacaaaagcggaaaactgcactatgattgatgaaaacgaaacatggtttttacaggattgcaactaaagcaacatatgaggtgcagaatggacacagaacgctggcagattttattgaaagcaatcgaccgcggcagcctgcgcgctgcggcggaggagatgggctttaccgtttccggcatcagccgcagcgtggcaacgctggagaaggaacttggcttttcattgctctaccgcgccaaaagcggcgtgcagcccaccgaggagtgccgccagctgctgccgtccgtgcgtgagctgctctttgcgcaggagcgtctggagcagatcgcggccaaggtgcgcggcgcggattgcggcacgatcgttatcggcacggcatacaactgctattatgagtgggtcacccagatgatggcggccttccgcacccggcatcccggcgtggtcatcaagatcgtgaacggcaccagcagcgagctggctgagatgctgctcgatcaccgcaccgacttctgcctgatcagccaccgtgacgatttgccggtctggctgcccatccggcaggatgagctgatggtcctgctgcccaagagtcacccgctggccgcgcaggaggctatcccggtagagaaactgaaaaccgagcccttcatcgagagctaccccggcatggagacggacatcaccctgattttcgacaagatcaaggcgcgccccgatgcccggtattccacgatggatattacggctacctacgccatggtctcggcggggctgggcatcagcgtcaacaatgccatcaaccaccagccgggctaccccggcgtggtcgaacgcccgatggcgccccaccagatgatggaaatcggccttgcctgcggggaaaatctcgcccccgctgcgcatgcatttttggagttcgtcaaaacacggctgccggaataagaatgccttcccccgcgggcgggggaaggtggccgaggccccgcccgaggccggatgagggggcgggtatatgttatatcccgccaacggatgatggccgtacacctgcccctcatcagtcagcggtcagggccgctgacagcttcccccaagggggaagccaacaaaacaaaaaccgccgtgcaaatccatgcacggcggtatatttttgcctcaatatgtgataataatgccctgatcctgtgcgtagaagctgcacagaccggagcaggggacgatgcgcaccggtgcgccgggccacttggcctcgatgccgtggtgcagcagctgggcggcggtttggttgccgcactcgctgatcaataccgggtgtacgccgtcatagccgtcctcgaccatctgctcaaggatctttgccagcacgcgggtctcgccgcgggtcttgaaatagaaatcaatgcgcccgtcggatgtgcggcggcccagcacgcgcatattcaggcggcctgcaataaagccgaccactttgctgacgcggccgtttttggccagattgtcaaagctggccagagcaaacaggatatgggtgctttcggcaaacttctgcagcgcaaagcagatgtcctcaaaggtctggttttcgccaatcagcttgttggcaagctcggctgcaccggccagcgcgccggagcagctcagtgtatccagcacgaagatgtttttctcgggatgctcctccagcaccatctcacgcgcagcaatggcggcgttgtagctgccggacaggttgctgctgatcgtgaaggcaaagacattgtctgccagcaggaaatactcggcccattcctccgggctggggcaggcggtggtactggcaccgttgtagtcggtcatggcctgcagcatctgccgggtgttcagcgtgggcaggtcgacatattcccgctcgccaacgcgaatcttaaacggtgcaagggcaaactgcacaccgggtgcagggttttgcagctcgcggatctcacaggagctgtcgcatacgatcatccatgccatggggcaggacctccgttctgtgactgatggtcacgcatactcttacttatattataggggcagcacgggggtgcgtcaagcttatttttgctacaattccggtttacaaatttgtaaaacattttcgcggctcttgtgtgcggggactttgtggcgtataataacagtgtattgttttcaggaaaagagaagcgaggcttttatggctgatttttatacctaccgcagtgaggttgccggtaagcggcgcaagcggaaattgtttctggccctgatcgtgcttctggcgctgctctgcgccggggccgggttttactggttccgtgacaacggcacccctgcaccgcaggaggcagacagcgccgcggcacagccgactgcaacggcggaatctacgatggcccctacggccgcaccgacccagcagcccatcgccgagccgcagcgccttgtgcagagcgtggataccgccgtgtgggacaagtccgagtcggtcgcccagactatagatacggagtttctgaacaccgaccaccggatggtggcggttccgatgctgggcacggtgacgaaggactacttcaacaccgtgacctttgcgggggacagcattgcctccggcctcggcatctatgacacaggctaccacaatgcgcactatgcgacctatgtcagcgcgggcgtgcagacctttgtcaacaatgtcagcgtcaagaacgctgtcaccggcgcgaccgagaccccgatggagaccattgcggccagccagccggactatctgtatattctggtcggcaccaacaatctggttgtgcagggcagtgaggacagcttcattgcctactatgagcgtctgatcgacatgctgcgcgagcagctcaaccccggcgtcatcctttatatccaggccatccccggtgtgcaggagacggttgtggcttccaagccggggctggacaaccagcgcatcgccaccgtcaacgatctgctggccaatatggcgctgcgcaagggctgttactatgttaatatccgggaggccctgaccaacacagcggacggcagccagatcgatgactatgccaccaaggacggtgtgcattttaatgcggcgggctatcatgcatgggccgagtatctggccacccataccgtctggaaccgccgcagcgtgtacagcggcgagaacccttattatatctacggcgcataaagaagtattttgtacaaatcccctgcagggtgtaaaaaacaccctacaggggaattttttgtacagtcgtacgaaaaacacctcgatatatgtcgaacttgtacaaaacgaacaggcaacatacgaaaattttagcggaatattacacaaaaacccttgaaattcccgcatgaaacatgtaatatagatacagagatcatacaaagtcggtgcattgtacccggtacagcaccgccaaaaggggagattatgttgaaacagcgcaaagaaacgccaaaaagctccgatctgcccatttatctgttcaaacagggcaacaatcaggaggcttaccgctactttggcgcccatctgtgtgagcagaacggggaggccggcgtggtgttccgcgtctgggcaccgcatgccaaggccgtttccattgtgggcgacttcaacagctggacgcccggcgagcatccgatggagatggtaacggacggcatctgggagcgctttgtacccggcatcaagcagtttgatgtttacaaatattgcatcaccaccccggcggatgagctggtctataaggccgatccgtatgccttccataccgagacccgcccctccaacggcagcaaggtttatgacattgagggctatgaatggggtgatgccgcctggatcaaggatgagcaaaagcgggatgtgatcaacagcccgatgtccatctatgagctgcaggtcggcagctggaagatgaaggaccccgaaaacggcgtcccgtacaactacgccgagctggccgaggagctgatcccgtacatcaaggagatgggctacacccatgtggagctgctgcccatcaccgaatatccgtttgacggcagctggggctatcaggttacgggctattttgcgcccaccagccggtacggtacccccaaggatttcatgactctggtggataagctgcatcaggcggacatcggcgtcattctggattgggtccctgcccacttcccgaaggacggctacggcttgtacatgtttgacggcgccccctgctatgaagaccccaacccccgccgcggtgagcacaaggaatggggcacgatggtctttaactacggcatgaaggaggtcgagagcttcctgctgtcgagcgccatgttctgggtagatcgctatcatgtggacggtctgcgcgtggacgccgtggccagtatgctctacctcgactacaaccgcaaggacggcgaatgggagcagaatgtcaagggcggcaaggaaaatctggaggccatcgccttcctgcaaaagctgaataccgccattctgggccggtatccccataaaatgatgatcgccgaggaatccaccgcttggccgctggtcacaaagccggctgccgatgggggactgggcttcaacttcaagtggaacatgggctggatgaacgacatgctcagctacatgaagaccgacccgctcttccgcgcgggcaaccacggcaaggtcaccttcagcttcttctatgccttcagcgagaattttgtgctgcccatcagccacgatgaggtcgtacacggcaagtgcagccttttgaacaagatgcccggcgattatgaggaaaagttcgcaaacctgcgcaccttcttcggctatatgatggcccaccccggcaagaagctgctctttatggggcaggacttcggccagtttatcgagtgggacgagaaaaagcagctggactggatgctgctgggctatgacaagcaccgcgagctgcagggctatgtcaaggatctgaaccacttctaccgcgaaacgcccgccctgtggcaggtggattacagctgggagggcttccagtggatcgtgccggatgacagcaagcagagcgtgatcgccttcctgcgccgtgatgcggcagggaagatgctccttgttgtctgcaacttcaaccccgtgctccgcaaggattatcagatgggcgtgccgaaccccggcagctacaaggaaatcctcaactccgacgataagaagtacggcggctccggtgtcaccaacggcacggtcaagagcgagaaaggcccgatgcatggctttgatcagcatatttcgctgacactgccgccgatgtccaccctctatctcagtgtgcccgcagcccgcaagccgcggaccaagaaggcggatgcggctgccgaaaaggcagcagagcctgcaaagcccgctgccaaaaaggcaagtaaagccactgcgaaggccgctgcccctgcagcaccggccaagacggaggcggcccccaaacgccggggacgcccgcccaaagccaaaacgacggtatgaccgcctttggataaatagcattaccgcaaaatctctgccctgcgggcctaggcatcgcagcaggcggcagccggaattatgcggtaatgtcataaagttaaaaacggcatacgccgaaatttaaggggagaaatcttatggctaaagaaatgatcgcaatgatcctggcaggcggccaaggctcacgcctctatgcgctgacccaaaagctcgccaagccggccgttccgtttggcggaaaatatcgtatcatcgatttcccgctctccaactgtgtcaactctgacattgatactgtcggcatcctgacccagtatcagccgcttgttttgaatgagtatatcggcaatggccagccctgggacctggaccgtctgcacggcggcgtacatgtcctgccgccctaccagcaggccagcggttctgactggtacaagggcactgccaacgccatctatcagaacctgtccttcattgaccgctatgatcccaagtatgtcatcatcctgtccggcgaccagatctgcaagcaggattactctgacttcctgcgcttccacaaggaaaagaacgcagagttctccgttgccgtcatggaggtgccatggagcgaggcttcccgcttcggcctgatggtcactgacgaggatgaccgcatcaacgaattccaagagaagccgaagaacccgaagtccaatctggcttccatgggtatctacatcttcaactgggatatcctgaagaagtacctgaccgaggatgaggctgaccccaactccgagaacgatttcggcaagaatgtcatccccaacctgctgaaggacggccgccgtatgtatgcctaccacttcagcggctactggaaggatgtcggcaccatcggcagcctgtggcaggccaacatggaggtgctggaccccaagcattccggcatcaacctgttcgatgaaaactggaagatttattcccgcaatactggccgtccctgccagcagatcggcggcgatgccaccatcgtcaattcgatgatctccgagggctgcaaggtcaacggcacggtcaataactccatcctgttccccggcgccgttgtggaaaagggtgccaccgttgaggcagccgttgttatgggcggcactgtcattaaggcgggtgcatccgtcaagcactgcatcgtggcggagaatgtcacgatcgaggagggcgccaccgtcggtgccatgccggagggcggcctgaacattgccgagcccggtgatgtggctaccgttggttccggcgttgtcatcggcaagggtgcaacggtcggccccaaggcaatggtttccagcgatgtaaaggatggtgaggaacaatggtaaacagcaatgtaaacgctctcggcgtcattttcgccaacacctatgataacctcgttcccgaactggtggcggagcgctcgatggcctccatccccttcggcggacgctaccgcctgatcgacttcacgctgtccagcatggccaacgccggcatcgacaatgtgtctgtcattgtgcgtaaaaactaccactctctgatggaccacctcggcgcaggccgtgagtgggacctgacccgcaagcgcggcggtctgaacatcgtgcctccctttgcagagcgcagcgtcaagctgtactccggccgtgtggacgctctggacagcatcttgaactggctcgaggatcagaaggagcgctatgtcatcctgtccgactcctacattgccatgaactttgacttcggcaagctggtggacgcccatgtcaagtccggcgccgatgtcacgatggtttacaaccgcgcccccatccctgagggtgcccgcagcgacaactacaccatccgcaccgatgagaacggccgcgtgaccgagatcctctccaatgactaccgcatgggcgagcagaaccttgccatgaacatctatgtcattgagcgcgagagcctgatccacctgatccacgatgcctccgtccgcggtcttgtctactttgagcgcgacattctggcccgcaacctcaagctgttgaatgtccagtcctatgagtttgaggggtatgcggcccgcatctccgacatgaagagctacttcgatgagaatatgcgcctgctggcggacggcagcatgaacgcactgttcggaccggcccccatctacaccaagattcgtgacgataacccgacccgttatctggagggcagctccgtcaagaacagcctgctggcggacggctgcgttatcgagggcactgttgagaacagtgtgctgttccgcggctgcaagatcaagaagggcgctgtcatcaagaactgcgtgctgatgcaggataccgtggtcgagcccaacgccaatgttgagtatgtcgtgaccgacaagaatgtccacatcacggaggacaagaggcttgccggcaccgacaccttcccggtatttattgctaaaaaccacagcgtataaccggtacgccatccgcaccggcggtccgccgccggtgttgggggagaataacgctcatagaggtcgaactccctctccccggagccggctttgatgagagggcgggggagagcagaagctttccctcgccctcattttgtgaaattcgcacggaggtgcttatgaaaattctgtatgcagccagcgaggctgctccgtttgccaagtccggcggtctggccgatgttgcgggcgctctgcccaaggcgctggtccgcgatggcattgacgcccgcgtggttatgccgctgtacggtgatctgaaattcaaggatacgctgacctatgtcaccaacttcagcgtgccggtgggctggcgcagccagtactgcggtctgttcaaggccgagcgcgacggcgtggtctactacttcattgataatgagtattacttcaagcgcagcggcctgtacggcttctacgatgacggcgagcgcttcgccttcttctcccgcgcgattctggagatgctgttctacactgactttgagccggacatcatcaactgcaacgactggcagaccgcgctgactccggtttatctgaacctgtactaccgccatctggataagttcagccgcatcaagacggtctttaccatccacaacatcgcctatcagggcaagtatggtctggatattctggaggatacctgcggcatcggtgcccgcgatgcccatgtggttgagtatgacggctgcgccaacttcatgaagggcgcgatcgagtgtgccgacaaggtgacaaccgtcagccccacctacgcacaggagattctggacccgtggttcagccatggtctggatggcctgctgcgtcagaagcagtataagctgtgcggcatcctcaatggcattgatgtggatgttttcaaccccgcgaccgatcccgacatcgccaaaaactacgatgctgagaccttccaggatggaaaggcggcctgcaaggcctacctgcaggacgagtttgggctgcataaggacggcagcccggtcatggccatggttacccgtctggttggccacaagggtgtggatctggttcaggccattgcagagggtctgctgcagcagggcattgagctggtggtcctcggctccggcgaagctcagtacgagaatttcttcaatgagctgtgcgcccgcaatccgggccgtgtcggtgtgtacattggcttcaatgccaagctggcgcaggagatctacgccggtgcggatatgttcctgatgccgtcccgctccgagccctgcggtctggcgcagatggtctcctgccgctacggcacgatccccatcatccgcgagaccggcggcctgaaggactccatccgcgactccggcgatggctacggcaacggcttcacctttgccaactacaatgcccacgagttgtacgaagcctgctggcgtgccaaggagggctactggcagaaggatggctggcccgtgctggtcaagcgcgccatggagtgcgatttcagctggtccaactccgccaagagctacgaaggcctgtacaatgaggtcgtaaatctctggtaatttgcaaataaaatgcggtcgtctgtcaaaaagcaggcggccgcttttttgcgggaaaaatatcactttttttgcgaaaaaacgcttgacatttgccgggcgtttggctataataatacctgtcgtcaggccaccggccaaggcgaaaacaaaatatgcggatgtggcggaactggcagacgcgctagattcaggttctagttcccttaaaagagtgtgggttcaaatcccttcatccgcaccaaagaagtcacctaaaagcgaaagtttttaggtgacttcttttttatctgcgtgatttgctgtattacagccgtaccggagaacgcaacacccggcaggtgcatgcttggcagtattataatgtaagagcaaggcagtatgtccgcaatatcaagaaatatctgctggcggcgctgtataacgcaccggccaccatcaacagctactattctatatccgtacccacaacaccgacttaaagaagcggcgaggcggtatgccagagagaacaacgccgccgacagactgaaataactttttgacatttccatcttatgctggtaaaataattattcggcgtgcggtaaatgcggtacactataccccttataaggagcttttaggtatgcaagaacaacgactgaaaacaaaccttgatacaaacttaatcaaactcattgcaattatttctatgacggtagaccatgttgggggagcctttttcccagaatacccggttttccgctggataggcagaatagcttttccgcttttctgctattgcttaacagtaggtatgttatatacccacgacatcaaaaaatatctgcttcgtttgggagcttttgctttcatctcacagcccttttggattttagcgtttaattcagatgacattgtcggaaatatttttaatctgaatatttttttcactttgatagtgagccttcttgccacgtggggatttaaggagaaaaaatggtggctgtttatagcgggaattattctgttgaacgtagtcaactttgactatgcaatgacagggcttattttgatgatgattttctacttgtgcagaaataagccgtggttaggagcgattatttatacgcttacctacctacccgcgcttaatggatacatggaggatccgcttgcacttaaaattggcggtcatgccataggttttgagattttcgctttgttggcgttaccgtttatctatatccatacaaagtctaatctcaaaatttcaaagtggttcttctacatttattatcccgtacatctttttgcaatttttcttattcaactttttgtttaagaattgcgaaactgcacgccaaaactcaatattgttttacaagggacagccgagaaaatcgactgtccttttcctatgccgacaggcagaaaggagtgaccacccatgacgaaaccaaaagcaaaaacgcttgaagaactgaccgccgagattgaggacggacagaagaaaatccgccagtatgagaacagggaaaaaccttgcggcaaaagctatcccgcgaggaacgccgaataaagcccttaggaactaagggcgcacttatacaccctaaagggtgtgtgcgctctgccgagggcttaatctccgcacagggaactttccccgcgctacgattggcggctttgccgcagacaggggaagctactgtgtgggagccatcttcattcccgatgtgttcccacttccggcaccgcagttgtcggtggatacaaaaaaggcgtagtcgtcaactacgcctcaaactaactcgctgtatgaaaaaagcgagtgttcttaacagcctttcaaatgctgtaagaacactcgccttggtgcggatgaagggatttgaacccacactcttttaagggaactagaacctgaatctagcgcgtctgccagttccgccacatccgcatattttgttttcgtcttggccgttggcctgacgacaggtattattatagccaaacgcccggtaaatgtcaagcgctttttacaaaaaaacaggatttttttatatttttgtgaacaaactcaaaagatgacgctgaatcgacaaagtaatgcggcgcaatacttgcttttgcgccataaactgctataatataaatacaatattctgtacaattcccgccttgtggtgcttacaacgcagggaatatgctgcatgaaatagggaggtaaacgcttatgtggacacgcgaacttttaaaatccaacgccaagcaggcgctgcagggacggtactggcgcagcttttgggtctgccttgtgctgagctttgtcgggctgggcggggccagtgccagcagcggcagcgcggcgcggcagaccgtggataccgccggtggggacaccgcctcgatttatgatatgttcagcaacatcccggataatatgcttgcggcactcgcagtcggtgcgtttattggtgctattatcagcatctgttgggtgctgttcgtcttgtatccgctcaaggtcggccgctgccgctattttatggagagccgccaatccctgaccccggcctccaccgttgtcagcaccttccgccagccctacggcaaccccatcatcgtgcagctgctcaccaacttaaaggtttttctgggtttccttctgctcattgtgccgggaatttattgggactactgctacacgctcgtaccttatctgttggccgaaaatccctacatgtccgccacccgcgccatggagctgagcaaccagatgatggacggcgaaaagtggaattacttcgtcctgcagctgtccttctttggctggctgctgctctgcgcgttcaccttcggcatcggcggcttctttctggagccgtacatgcaggccacctatgcggagttttatgccgctatgcgcagcaaggcgctggctgcaggcatgaccactaccgaggagctgggcggctttgtgcgccacgataccttttgagcttacttaaagaaacgccgcgaaaacgggcagctgcctgtatttcgcggcgttttttgctgtatcggtgcgcaggatttcacacttcttcaaaccattcacgcaattttttcacattttcaaattataatagaaacctaggcatccctgcacaatttctgcactgcagcaatgcccttgaacccaagtgataaaggagagtgcgcactttgattgaggtagagcatctgacaaagcgctacggcggccacactgcggtggaggatatcagcttcaccgtggaggacggctgcatttacgggctgctgggtcccaacggggcaggcaagtccaccacgatgaatatcataaccggctatatttccgccacagacggcaccgtgcggattgacggccatgatattgcagaggaacccgctgaggctaaggcctgcatcggctatctgccggagctgccgccgctctatccggagatgaccacgcgggagtatctgctttttgtggccgagctgaagggcacccgcaaaaaggcagaccgcattgcggccgtagaacatgccgctgcccgcgcgggtctgcaggggatggagcagcggctcatccgcaacctttccaagggctaccgccagcgtgtcggcattgccgccgcgctgctgggcacacccaaggtcatcattctggacgagccgactgtcggccttgaccccgcgcagatgatcgagatccgctccctgatccgggatctgggcaaaacccacacggtcattttgtccagccatattttgagcgaggtgcagtccgtttgtgatcgggtgctgattattgcccatggtaggctggtagcgcagggcacaccggaggagctggccgccagactgaccgcgaagggaaccatcaccgctacggctcaaggcagccgggaggagatccttgcggcggcgggtaccgtgccgggcctgacgaacctgaccgtgaccgaggaaaagggcggcgaggtcagctttactgccgtcagcaccgagggcaccgacctgcgcggtgcgctttcacaggcgttggccggggcaggctgcccggtgctggacctgcgcgccgagacgatgagtctggaggatgtattcctgcagctgaccgaggccccggagacacagcagaccccgcagcaggaccatacaaaggagggtgacgagcaatgacagctattttcaagcgcgaattcaagagctgctttaccggtatgatcggctgggtcattgccgccgtcagccttttctttctgggcctgtactttacaaaccgcaatctgctctatgcttcgtcagatttcgcctcggtgctctacaccatgacgatgatcctgctgttcctgctgccggccatcagcatgcgcagctttgctgaggaacgcaaaaacaagaccgaccagctgcttttgaccagcccggtcagcattccggccattgtggctggtaagtttctggcagagctcgctgtttttgcgctgccgctggcggcagctgtggtgatgccgctgctgctacaggcattcggcacggtgtcgctggtggcggcctacagcgccctgctgggctatctgctgctgggcggcgcctgtctggctgtgggcacatggatctccgctctgactgaaaaccagatactggcctatcttgccaccttcggcgcgctgctggtggcctacctgatgaacggcatccagacgatgttcacgaccggcaacctgctggcgtttattgtctttatgatcgtgctgctggtggcgtctgttctggtgggcgtcatctgcaaacggctggtggcaggcgctgtagtattctgtgcgggcgcggtggtgctgtttgtgctgtttcagctgcgcccggcatggcttttgacggccttcaatgcggtgctgtccgcgctggccctgtttgagccgttcaaggacattgtgggcggtatgttcagtatcccggccattgtctactatctgtcggtcatggggctgttcctctttttgaccgggcaggcgcttgcacgccgccgttggaactgaggaggtacactgagcatgaaaaaacagaatggtatttggcagggcggcagcaagcgcaccctgcacagcggcctgtacgccagtgtgctggcaacggtcgtgctggcggtggttgtgctgctgaatcttgtcgtccgcgcactgcctaccaaatatacgcagtatgacatctccacgaccgcactctttaccttgagcgatacgaccgagaacctgctgcatgagctgaacaccgatgtgaccgcctactatctggccgagagcgggcaggaggacgccaacatcacccgcctgcttgaccgctatgcgggcgagagcagccactttagctggcagcagcgggacccggtgctttacccgacctttgcccagcagtatgacggtgcctctaccggcagtgtcgtgctggtcagcggggaaaacaacaccgtactttcctacaatgatatgtatgagatggaccttgaaagctactacaccaccggcacggcaaactacagctttcaggcggaaaatgccatcacctccggcatcgccaaggtcacccgtaccgaggcttaccagctgtatgagctgaccggccatggggagacggctctgaccagcgatttcaccgagacactgaacaacgccggcgtcacagtgaccgagctgaaccttgtgacgaacggcagcatcccggccgatgccagcgcactgctcatcaatgcgccgggggcagacctgaccgatgccgagacaacgctgctgaacgagtatatcgcaaacggcggcaagctgtttgtgaccaccgattttactaccgcaacgccgaagctggattctgtgctggccgcctgcggcatgaaccgccagcccggtctgctgatcgaaacggacgccgaccattacccctacggttacccgcagacctacctgctgcccacggtggtcaacaatgagatcacggcgggcgtgtcgcagagcatgatggtctacacccccatcgcgcagggaatcaccaccgcagaggacagcgaattcacctttacccggctgctgaccaccggtgatacggcctacgcaatggaaaactacgccactgccgagaccgcccagaaggcggacaccgacccggagggcagctttgccgtggctgttgcggctgagaatgccgcgaccggggcgcgggtcgtctgggtcaactgcccaaacctgctgctgagcagcatcaaccagcaggtgtcgggcggcaatgcgcagctgctgggcagtgccgtcaactggctgaacggcgcgcagaccacagcggtcatcaacgccaagagcatgagcgccgcctcgctgaatgtgccggtctcggcggctgtgccgctgggtgtgctgtttacgctggtgctgcccatcgtctgtctgatcgcgggtgcggtgatttgcgtggtacgccgccgcagataaaggagagccatgaagaacaacgccaaaaaaacaaaaaagctgctgccgctggccgtgctgcttgccgcagctgccctgctgggcatcctgctggcggtgctgacccgcagcaacgctgatgccgtggatacaacgatcccgctgtgcagctttacggcggaggagattgaccggctggcctactccggcaataatacggatgtgaccctgctcaagggcagcacaggggactggatgctggattccgacccggccctgccgctggatcaggcaaaggtcacaagccttgtggagcagtatgccgcgctggcggcgctgcgcaagctggagggcagtgaccttgccgagctgcccgaaaagagcgctgcacctcagatgaccattaccatcggcgcgggggataagagccttgccctgacggtggaccagctgaacaccgttgccgatgtctactatgtctacgacgaaagcggcgccgcgtataccgttatgcgcagcgaccttgcaaccctgagcaagtccccgcgggacctctacaaggcgcagacgctgaccgacaagacgctgagcgatgtggctgccatgcaggtgaacgacctgcagtttacccagacggacggcagctggacgctgaccgatgacccggactatcccgtgagccagagcagcgtcaaaaagatggccgacacgattttgcagatgcagacggcgtggaccgtcactgcgcccgaggccgataccgcctacggtctggacagccccgatgtcacagccgtgctgacctttactgacggcacaagtcttaccgtgcggttcggcaatgcggtggccgccgctgcggacagcagtgacggggacagcctgtgttatcttgccagcgatgccgcaccgaccgttgtgtatgaggtcaacgctgattccaagcttgcctacgcagtgacaaaggaaagcctatacgatgaaacggcgaccgccgagaccgccgccagcgacccggtggcgcagtaccccgtcggcggggaggatgactacgccgacagcctgccggaatgatgatgcaatgcgctgccccgcgccgggcagcgcatttttcttgcccggggccgggaaatatgctactatataatatataacgcgcgatacaaaaggggccgctgtccgctcccccggaaaggtgatattccatgaaaaagcgtttttttctgcccgttctgctggcggcgctctgcgcctgcaatgcggccgtgccgacgcccactccaacgcccgccccggcagcaacaccggctgtagaggcgcagcccgccgatgcgctgacgctggaagaaaaggtcggtcagcttttcatcgtccgcccggatgcactcgacctgagcctttcgcaggaaacgatcaacgatgcgaaggccgatggcgtgaccgctgtgacaaacgatatacgcggggcgctgcagcaataccccgtgggcggcatctgtcagtttggcaaaaacatcgaatcaccgtcccagctggcgcgttttaataaagagctgcaggacgcaagcggcacgccgttgtttatcgcggtggatgaggagggcggtcttatcgcccggcttgcgaacaacgatgcgtttacgctgccccgctacgccagcgctgccgccgtgggcgcaagcggtgaccccgaggatgcccgcgccatggggcagaccatcggcgcttatctgaaggaatacggctttactatggactttgcgcccgatgccgatgtgaacaccaacccggataacccgatcatcggcagccgcgccttctcatccgatgccggtaccgcggctgccatggcggccgctgcggcagacggcctgcggcagaatggtattctgccgaccctcaagcacttccccggccacggtgacaccgccgaggacagccacacagcgctggccgtgacctacaagacgcaggaggagcttgcaaactgcgagctgctgccctttggggcggacaccggcctgcacgccgtcatggtggggcatattgccgcgccgaatgtgacaggcagcaataccccggctaccctctcgccgcagctgatcgcaatgattccgaacgcagaagatacgctgatcatcaccgactcgctggcgatggatgccatcaccgatgcctacacccccggcgaggccgcagtgctggccctgcaggcgggctgtgatgtacttttgatgccaaactccctgccggaggcctacgctgccgtgctggatgccgtacaaaacggcacgatcacgcaagagcgtcttgaccaaagcgtcaataaaatcttgcgctataaagaggtatttgctcatgtctgaaactgtctgggccgttgacggctccttttttgcccagcgcctttccgggattcagcgctattccatcgagctgctcgcagcactcgaccgcattgtgccgcccggccttgtggagatcgtcaccccgcagggggttgagaccccgccgtatgcaaatataaagactgtgcccttcggcacgcacaagggcggtgtatggcagcagctggattatccgcgctatctgaagcagcgcggcgccaaggggcttgccacctgcaatgtcattccgctgttcggctttcggggcattgcggtcgtacacgatgtttgctaccgcgcccgcccggacttctataccgatccgcgcggccggctgagtgcggcatggcaccgcctgcagtatcgccgcattgccaaaaaggccgagcgcattatcacggtgtcggagttctccaaaagcgagatcaccaaatactacggcgtgcctgcgtccaaaatagaggttgtctacaacgcatggcagcagatggagcgcatcgcgcccgatgacagcatctttgcagcccatccgcagctgaaagcgggcgcgtattatttcagcatggcgaatctgctcaagaacaagaacttcccgtgggtgctgcgtgcagccaaggcacggcccgatacggtgtttgccattgcaggtggcggcagccttgcggcccaggcagagcgcctcgggcttgccgatctgccgaatgtgctgtatctgggctatgtgtcggacggtgcggccaaggcgctgatggcccgctgccgtgcatttttgttcccgaccctgtatgagggctttggcatccccccgcttgaggctgccgcctgcggtgcgcccgagatcatcgtcagcgataccccctgcatgcgggaggtctatggccccagtgccgcctatatcgaccttgccgtcaaccacggcgatgtcgatgacgtcaccccggccacggctcccaccgccgcccttctcgaaaaatacagctgggacaggagcgccgaaaggctgctgcaaattctggcaaaataaggatgttatcatgacgaatgaagaggcattaaaaaaattcctgctggacatagactgcttgaatgaattgcttccgtgggcggggaaatttaacctgtttgatgtgcttcgcatttcacgcactgaaatacgtcacagcaatatgctggcgtggcttttgaatgcaaatgaaaaccatggcatgggtgatgcgtatgtaaaagcgctggtgcaaaaactggtggcgaatgatagtgctgggcggtacgatgtgttccaactggcattgatggatttttacagctttacagtacagagggagtggaacaatatagatattttgctcacctccagcgaagaaaaaacactgatagcatttgaaaataaggttgggtcgcatgagcacagtgaccaactgaaccggtatcgaaaaatccatgaaaaagcgtacccggactattgcagaatctatctgtatctgacaccagacggggaattgccgagtgatgaagagtactgggatgtgatgacctatctggatattgttgaaacactggaaagtgtttcaggcggcatcgacttgattccggatgtgcggttgatgattgacaactatatagcgattatcaggagagatattgtggacgaccaacagttgatagagatatgcgataaaatatacaaaaaacatcaaaaagcactggacctcatatttgaacaccgcgtgaataaccgcgggcaaatcgcagcggcggtcagagaaaccctacagcagatgagcgatgagggtagtatcgtttttgacgcaaattcaacggattcatggctgtgcttccacacaaaagaaatggacgcagtactgccgccgctgtctgcaaacaatgggtcatggggcaacagcaacatctataactattggtttggcagaacggatgaatccctttcgcttgtctttgaactcggcggctggaatttgccagaggacagaaagaaaattcaaaataaaattatagacatcgcaaaaccaaacgacaaaaagcgggaagattatcggtacaagcgtgtttattcaaaaaaatatgggattgataccaaaaatgatttgcagacagaagtccgtgagcaggtgacaaaagccattgcggatttgaagaactgggagaagaaacttcttataaaattgcagcaaaattaaaaatggggcatagctcgcggcatgagctatgccccatttttaacggggataaaagagtgtgatgatgtatgaactttactacatcccgaattttctgtccagcgttctgtattgcagcgtctcggacagatgcgccgtgtccagtacctcactaccgtccaaatcggccacggtgcgggctacccgcaaaatgcggtcgtaggcgcgggcgctgtagcccagacgctcaaacgcgccgcgcaggatcttttcggcggcgggggtcatgcggcagtaccgccgcagcgcggccgagggcagctgcgcgttgcaccgcacaccgggcaaagtctggtagcgctcacgctgcagggcgcgggcagcaataacccgggcgcgcacatcggcgctggactcgccgccctgctcggacgcgagatcgtcatattcgaccggcagtgcctccacatgcaggtcgatgcggtccagcagcggccctgaaatgcgccgccggtaggcatccacggcgctgggcgtgcaggtgcactcccgcgtcgggtggccgagatacccgcatttgcaggggttcatggcggccaccagcataaacttgcaggggtaggacgcactgccgtgtacacggctgacggtgactctgccatcctccagcggctggcgcagcacctccagcgtgtcgcgggcaaactccggcagctcatccaaaaacagcacaccgttgtgggccagactgacctcgccggggcggggtacagacccgccgcccacgatggccgtggagctgacgctgtggtgcgggctgcggaacggccgctcccggataagtccggcgccgccccgcaaaagccccgctaccgagtagatcgcgctggtctcaagcgcttcctcatagctcagcggcggcagaataccgggcagccgcttggcaagcatggattttccggttcccggcgggcctaccagtaaaagattatgcccgccggccgctgcaacctccatggcacggcgggcctcgctctgcccgcgcacatcggccatgtcaggcccgagccagacgccgttttcatcgtacccatcgggtgtggcgggggtgatgggctccgcgccgcagaggtgcagcacaacatcctgcgcactgcgcgcggggtacacggtcagcccttcggccacagcggcttcggcggcgttctcggcgggcaaaaacagctcctttacgccgttttgcacagcggcaagggccatcggcagcacaccggtcacagggcgcagtgtgccgtccagccccagctcacccaaaaatgcccgcttgccgccgggggcgggcagcttgccctgcgcggccagtatccccacaaacaccggcaggtcatacaccggaccggtcttgcgcacatcggcgggtgccagattgatcgtgatgcggctggcaggccacgcatagtgcaggttcttcacggcgctgcgtacccgctcactgctctccttgacggcggagtccggcaggccgaccagattgaactgcggcagcccgcccgcaaggtcagtctcgacctgcacaagatacccggccagtccggtcacaccaaggcttgtcacttttgcatacataggcggctccctttacagcttttccacgccgggaattagcgcggggtcatacatgacctgcgagtgattgtccaataccagttcccgcgctgtgacatcccctgtgacggcgtccaaagtttccttgtaaattttcgatacgcgataataactgtcgccttctttttggaagtgatgcccttcctcaacaatgcgatagctgtggggcaaggcatgctcacaacgcagctccgcgtagaggttgtcggcatcgcaccgcaaaagcagctgaaatggctggttcgtatcgtttcgaaaacggtaatcaccgttattgtaaaacaccgacgtgccggagctgaacggtattcgcgcgccctcatcgggagccagcgcgtcggaatggctgtgaaattccgttaccgtcatagggctgagcagtaccacacggtgtatggtgttggctaggttgcacagtcccccgccgatacccggcagcagatggttgcgcatcagaatacgaccatcccgatagcccttgcgcttggtggtttttccgacgatttgccaaaaggagaaggtctcgcccggccgtatcaggataccgttcagcctttggtttgccagacgaatgttgaccgccttgttttcctgcaggacagggtcgatgtccttaccgtgcttgatcaaatgtgagctgcacgatgaaacgatttgcggcagcggtgcagtttggtgagttttggcgtagttgacatgcgcaaggatatttctgatatggcgcttgcagatttccttttgcagcgcgattttatagcaggtcgggttgatatcacaaaacatagtgtgctctccttatcgggcaatggccagacggttgtaacagcgccggttttttcggtaaaaccacagaatgatcttctcagcgatgcggcgtttgccgaaatgtttttcgtccggcaggcggataaaatccaccagaatgcttgccatcccgcagcggttggcgccgagaatgtccttgaaaatctgatcccccacgcagatgacctgcgattccgtcagacccagcatggaggcagctttacggcaggcggcgggatcgggcttgccggcctcagccagaaacggcacgccgatatttcggttgaaccgttcgacacgctgccgtgaattgtccgagaacagcagaattttcagcccaaggctgttcaggtaggcaaaaagatgctcgatttccggcgtggcatcgtccccatggtgaacaagggtattgtcgatatcaaacaggacgccctgatagcccagagcttgcagcttggggtaatcaatggaaaaaacgtcggacagatacgccgacggatacagcatttcaagcatgtccgacctccataaaacgacagactgcatcgatttgggccggaatatcctgcccgaaaacgtggtcaaaaaaggcactgccaatggtaaaataggcaggggctgtttggcggagttcttccagcctcgcatagctgttgacgctgcccgcaatgcaaacggggccgggcacggcggcggtgaacgcacggttgagcgccgcgccgtcacctgtgtagcggtaacccaaaagatcaatgccgtaagcgcccttggcaagacagcgctgcgcctcaagaatcatttcttccgctgtgccatgcagtaccgaaggacgacccgtcacctgccccacaaagggcatgtagcgcacaccgcttttgcggcaaagagcattgaccgagtcgaaatacagtgtgcccatcagataatcacagccgcaggctgcggctgtttgcgccccgcgcagacattcttcctccgtgtaggaaaccacttccagacaggtggttttaccgcaggccttcatgcgggcaaacagcgcctgcatctcagcaaagggaatgccctgctccttaaaaccccaaaagcgggcacgggtttccttgcactgctcaaaaatctcagctgcattgggcaccgtacagtcattatacgtcagcataacgatcaattcggaagtgtttttcatagtcaatcccacttttacatatatactactaatcaatatacacttgaacctgttgttttgcaagggtttacgatgtaaaaaagattcgtaaagaatgggcaaaaatagccaaaattcgattgacacacacgggcaaagttggtatatttagtataagctaccacaaattatgcggtaagtattgcgaaagagcaggtgcattacctatgtataaagaaatgtatgaccgttggctggctgccgagctggacgatgcagacctcaagcccgagctggaaagcgttaagggtgacgatgccgccattcaggaccgctttgccgtggccctgaagttcggcaccgccggtctgcgcggcgtcatcggcgccggtaccaaccgcatgaatatttatgttgtccgtcaggcaacgcagggccttgccaactgggtcaagacccagggcggcagccagaccgttgccatcagctatgacagccgtatcaagagcgacctctttgccaaaacggccgccgaggtgctggccgcaaacggcattaaagtccgcatctataaggccctgatgccggttcccgcgctgagctttgccacccgctactacaactgcaacgcgggcatcatggtcacagccagccataacccggccaagtacaacggctacaaggcctacggcccggacggctgccagatgaccgatgaggccgccgacatcgtctacgccgaaattcagaaaaccgacatcctgaccggttccaagctgatttcctttgaggacggcatggcgcagggcctgatcgagtatgtcggcgaggattgcatcaacgccctctacgccgccatcgaggcacgctccatccgcccgggcatctgcaagactgccggcctcaagctggtctacagcccgctgaacggctccggcctcgtgcctgtcacccatgttctgggggacatcggcatcaccgacatcaccatcgtgcccgagcagaaggacccggacggcaacttcccgacctgtccgtaccccaaccccgaaatctttgaggcactgcgcctcggccttgagctggccgaaaagtccggcgcggatctgatgctggccaccgaccccgatgccgaccgcgtgggcatcgccgtcaagtgcaaggacggcagctatgagctgctctccggcaatgaggttggcgttctgctgcttgactacatctgcgcaggccgcatcgagcagggcactatgccgaagaaccccgtcatgtgcaagtccatcgtctcgaccccgctggccgacaaggtggccgagcattacggtgtcgagtgccgcaatgtgctgaccggcttcaaatggatcggtgaccagatcgccaagctggaggctgacggtgaggttgaccgcttcatcttcggctttgaggaaagctatggctatctggctggcccctatgtccgcgataaggacgccatcatcggctcgatgctgatctgcgagatggccgcctactaccgcgccaagggttcctccatcaaggaagagctggagcgcatctacaccgaatacggccgttacctgaacaaggtggatagctttgaattcccgggtctgtccggcatggacaagatggccgaaatcatggccagcctgcgcgccaacccgccgaaggactttgccggtgacaaggtcgtcaaggtcgtggactacaaaaagcctgaggagaccggcctgcccgccgccaatgtcctgatttacacgctggaaagcggcgccacggttgtcgtgcgcccctccggcaccgagccgaagatcaagacctacttcaccaccaaaggcaaggaccttgccgaggccgaagcccagaaggaaaagctggccgaggcctgcaagcctctgctggcataaaaaattagcatagcataagtaagcgcaccgtgtccgctcttgggcgcggtgcgcctttttgtttatcctgacggcaaacgggcaaagcccctccggtcatcgctggcgctcgaccacctccccagaatggggaggcatcctcgcgggcactgcccgcgtaaaaaggcgcccctttcaggggagctggccgagcttgcgaggcctgaggggctttggcggctctccgccaccgcgcactttccctaaaaactccccgcaaagttcgtcacctacgctacttgacaatataattctacacttgtaggatgaaactatcctctacatctgtagaataaaaaggaggcttacctatgtatcaagctgtctttatcgcctgtttaacacaaggactgctgctcagtctggccgtgctggcgttgctggccgccacgctcaggctgcaaaagcggtacggcccgcagtgtttctgccggctgtggaccaaactggctgtgctggccctgaccgcctgctgcgcgggcagtatggtggcctgcaagacggtggaaccgctcccggaggaaccaacagccgccgtatcggcaccgtctgaaaaagacaaccccgttgtgacaccggagccgccgcctgtttcggtggaggcgggggccacagccgttcgccgcggtgcggacttcctttggagtgagtatctgactgacggaaacggctactactatcacagcggcgcgtgcggccttgtggagcccgaggattacgacagcgaggaaatcgccgctctgctggatgaaccgcgcacggacggcacgaactggcgtgactacctgaacgctggtcagggcgcactggtcaaggcaacctttgaagtcgagcttgcacccgaggcatggtatagggggccgcaatatggagaagggcgcttccatgtctatatcattgtgccgttcgatgaagtgcagccctgtgaggtcatcagcggctggcagtcggccgacgatccgaatcaatcggctcattttgagatcctgcccatggcgcgggagttggacctgaccaacaaccagtaccgtatgctgctgcaccagtgcaacacgctggcacaggcgggtgcgcgggactttggcaaccccggcgactggccgcaggatgagttggaaacctacctctattatcgcagccgatattacagcggtcaggcggacgccctgctgatgctgaatacggatttcagcgatacaacggactggaaccgcctgccggtctatctgacctatgacgaactgaacgcgctggatttttcggaaccaaagacagccgccataccgggcttcaccgctccggaaagcctcgacagcgatgaccccggcgtctggagctttacacgagagggtgcgtatctgtttgctgagtggccgggtgtacaggaatatgtattcaatgtctacaacggtgacgcaaaattgaaatttgacgcccgcaccgtctgcgtgtcgggccgcagcctgtcttaaaaaagagcgaaaataaaacagaaactgtaggggcgggcattgctcgcccctacttgcaattcgccctcgacttgtagtataataatatgtcccatagtatccacattcgcaagtgaggtgacgcttatgcccggtgacctgcatacgcatacgacattttccgatggctctaccccggcggacaagctgccgtttctggcggcctgcgcgggaatgacgcatctggcaatttccgaccatgactcgatcgagagtgtgcgctatgcccacgaccacccgctgcaaaacggcgtccacctcatcccggccaccgaactgaccgcctacgactatgagcgcgcccaccgcgtgcatctgctctgctattggccggatgactgcgccgcactggcggacttttccgccatgatggcggagcgccgtctgaccgccatgctgcagagctgcaaggagctggaggcaatctgcccgcagttttgcaccgaggaggcgctcgcccttgctaaggacagcggtacgctgttcaaggcccatgtcatgcgggtgctgtggcagtacggcttggcggacggcatgtacaataccgtctataagtcgctgttcgggctgaagcctgtgcgcgggcgcatcctgcacacgccgcggtatgagccggtcgatacggtgctggatgtcatcaaggcaagccgcgcggtggtcgtgctggcacaccccagcgtctatcacagcatggagcttgcaagggagctgatcgccgccgggcggttggacggtgtggagatcgaccacccccgcaacacgccggaggataaggcagagctgatgcgtctggcgcaggagaacggactcatcatcaccggcggcaccgactaccacggcctgaacaccgtgacaccccgccctgtgggcgcattttctacccgggatgagatgatcgcgcgcatcggcgatattgccaaggcgcgcaaggcaacacgaaaaaaatcagagtaaggagcaatatcatgacatacacctacaataataaaggcacctgttccgtccgcaccatcgttgagctgaacgatgaccacaccatcgagagcgttcagatcatgggcggctgtgacggcaacctgaagggcatcgccaagctgctgcccggcatgaaggccgaggacgccatcgcccgcatggagggcacggcctgcggccgcaagcccaccagctgccccgaccagatcgctcaggcgctcaagagcgcgctggcggagatgggctgataaaggtccgtaggggcggattccatatccgcccgggccgtctgcggcagccgcacaccttgcgggcgcatatagaatgcgcccctacattttgcccacaaggcttattactataaaaggagcttcccatggactgcttccagtatccgcttgataccgagaccctgctgcgcaaaaaacgcagactgcgccgcgagctgctggcccagaacccgcacccgctgcacaaaaaaatcgccatcctcggcggctctaccaccaacgaggtggccgaccagctggggctgtttctgctgcagtatggcatcgaggcggaattttaccaaagtgaatacgcccaatactggcaggacgccatgttcggcgcgccggagctggacgagttccacccggatattatctatatccacacaagctggcgcaacctgaccgcgctgcccacgactgctgacagcgaggcggacgttgacgctatgctggacgagcagtacgcccactttgaaaccatgtggcaggcgctggagcaaaaatttgcctgcccggtcatccagaacaactttgaccggcccaactaccgcctgatgggcaaccgcgacatctgggacccccatggccgctccaactttatcagccgcatgaaccagcggttctatgcctacgcggccgcgcatgagcatttttatatcaacgacatcgactatctttcggcagactacggcctgaccgcctggggcgatgccttcttctggcatatgtacaaatatgccatgtgtctggatgcaatcccgtcactggccaacagcgtggccaatatcatcaagtctttgtacggccgcaacaaaaaggcgcttgtcctcgatctggacaatacgctctggggcggcatcgtgggggacgatggtgtggatggccttgccatcggccccgaggtgccggaggggcaggtctttgccgagttccaaagctactgcaaggcgctgaaatccatcggcgtgattctggcggtcgattccaaaaacgaggaggccaacgcgatcgcaggcctcaaccacccggacggcgtcctgcgtcccgatgattttgtcgctatcaaggccaactgggagccgaaggatctcaatctgaaggcaatcgccgcagagctgagccttggcgcggacagctttgtctttgccgatgacaacccggctgagcgcgccatcgtggctgcgcaggtgccgggcgcggcggtgcccgcgctcgacggtgccgagaactatatcaagacgctggaccacggcggttattttgaggtcacggctctctcccaagaagatctgaaaaaaactgagctttaccaccagaatgccgagcgtgccaaagcacaggcggcctttaccgattacggccaatatctggacagtctggagatgacggccacgatccacggctttgagccgctttacatccagcgcatcgcccagctgaccaataaatccaaccagttcaacctcacaacgctgcgctgcagcgaggatgacatccgcgcaatggcggcggatgccgatgcgctctgcctgtgcggcaagctggtggataaattcggcgacaacggcattgtcacggtggtggcgggcaggcgtcagggtgatctgctcgacctgacgctctggctcatgagctgccgtgtgctcaagcgcggtatggaggatgccatgatggacaccctcatggcgcaggctgccgccgccggtgtgaaaaccgttgtgggccactattaccccacagccaaaaatgctatggtgcgtgacttttacgcacagttcggctttgccaaaacggcagaggatgccgagggcaacaccgagtggagattggaggtctccggctatgagccgaagcacccccacatgaagatcgaacgctgatacgacagggaagatgctatgaaacgaaccatcctgcaaaaagcggcggctgccgcgctgtttgtgctgctgacggcggcactgctggcggctgcggattttctgctggtggacgatgtacattcctactcccgggtcatgctgcaggaactgtatgcggatgcgggcaatatcgacaccctgttccttggctcgtctcactgctaccgcagcgtagacccggccgccgtggacgcagcgctcggcacccacagcttcaacgccgggtcatctcagcagctgcctgatggctcctactacatgctgcgcgaggctgctgccgaaaacgacctcaaaacggtctaccttgagatgttctacaccggttataacgagagccggtccgccaatgtgccgatggcctgctacctgcttacagaccacatgagcgctgcctcccccaaccggtatgaatacctgtgggagatgggcggccttgcgggctttgccgacctgctgctgccggcgcggcacggcattgcctcgccaagggcgatgcccgccctgtggcgggccaagctgacggacggctacgacccgggcagctatgcctatgtcagctatcccgacagcggggagacctaccgcggccgcggctttgtctacacacagggtgtgccgaaggacggcttcggcacgctgctgaatctggacgccgatgcgccgctgtccgatttcggctgggagtatctgaccaaaatcgcggatttctgcgaggaaaatggcatacggctcgtcctctttacggcgccgctgcccagtgcttatctgtataacaccgacaattatcagtcctatgtggatgcgctcaacaccttctgcgcggcgcgggacggactcgtctactgggatttctctctctggcgcgactgggatacgctgcatcttacggtgggcgattattccgatgcgcaccacctgaacggtgcaggtgcggataaatttaccgctgttctctgtgataccatccgccgtgatgcggcaggggagaatgtcgccgacctgttttatgatacggtcgaggataagctgacgctgacgccggatgaatccatcctgatgaaggatgtacactgatacgaaggaggccccgccatgatcgctgtgacatcacccggctttgtgctgtttgcagcgctgctggcggggctttggtatgcctgcccgccgccgcgccgctggcagctgatgctgggggctaaccttgtcttttataccgtgctgtgctggcaggcattgccggtactgctggcctgtacctttctggtctggtggtgcgggcgcagaacggccgcgaagggtactttttatgcggggctggcagctgcgctttttccgctgctgctgctcaaatatctgcctgcggccttcgggtggcagggcaagctggccaatgcgctgggcatcggctactttacgctgcagcttataagctatctctgcgatgtgcgccgcggcaagcttctgccggaggaaaggtatgcgcggctgctgtgctatgcctcgttttttctctccatcacgcagggccccttcaaccgctatgatgagctgatgccccagatggatcgccctgcacgatgggacaccgcccgcgcttggcgcggtgtgcagcgcagcgcatgggggtacttcaaaaagctggcagtggctgaccgcgctgcggttgtggtggatgcagtgtttgcaaaccccgctgcctatgaccgcacccagctgctgctgggatctgtgctgtttacggtgcagctctatgcggatttctccggctatacggacatcgttctcggcgtcggtgaggtgctgggcctgacactacccgaaaacttccgccagcccttctttgcggattcggtcaaggatatctgggcgcggtggcatatcagcctctcccgctggctgcgggattatatttatatcccgctgggcggcagccgctgcaccaaggcacaaaaggaccgcaacctgctgcttacctttttggtcagcggcctgtggcacggtgcagggtggacctaccttgtctggggtgggctgcacggcctgtgtcaggcggcggaaaatcacctcccgccccggcgcggcggccgtatccggcatgccttgcgcatggcaggggctttcggtgttctggtgggggcgttcgtcatcttccgtgccagcagtctgggcaatgctgcacagatcttccgcggcatactctgcaacggcggacatgctgtgttcagcaactattgggagctgggcctgaccagcatgcaggagcagctgaccctctacatgggtattgcctgcctgctggcggtggatgtgctgcatgagcgcggtatctcactgcgggaaaaaatcgccgcactgcccatcccggcccgctgggcggtttatgaggcagctgtttttgcatttctctttatggggcgctttctcggcggcggcagcttcctctatgcgagattttgacgatactgcaataaaataaaaaaggatgcgaaccgcagcggttcgcatcctttttgtttatttcaatcgctggtcagcaccgaagaatttgaacatcttgcagccgcccagcatacggctggcgaccttttcggtgtaacgggccataaaaacggtctgatccgtgatgttggtcgtgtagatcgtggggcggtgggtcagcatacgggtgttgatcagctcatacagtacactgatggtcagcggcgtgatgtactctgtgcccagatcatcaaggatcagcaggtcggcctcctggcaggcggccagccattcatccttggtggaatagtcgaaatgctcccggcccagctgggctgccagtgcagcggcgctggtatacagtacatcgtggccaccctccagcacagcatcggcaatggccaatgccagatgcgttttgccaagccccgtgtgccccataaaaagcaggttcggactgttctggctgaaccgtgcggcgtaggtctggcagtaattcagcagcttgcccatatactcgcgcggggagatgccaagctccggctctacggtgtcgctgtagcgtgcaacctcaaagctggcaaactggcaaagcccaagcggactggcggcgttgatctcctcgcggcgcaggcggcgggctgcctcggccacgcagctgcaggggataccgccccgcatgccggtgtcctcacacagggggcagcggtaggcgggggtaaaggcgttctcctcatagccggcctcctttacggcggcggccagtgcctcgtccgcgcgggtcagcgcggcgcgggcagcctcgatgctgccgcccagcgcggcagccttggcaaggcccagcccggcccgcatgtgggcgttgtcagcctcggccagtgccgggtgggcggcgtaggcagcgcggcgggccgcctcggcctgcatgacagcctgctgacggcgggcggctacctcgcgctgtgcggcgcggaacagttcgtcttttgtgcgcatggatcatccctcctcgtcaaacatcgcagcccagtcgcggttgaacaggtccttctgggcactggcggcgggcggctgggcgccggggcgctcggtcatgacaatgttgctgccctccagctggccctgcttgcgggcggcgtcaatggtcgtgatgccctgcgcgcgccatgcacgcaggatgccgtccacataccgcacggtgtttttgccgttggcccgcagcagcgcctcgtcaatcatctcgtggccgatgcccatttcctcatgccagcgggcaatcgcgcggcgctcccaatttgtcagggcgcgcggctcaacaccaaactgggcggcggcgtcagcacaccagtcctcgcgctgtttggcgcgcttgagccagcgctcggcgtcctcgccgttctccacgccgtcctctcgccagcgggccagcagatgcgccacagcggcaacggtgcgccgaccgatacgcgtcacctcggcgcagcagagcagaatcacatcgggcttccagccgtcagccagatataggtcaacaagccgctgcagctcgctccggctcagcgtcttgccgaaggcgttctgcgcctcttgacacagcaccgctacataggggtcgttgatcgcgctggctaagtccacatgggcaggctcggccggggcgggggctgcgccgcgctcgttcaccagcagcccggcacccgcccagtactgcagcgcgcgcttggcggcctcaatgctgggcagcgccagcgcccgggccatcgtgcgggggtcggtgtcgcgggtctgcaaaatatacagcgccgcccggatcgtatcgccgtcggtctggcgcaggtgtgtcagcacaagctgcggcaccgcaagggtatcgccggtgttgtccgccaaccggtagcccatatccgcaaacctccccactttaataattttataattataccacgcggcagccgatttgtccacttttgcccgaaaaactgcccaaaaatcagactgtgattttgggtaatgcgtttcttgttttttgaataaaaaatttgtacaataataccataaacagtttaagcattaagggggattccaccatggcgatgaatcttgtaaaactgcccaccggtaagccgaacctgcagctgcgcgtcagcaaggggcattacgccaccagccacagccatatcaactattatattgatgtcacgctgacaaagttccgcctgtcggaggcacgcgcggccgcagcagagctggtgcgggcctataaatcgacgaccatcgtggataccatcctctgtctggacggtaccgaggttatcggtgcctgcatggcaagtgagctgaccaaggccggctatacgaatatgaacgcgcaccagacgatctatgtggtcacgccggagcataccaccggcagtcagcttcttttccgtgagaacacggcccccatgatcgcgggcaagcatgtccttgtgctggcagcctcggtcaccaccggctatacggtgcagggcgcggtcgaggcgatccgctactacggcggtgacccggccggcatcgcggcaatttttgcctcggtcaaggagtgcgcgggctacccggtggcaagcatctttgacccccatgatctgcccgactatgagacctatgacgcccacagctgcccatggtgcaggcagggcaagaaaattgatgcccttgtcaatagcttcggctattccagtctgtaagtttgtgacgattttgccccctcgaaggagggggctttttgttgctttttatcggttgacgctccgtgctctgccctttataataggaaggctgactttttatagggcaataccgcataattctaagtgccgatacggcgagcgaggtgcggcagctgctaagccaaaagcgcagataatactggatgtcttatcgagcattttggcaacgcagatgccgtaccgcacaccgagccgcagcgaggcgcttcggagcgcaaccgccgcttgcggcggctcttggcgcggagatccgcccggagcggtgcttaagccgtcaggcgggaattgtgcggtgttgcaataggaggaattggtttgaacacggaaaatctcaatggaattcttgcacaatacatccagcactgcaaaagccgcacggcggcggatgagggtacgatctggcgcgcggtggattgctttggcgtaaactgggatatagatgacagcgactttcccgttatgttcggcgatgcaatgcagcaggcaaagcaggcgctggacaatccggcgctgcagcctgtcggcggtctgcaggacctgatgctgcgcgatgcagaggtggagcttgtgcgcgagtgcttccgctggctctttaaggaggatgacggcgatattacaaagcgccgcggccgcgctgagctgtttgcggatcagatcaacggccgtttccgccgcgtgtttccgcggctgagcaaatacacaatgaacgccgcgaacgcgctctttttcctgaacctgtgggagccgcacgacaactacttttaccatgcggccgaggccaaggcgtgggcagagtattttgactatgaggccgatttcggcggcggtgcagcgctggatctgccccgttactataccatgtgcaatgaccttctgcgggagctggaaaactaccccgagctgatcgccctgcacaaggcgtatgcagcgcaggagctgggcggcatagaggacagcctccatctgctggtctacgacatcctgcacacggcctacgccgagcagttttaccccaagggctacgcccgcagcgccaccaccaaagagcgcgccaaggccgtcaaggagaaaaatacccgcgctgaactgtgcatccgcatcggcgagtgcgagcagaccttgcaggagctgctggcaagccctgccgagctgccggatctgaccggctgcaagatcacccacagaatgttcggcgccggcaccgtgcagcccgcagagggacagttcatggtcatcgacttcaacggcacgctgaaaaagttcagctacacggcctcgatgagcagcggctacctcagcgccgaggatgctgccgtagaagcccggctgcaggcctatcaggattacaacaaagaaaaagaccgccttgaaaaagaactgaaaaacctgaaggcagaactgatgaagctgtaagctgcccacttgacaaatggcggggagaacgatataatactagttgttgcgcggctgtcgtacaacggctagtacatcagccttccaagctgaggacgtgggttcgactcccatcagccgctccaaaacaaagctcccaaaccgggatacggtttgggagttttgttttgggcttgctgtaacatttttgccactttattttacattttgcgctcttgacaagggcgcgggaaagccccataataaatactgaatctgtataatttgaaaggaaagaggtgcggcatcatgcgcgtgattgccggaacagcccgcggtaagaatctgcaggcactgccgggcgaggatattacccgcccgaccatcaaccgtgtgaaggaggctatgttctccagcgtgcagttccttgtgccgggggcacgggtgctggatctgtttgcaggcagcgggcagctgggtattgaggcactgtcccgcggcgctaaaagctgcctttttgtagaccgctctgccgaggcactggctgtagtcagggccaactgcaagacagcgggggtcgagcgccagagtgatatccgccagagtgaggccgaaggctttttggctaacatccgcggcccgtttgagctggcgctgctcgacccgccgttccaccagaataccgtggccgctgtgctgccgctgctggccgctaagatggcccccggcggtgtggtcctctgcgaaacagagcgggaggccaacctgcccgagcaggccggggcactgactttggtaaagcaatacaactacggcaagatcaaggtcagccgctatgagagaggggaagaggcatgaacgtagaagaattgctggaattgatggaggaaacgctggaggcgggtacggctgtgccgttcgccgcatctaagcgggtggtcgatgtggaccgtatgcgcgatattattgacgaggtgcgcaacaacctcccggatgaagtccgcgaaagcaagaaaatcgtcaatgaccgcgagcagatcatgaaaaacgcccgcatcgaatcggaaagcatcatccagcaggccgaggaaaaagcccgcaacctgaccagtgagcaggagatcgtccgccgcagccagcagtatgcggcggagatcgttaccaaggcgcaggcgcaggccaaggagctgagccgcaatgcaaccgtctactgtgagggcattttgaaaaactctgaggaggtgctggcccgcagtgtggcagacatcaagaatgtccgcatgaatctgcgcagcgccgcccgcccgaaccgcggacagcaaaagtaatcactgttgttatttacgacacaattccgctgaaaaaatccacatctttacaaaatgtacgccgcaccgtgtaaaacggtgcggcttttttgcgtctacgggcgaaaaagcgcggcggctgcgcatttgatgcaaaccgctgtgtgcagccgacgcccctttgtacaaactgtgaaaaatcagtttgcggcgcagtttttccccgtctgcccttgctttttgcaagataaaatggtactattatcttaccacaggtgggtaattgtggtgagaataacaacaaaagtggttaagcgtgggtagttttccacgttatccacagagttatccacaaagagaacgcggcatcgtaaaaaaacttgccgcaaatttgtgcagcctgacgaagggaggggaaggacagatgctggtcggtcagtatgattacgccatcgacgccaagggccgtctgaatttccccgcccgcttccgtgatgcgatgggggagaccttcatcgtcacccgctggctggatcactgtctggccgcctttccggccgaggaatttgaaaaggtcgctgccaaaatcgaggaaaagggtcttgtcaagggccgcaaggtcagccgtatgctctatgcctctgcggtggaggtcagcccggacaagcagggccgcatccagctgcccgccaagctgcgggagtatgcgggccttgaccatgatgtgacgatcatcggcagccgcagctttgctgagatctggaacaccgaggcgtggaacgccaatcaggaaacgagcgatgaggatttcaccgccgcaatggaagatcttgatttctgatactataggacgatagaacatggaattttcacatatccccgtactgctgcagccctgtctggatgggctgaacattgaccccgccggcatttatctggacggcaccgccggcggcgcaggccacagcagagagattgctaaacgcctgaccacaggacgcctgatctcgctcgatcaggacccggatgcggtggcagtggccaccgaaaggctcaagggtctgccggcgcaggtggtacaggtcaatttccgtgaggcagcccgtgtccttgcggagcttggcatcccggcggtcaacggggccctgctcgatctcggcgtgtccagccatcagctggacgatgcggcgcgcggcttctcctatcacgctgatgcaccgcttgacatgcgcatgagccagcagggtcccaccgccgcggatctggtcaacacccttgaccgtgaggagctgacccgcatcctgcgtgactacggcgaggaaccctatgcatggcagatcgccggcaggatcgtatccgcccgcgcagaaaagcccatcaccacaacgatgcagctggcggagatcgtagcctccgctgtgcccccggctgagcgccgcaaagcgaagaacccggcgcgccgtaccttccaggccatccgcatcgccgtaaactccgagctggatgcactgaatgagggcctcgacgccatctttgactgtctggccccgggcgggcggctctgcgtcatcaccttccacagtctggaggatcgccttgtcaagaataagttccgccgctgggcgcagcgctgcacctgcccgccggaacagcctgtctgcacctgcgggggtgtggccaaggcaaggctgatcacccgcaagcccatcgaagcagacgctgcggagctggaggccaaccgccgcagccgcagcgccaaattgagagtgttggagaaagtataagaggcaagaaccatgacaactgttatgctgcatgacggtgcagccgcgccccggctggagcgcccgcagcccgctgttaaagtagtgcgcggcggtgattacgggctgaaccgtgcccgccgctttgcccgcatggtggcgcgcgtacttgcgctggccattgtgctggggttggttatcagtgtgctgtacagccatgccaagctgacggagctgagcggcgagatcaacgaggtcaacacccagttggccgccgcccgcagcgagtatgactatctcagcacccgcatgagtgatattacaagccgcgccagcctgcaggaggtggccgagggtcagctgggccttgtcaagcttgaccccagccagatcacctatgtccagctggaggatgagagtgtgattcagaaaagtaccaacacggcaggcaagctgctgggtgaggtgcgcaccgcggcactgagcctgctgaacaacctgaacccgtaacaaaaaatatgcagctatgagcctttttgctgcgcggcgcgacagccgacggcaaaaaggctttttgaaatcctgcacccaccaaacagggaaatgccgatgccacaaccaacgaatcaaccaaacattccgcccagaagacgccgagcccgcgcggacagcggcatgaaggcccgcaccatgttctgcgtggcggtgttcatcattgccgggttcggcctgctgatctaccagctttatgcgctgcagctgcgcgatgccgagctgtaccgcaccgaggccgtgacccagcagatgaaggacatcacgctgccggcgctgcgcgggtcgatctacagcgcgaacggcaagctgctggctaagagcaacacggtatggaacattgttgccgatccgtcctccattgcaaagagcggcgccacggaggcacagctgcgtaccgccgcgcaggggcttgcggatatgctcggcgatggcaccacggcggacgccctgtatgagatcctgaccgccaagaatgcaagcgggacgccgtaccagtaccgtatgctggccaagggcgtggaaaagccggtggcagatgccattgtaagctatgccgatacctaccgcatggagccggagaaggacggcgcagccggcaagcgcatcctctatctttcgactgagcaggccagtacgcgcagctacccctacggagaattcctcgcatcagtgctgggcttctgcaacagcgatggcgagggtgcctatggtctggaaaaatactacaatgaaacgctggctggaacgcccggccgcagcgtggccgaaaccgatgtaaacggcaatgcacttgcgtcaggccagtctgatctgcacgaggccattgacggcaacgatctgtacctgaccattgacgaaaatgtgcaggctatcgtcgagcagtacctgaccgaggcgatgaacaccttcacggtacacggccgcggcagcgccatcgtcatgaatgtcaagaccggcgcaattctggccatggcatccattgagcagtttgaccccaacgacccctacaagatcacggacgccaaaatgacggccattctggataaagaggagatcgacgccgaggacatcgactggctggagggccgccttggggaaaaggcggtcaaggacatcatcgctgacggcaggattagccgcgataaaacggttgatgaggacggcaacgagatcgccagcgaatacacccagctgcagggtatgatgcgcgaggcacagtggaagaataagaacatcactgagctgtatatgcccggctctgtgttcaagctcatcaccgcatcggcagggctggattccggcattatgagcaccagccagaccttctactgcggcggcagcctgaccgtcaatgagggaagcgagaggtgggagcatacctaccgctgcgccaacggcgatgtccactatgaacaggacatggcgggcgcgctgaaccacagctgcaacctctggttcattcaggcagctgaaacactgaagccgcagatattctacgactatattcaggcgttcggcttcacccagcccaccggcatcgacctgcccaatgagacccgctggacaagcgtctacaacgccgagcagatggcggaggtcgatacaaacctctatacggcagccttcggccagaacgagtccatcaccccgatgcagatggccacggccgtggcggctattgccaacggcggttatctggtcaccccctatgtggtggattccgtcaccgataaggacggcaacatcgtcacccagaccgagacaagtatccgccgtcaggtcatctccgaggaggtaagccgccagctgctttccatgatggaaaataatgtccacggggaaggggactaccactcctgcgccaacgcctatgtggcgggctaccgcatcggcggcaagtccggcacggcagagcgcaccgaccgccacctgcgcggtgacggcgactattataagatgatgagctttgccgctgtactgcccatcgacgatccggagatcgaggtgttcgtattgctggacgacccgcgctggatcaaggactacgccagtcaggtcgtggcgccggtcgtaggcaacatcatcagcgagatcgcaccctatctgggcatcgagcaggacgccgcctacaacccgaccggcaccgctaaggtgcagacctgtctggagtacacatggacgaatgcgcaggtcaccctgaaccgtctcggcctcaagcacaagctcatcggcccgagcagcggcaccatcgtctaccagtacccggtgggcggcagcgtggttcccgcaggctcgaccgtctatctgtacactgccaccgatcagaacgcaatgaccacagtccccgatgtgaccggcaagaccggcacctttgccgagcagatgctccgcgcagccaacctgaatgtgcagttcagcggggacagcggcggcaaggtcgtggcgcaggatgtccagtccggcacgaccgccgcttacggcaccattgtgaccctgacgatggacaccggggccgaaccccccgccgaggaaacccccgctgcggaggaaaacatcgaccccgcaaacgaggcggggtgacccgcctgctgcagcagtaccctctataccagtaaacctacccaaggaggtcctttttcatgcaaaagattcctgccaatgagctgctggccggcctgacgctggccgagcctgtcagcatccatgcagtcgttacggacagccgcaaggtcgagccgggctgcgtctttgtctgcttccccggcgagcgtgtcgatggacacgattttgctgccggtgcctaccgtgacggcgccgcctatatcatcgccaaccacccggtcgagggggtcccggcggaccgcaccgtcatcgtgccggacagcgcccgtgccatgatccgcatggccgccaactaccggatgcttttcagccccaaaatgatcggcgttaccggcagcgtgggaaagactacgaccaaggaattttgctacgcggtgctgtctgcgttcggcgccacactcaagaccgagggcaaccagaacaacgacatcggtgtgccaaacaccctgttccggctggacgatgctaccgagtatgccgtggttgagatggggatggaccatgcgggtgagatcgagcggctgagccgctgcgcccgcccgtccgcaggcattatcacgatgatcggtgtctcgcatctggaaaatctcggcacccgggagaatatactgaaggcaaagatggaaatctgcaccggcctgccggacggtgccccgctggtgctgaacgccgacaatgacctgctgcctgctgcacaggtaccgtcccgtctgcgggctgtctggtttggcattgaggccgaggatgccgatgtccgcgcgacggacatcacggccggggccaacggcacggcgtttcgcatcgtggaccgcgaatacggcagctttgcggcatccatccccacggtgggacttcacacggtctatgatgcgctggcagcctatgccgccgctacacgcatggggctggacgcggcccgctgcgcggcagccttggccggctaccaaacgaccggtatgcgccagcatattgtggagcacggcggcgtgaccttcatcgaggattgctacaacgccagccctgacagtatgcgggcagcgctctcggtgctgaaggaattgcccaacccccgcaagatcgccctgctgggtgatatgctggaactgggcaccgccagtgaggaaggccaccgcagcaccggtgcatgggccgcagacgcaggggtcgatcagctgatcgcctacggcccctgcagcgcagccatggccgaggccgccaaggcgcgcggtgttgcaactgtgcattgccaaacggcagcagaagtgctacaatatttacggcaattcgtgcgccccggtgacgctgtactggcaaaggccagccacgccatgggcctggagcagctgctgcaggatttctacaaggaattgccgcaggggtaaaaaaccaaaagggctcctccgcaggggcacctctgggattgcgcacagcgatcccccctgtacctattgatcggaggaatcattgcatggagcaaatctcatacctgctggcggcaggggctgtcggcggctttgccatcacagcggtggcaggcaaatttatgatcccggtgctgcaccggctgcactttggccagaccatccgggaggagggtcccacctggcacaacaagaaaaacggcacccccaccatgggcggcctctgctttattctgggcattctggcgacattgggccttacctgggctatgttccgccccaaactgcccgacacactgggcctgccacagatgcaggcggtgctgctggtgctgtttttggcgttcggctcggggctgatcggctttttggatgactttatcaaggtcatccggcaccgcaacctcggcctgaccgaggcacagaagatgatcctgcagatcgcgctgaccttcgggtttatgcttggccttaacagtctgggcctgcttacgaccgaggtgcagctgccgatcttcgggcttgtggatatggggctgctctactatcccatcgcgtttttcggcatcatctttttggtgaacgccgtcaacctgaccgatggtctggacggcctttgcaccggtgtgacctttgtgtcgatgatcggctacctgctggcgggcagtctgctgggctttatccatgtttcgctcgttgcggccgtcacggcgggtgcctgcgcgggctttctggtctggaacttctacccggccaaggtgttcatgggggacaccggcagtatgttcttcggcggcatcgtgacggcgctggcctttgtgatgcagcgccctgagctggtgcttttcttcggcatcgtttacatctgggatgccatgacggtcgtgattcagcgcgcctacttcaaggcgacccacggcaagcgcatcttccgcatgacgccgatccatcacgcctttgagatgcgcggctggcgtgaggtcaagatcgacggcttttttgccctgatcgccgccatcggtgtggcgatgggcatgctgtacatctgcgtggcataacacagggccggggcagcccccggcctttgctttttgattttgtaaggggaggtgacggcccgtgaatacggcaaccagccttttggggcttttgtttgatcataccatcggcaacattctgcgcatgctggcggtcatccgcctgcctaagctggagcgggggccggtctcccacgggtttgtggcaacgctcatcgtcattatgggctacggccttgtcatgctgttttcggccagctattccagcggctatgcgaactacggggatgtctaccacttcatccgcccgcagggcgtcattgcggtggtgggctttgtggcaatgctcatcatctcaaacatcaactatcgcgccctgcggtatatgaacgagagcttctacatcattaccgttgtgctgctcatcgcggcgctgctcagcccggaggataccaacggcacctaccgctgggtctaccttgcaggcggctccttctcgctgcagccgtctgagctggccaagttttctgtgatgctctggacggccgatatgctggaccgcgaccatgcgcataaaacatcgatctggtacggccttctcaagcctgcactgccgcttgtgccgatccttgtcctgctcaagcttgagccgcacaactcggcgatactgctgctctgcgcgatctttggcacgatgatcctctgcaacggctccgccatgcgatggtggccgctggtcggcgcggcgggcgcggcaggcatgatcgcattcttaaagcacctcgccagcggcgatggctatgcggccggccgtctgggcggcgtctggggcctgacgcccacaaacacagccggcatgcagtggcagaccctgcagagcatctatgcgatctgcaccggcgggctgttcggcgtcggcatcggcaacagcgtccagaagcatcagtggctgccttatgccgaaaacgactttatctttgccgtgatcggtgaggagctgggctttgtcggtgcgctggcgctgatcgccctttttgcggcgctgctggtgcagggcgtcagcattgcgctacgcgcccctgacctgtatggcaccctgctgggcatcggcatcatctctcaggtggggtggcaggtatttctgcatatcggcgtcggcacggcgctgctgcccaacaccggcatcagcctgccgttcttctcgtccggcggcacaagcctgctattgctgcttggcgagatgggcgttatgctcagtatctcccgcgcgggcaatgcgcgggaaaagcgccttgccgaccagcaccgcgccgagacggagcgtatactgcagcacagccgctaccgcaaaaccacggtgtaactgcttgcatttgtgcggcagatttttatatacggaggccaatcatgcgtgttttaattgctgccggcggcaccgccggtcatatcaacccggcgctggccatcgccggcgccctgaaggcggcggacccaacggcagaaattcacttcgcgggccggcgcgaggggatggagtacggccttgtgaccaaggccggctacccgttccatcatattgaaatcaacggctttcagcgcaggctcaatctggaaaatattggccgcaaccttgtcgcaatctggcatctggccctgtccgggccgcgcacccggaagatcctgaatcaggttcgccccgatcttgtcatcggctgcggcggctatgtcagcgggccgatcgtccgcgctgccgcgcgccgcggcatcaaaacggccatccatgagcagaacgccttccccggcgtgacgaacaagctgcttgccagagaggtcaacatcgtgctggccgccagtgccgatgcagtcgaaaagctcggcgcaccggataaaacgactgttgtcggcaacccggtccgccccgaggtcctgacggcagaccgtgccgccgcccgcgccaagctgaacgccggggatcgcacggtcatcctcagctttggcggcagcttgggtgccgaccgtatcaatcaggtcgtagcggatctctgcgcatgggaaaagcagaccggccggaacacgctgcatctgcacgccaccggcagtcgcggtgtcaagctgtttgaggaccttgaaaaggagaagggctttgcccccggcgaaaacctgatcgtgaccgagtacatcaacaacatgccccagctgctggcagcggccgatctcgtcattgcccgctccggtgcgctgactctggcagagctggaggccgtgggccgcgcctcggtgctgatccccagccccaatgtggccgaaaaccaccagtattataacgcactagagctgcagaaggccggtgctgctgttgtcattgaggaaaagaacctgaccggagaagggctggtcaagacggtggagaatctgctgaacacccccggcaagctgaccgagatgggtgccaacgccaagacgctgggtaacccccacagtctggaccttatcaccgaaaagctgatggaactgatgaagaactgaaaaggcaggcgggatttatagtgccctgctctgtatgccaaatcccaaacgaaaggagccgctcctatggggaacgaccagcgcagccgcaggcagagaaccgtgagcggctccggcgcgcagaacaaccgccgcagcctcggcagccgcatgggactggaaaagcgggaggcaccccgcagagagccacccaccgcccagccccgcgagccacgcgccagacgcccgcaggcgacccagcagatcaatccgcaaaaggccggctaccgccccggcagccccagaaagcagcggcgcgtaacgcaggcagagctgatccgccaacgcaaccgccgccgcgcactggggattctgggcgtattggccgtgttggccgtgggcgcattcgtgtccgtcaatctgctgttcaaggtcacaatcttccgtgtcgagaatttcgaccgcacaaccccggccgacaccggcatctacacggaagaagagctggtcaacgccctcggcattgagaaaaactccaatctcttcggcttctccaccgcagaaaagactgcgcagcttgcgcagcagttcccgtatctggagcaggtcggcgttgagatccagctcccggcaacggtcgttgtcaaggtagaaccggcagtcgagcggtttgcctgcatgtatgcgggcggctggatggtactgagcgattccttgaagatcctgcgcaccgaggtgagccagccagagggcctgatcctgctgtcactgacattgcctgcggactttgcaccggcagtcgggcagcatatcgtgccggaaagctacaactcgttgctcggcggggagcaggccaccgcggaaaccgcaggtctgcaggcctcggcggcccagacgctcacagagctgcgggacggcctgctctcgaacggactgtttgacggcgcgaccgccctggacatacgcgacctgagtgatattcagtttacctatcagaaccgcatacaggtgcgtctgggcagtgagatcaaccttgcctacaagctgcggctggcggctgcagcgctggccgaccctgaaaaagggctgtctgccagcgataagggggtgctggacatctccaaccagcagagcaacggcgatatccgcgcttatttctcacccgatgaccctgcacccacgcccacgcccgtaccggccgagacaccacctccggaagaatcagaagaaaatcaataaaaaaggcaccgcctgcttcaatcgtaagcagacggtgcttttttatgcagcttttaatggtgtgtgcaggctgaatcagacattcagctcgacatgctggccaacatcctcggcattgtagtccagaacaggctggatgacatcgcgcaggaactcggtgacctgctcggcactgcggccggtaaatgcctcagggctgagctcagcctcaatttcctcgcggctcaggccgaaggccggatcagcctcaacacgggcaatcatgtcgttgggcttgccctcctgcttgacaacggcggcagcagccacggcatgctcgcgcaggcgctcgtgcagctcctgacggtcgccgcccttcttgacagccttcatcatgatgttctcgctggccatgaagggaagctcggccataacgcgggcgcgcacgaccttcgggtagacgaccagaccgtcagagacattcagcagaatgttcaggatggcgtctgccgcaaggaagccctctgccatcgcaatgcgcttgttggcggagtcatccagcgtgcgctcaaaccactgggtgccgctggtcatggcggggttcagcacatccaccatcaggtaacggctcagcgcgcagatgcgctcgcagcgcatcgggttgcgcttgtacggcatggcggaggaaccgatctggttcttctcaaacggctcctccatctccttgaagttggcaagcaggcggatgtcggtggccatcttcatagcgctctggccaaggccggccacagcggacagaacattgtaatccaccttgcggctgtaggtctggccgcagaccggcacgaccttggcaaaacccatctgggcgcagacatcggcctcaacggccttgatcttggcggaatcaccgctgaacagctccacaaagctggcttgggtgccggtcgtacccttgacgccgcgcagtgccagctggctgatctggtggtcgatctcctccagatccatgtacagctcgttcatccaaagggtggcacgcttgccgacggtggtcagctgggcaggctggcagtgggtataggccaggcagggcatggccttgtactcctctgcaaacttggccagattggccagcacgccgatgatcttcttgcgcacaagctgcagcgcctcgcgcatgacgatgacatcggtattgtcaccgacatagcagctggtagcgcccagatggatgatgccctttgccttggggcactgcaggccgtaggcatagacatggctcataacatcatggcggacaagcttttcgcgggcgatggcgtcctcatagttgatatcgtccttgtgggcctccagctcggcaatctgctcatcggtgatggcaaggccctgagccttttctgccttagccagtgcgatccacagcctgcgccatgtcttgaacttgttgtcgtccgagaaaatatactgcatctcatccgaagaataccgggtagagaagggggaaatgtaacggttgtgttgtgccatagggtcaaatcctcacaatctttaaaacttgtattttcagtatagcagaatcgttccgaaatatcaaagtttaaagtagttcacgccgccctcaaagatcggctggtatttgtcaccggtgacatttttgtaaagctgctcgccgctgcgctcactgtggcccatcttgccaaagacgcggccgtccgggctggtgatgccctcgatggccagtacagagccgttggggttgtagcgcatatccatcgtcgggcggcagagcaggtcaacatactgggttgcgacctgtccgttctcaatcagctggttcagcagcttttcgttgcagacaaagcggccctcgccgtggctgatggcgatcagatgctcgtcattgatgtcgcagcggctcagccacgggctcttgttgctggccacacgggtgcgcaccagcatgctctgatgacggtggatcgtgttgaaggtcagcgtcgggtcctcctcggtaatggggcggatctccccgtaggggacaaggcccagcttgatgagtgcctggaagccgttgcagatacccaaagccagaccgtcacgctggttcagcagccggttgaccgcatcggccacggccgggttgcggaagaaggaggcaatgaacttggcagagccatcgggctcgtcaccgccggagaagccgcccggcagcatcaggatctgcgccttatcaagctcacggacaagtgcctcgcagctctcggcaacatcggcgggggacaggttcttcagcacaagaatgtgcgggtcaccgcctgcacggcggaaggcacgggccgtgtcgtactcgcagttggtgccggggaagacaggaatgatgacccgcggcgttgccagacgcacggcgggagccacgcgcttgttggcggggcagtcatgctcaagtgcaggcacaaactcaccggccttgcggtaggggaaaacaggctcaagcttggcctcccacagctcctgcaggcgggacaggtcaatgttgctgccctcggcctccagcgtataatctacggtggtaaagccgaggaactcgccggcggaagcgtccagcagctccagaatgaccgcaccgtaggcaggcttgaacaggctgttcaggtcaatgtcattggacagctgcaggccgacatggttgccgacacacatcttgaacagtgcctcggccacaccgccgtagccgggggtggcagcggccagcaccttgccctcgtcaatcatctgctcaacggtcttgtagatcgcaatcaggctgccgatctcaggcaggccgttcttgtagttggggcgcagaataacaacagagctgtttgccttcttgaactcagggctctgcacatcgcgggtgttgccgatggcagtggcaaagctgaccagcgtcgggggcacatccagcccctcaaagctgccggacatcgagtccttgccgccgatcgaggcaatgcccagacccatctgggcgtccagcgcaccaagcagggcggccatcggcttgccccagcgctcgggctggttgttcatgtgctcaaaatattcctgaaaggtcaggtacatatcctcgtggtggaagccggcgcagaccagcttggtcacgctctcgaccacggccagataggcaccgcggtaggggtcggcctcggtcagataggggttaaagccccatgccatgccgctgcaggtggtggtttcgccgtcaacgggcagcttggcggccatagccatcgtgggggtcagctggtacttgccgccgtagggcatcagcacggtcgctgcgccgatggtggagtcaaagcgctcgcccagacccttctggctgcagacattcaggtcactgaccatcgactccagcttttcctcaaaggtgacaccggcaaactgcggctgccagacatggcccggcagaatatgtgcgctggcgtggcgctcggcaccgttggagttcaggaactcacgagagaggtcaacgatggtcttgccgttccagacctcgcgcatccgcttctcctcggtcacggtggcaacgatggtcgcctcaaggttttcctcggcggcgtacttcataaaggtctcggcatcctcggcagccacggccacagccatgcgctcctggctttcggagattgccagctcggtgccgtccagaccctcgtatttgcgggtgaccttgttcaggtcgatgtgcaggccgtcggccaactcgccgatggcgaccgaaacgccgccagcgccgaagtcgttgcagcgcttgatcaggcggcaggcgtcctcacggcggaacaggcgctgcagcttgcgctcgatgggggcgttgcccttctggacctcggcaccgcaggtctcaaggcttgtcagcttgtgcgccttggaggagccggtcgcaccgcccacaccatcgcggccggtgcggccgcccagcaggatgaccacatcgccgggggcgggttcctcgcggcggacatggctggccggggtggcacctacgacggcgccgatctccatgcgcttggcggcgtagccggggtggtacagctccgcaacctgaccggtggcaaggccaatctggttgccgtagctggaataaccggcggcagcggtcgtgaccagcttgcgctggggcagcttgccgggcatcgtttcagagacgggcttcagcgggtcggctgcgccggtcacgcgcatagcctgatagacatagctgcggccggacagcgggtcgcggatggcaccgccgatgcaggttgctgcaccgccgaacggctcgatttcggtggggtggttatgggtctcgttcttgaagaggaagagccagtcctgctgctcgccgtccacatcgcacttgattttgacggtgcaggcgttgatctcctcgctctcgtcgaggttcttgaggatgccgcgctgcttcagggccttggcaccgatcgtggcgcagtccatcagggtgcggttcttcttgtcacggccggtctcggcgcgcagcgccatataacggtcaaaggcggcctgtaccagctcgtcatcgattttgacatcgtcaatgatcgtgccgaaggtggtgtgacggcagtggtcagaccagtaggtgtcgatcagccggatctcggtgatggtggggtcgcggtgctcggatttgaagtaatcctggcagaacacgatgtcggcgtgatccatagccagacccttctcggtgcggaatgcctccagcgcgtcatcgtccagcgcggtgaatccgttcagcgtctcgacctcggtggggatggcgaactccatcttcagggtggcgcgctcctcaagggcggcctcgcgggcctcgaccgggttgatgacatactttttaatagcggccagatcatcggcagtcagctcgccgtccagcagatagacgcgggcagagcggacatccgggcgctcgccctgactcagcagctggatgcactggctggcagagtcggcgcgctggtcaaactgaccgggcaggtactcgaccgcaaagaccgttttggcctcgggcagggtgtcataggtcacatccaccggcggctcgcagaacacggtggggatggcctgctggaacagcgcgctgtcgataccctcgacatcgtagcggttcaaaaggcgcaggccggtcaggcttttgatgccgaccagatcgacaagctcatggagcagaccctgtgcttcgccatcaaagccgggcttcttctcgacataaatacgatataccatactatttcctcctgagagttgattttgcaggaagtggcggacggaaagccttcccccttgggggaaggtggccgaggccccgtccgaggccggatgaggggaaagtgtaccgctatatcccgttgacggattgctgcagaaagtttgccctcatcagtcaccttcggtgacagcttcccccgatggggaagcctttttactgcattgcggccaatgcccgtgcgccgatgtcgctgcgcttgtgcagcttgtcaaagtggatgctctcggtcgcggcgtaagcctttttcagggcctcgggcagggtgtcggcagtggccgtcacgcccagcacacggccgccgttcgtgacaaggcggccctccctgacggcggtgccggcgtggtagacggtcacatcggcagcgttcagctggccgttgtcaaggccggtgatctccttgcccttctcataggcaaggggatagccgccgcttgccagaatcacacaggcggccgcgccatcgcggaaacgaacctccgtcttgtcaagcgtgccgtttgtggtggcctccatgatggtcagcagatcgctctccagcaggggcagcacgacctgcgtctcggggtcaccaaagcggcagttgtactcgatgaccttggggccgtcgggcgtcagcatcaggccgaagtagagacaacccttgaaggggcagccctcggcctgcatggcggccaccgtgggcaggaaaatctccttcatgcagcggtcggccatctcgggcgtgtagtaggggttcggggccacagtgcccatgccgccggtgttcagaccctcgtcatgatccagtgcgcgcttgtggtccatgctggaaaccatcggcttgacggtcttgccgtcgcagaaggacagcacactgacctcggggccggtcaaaaactcctcgacaacgacatggttgccggaggcaccgaactttttgtccagcatgatctccttgacgccgtcagcagcctcctgctcgctctggcagatcagcacgcccttgccgagcgccagaccgtctgccttgatgaccacggggtacttgccctcggccttgatgtagtccatgaccttttcaggatcatcgaatgtctcatatttggcggtggggatgccgtacttcttcattaaatccttgctgaataccttgctggcctcgatgcgcgccgcagccttgtccgggccgaacgcgggaatgccgacagcggccagtgcgtccaccatgcccagcgccagcgggtcgtcctgtgcaacgaccacatagtcaaaggcttcatccttggcaaactgcaccatggcgtccacatcggtggcggggatagccttgcagcgggcatcatagctgatgccgccgttgccgggtgcgcaccagatctcggtgcagcgggggctttttttcagcgcgcggatgatggcgtgctcacgcccgccgccgcctacaaccagaattttcatgatgtgacctcctaacataaggcttccccctggggggaagctgtcaccgaaggtgactgatgaggggcggtcttgccgcaatatcccatgtgcgggtggctgcgatactgctgcccctcatccggcctcggtcggagcctcggccaccttcccccgcaggggaaggcacacctcttacaaacatcaacagcccgcgacgacaaaacgccgcaggcgcgttgaaaaaggcttagtggtggaacaagcggatgccgcagaacgccatcgcgatgccgtacttgttgcaggtgtcaattacctgtgcatcgcggatggagccgcccggctgcacaatggcagtcacgccgctgcggcgtgcgcgctcaatgttgtcgccgaacgggaaaaaggcatcgctgccaaggctgacgccggtcacggcatccagccatgcgcgcttctcctcagcggtcagcggggcgggctgctcggtaaaggtctcggcccacacatcatcaccgatgacatcctccggcgtttcgccgatatagacatcaatggcgttgtcgcggttgggcttggcaatatcctcgcggaagggcaggcccagcaccttcggcatgtggcgcagctgccagttgtcggccttctggcctgccagacgggtgcagtgtacgcggctctgctggccggcgcctacaccgatggtctggccgtcctgtacatagcagacgctgttggactgggtgtatttcagaacgatcaggctgatgataagatcacggcgctgctcggcgctcagggtcttgttctcggtgacgagattctgcagcatcgtggcatcggagatttccagatcctgacggccctgctcaaaggtcacgccaaagacggtgcgggtctcaagaggctgcggctcatagccggggtcgatggcaacgatgttgtagttgccctttttcttgcccttgaggacctcgagggcatctgcatcgtagccgggggcaatgatgccgtcggaaacctcatgctggatgagcttggcggtggccagatcgcagacatcggaaagtgcgatccagtcgccgaagctggacatccggtcggcaccgcgggcgcgggcataggcgcaggccagcggggaaagctcggtctcgggcgcaatgtggtacatggcgcgcagcgtgtcatccagcggcaggccgatggccgcaccggcgggggagacatgcttgaagctggcagcggcgggcaggcccagcgccttcttcaagtcgcgcaccagctgccaagagttgaaggcatccagaaagttgatgtagccggggcgaccgttcaaaatctgaaccggcagctcggagccgtcagccatatagatgcgggcaggcttctggttggggttggtgccgtatttcagctgaaattcgttcatgttagccctccacagcggtgtatttgttcagaataatatcctcatagctgccggtctccagtgcaatgctgcgcacaaagaggctgaccttgttgtcatcgttcaggctggcccacagctgcttggcaaactggtcggcatcgttcgtgtcgatggcaacgcgcagcggctcccccgcaaagctggggatgggcgcaccgttcttgacataggtgctgatgaaatgtccctcaccagccacaggctgggggtagtcgaaggtctggcgctggacgctggcggcgttgccctcgttggatttgacaatggagagcttgtagccgccgcggcgcatatccaccacgccggagatgcgcggcgtaaaattgggggcatcatcctcataggtgcgggtggccagcgctgcctcaaagctgtagccggggaagagattgccgttcatgaactgtgcaatcgtgtcggtctggtcgccgttggtcacaacggtggtctcccgcagggtcagcaccgcattgtagatgatcagatgcggatcctccagcttggcgggatcggcggctaccgtgcggatgccgccctcgatcggctcaaacacgcggttgcggctgttggcgctgcggcccatgatccaataggcaacaaataccttctggccatcggggctctgccccagcacaatgccgcggccggggtagtcgttcccggcaagatatttatagatgttctttttcatggtttatacctcgtcactgcacaccatggccagcgccttgggcaatagctgccactcggcctcgaccatgacgcgcttctgcaatgcctcgggggtgtcgccgggctgtacagccacagccttctgcagcaggatcggcccgccatcgcactcctcattgacaagatggacggtggcgccggtcagcttgacgccgcgggccagcgcagcctcgtgaaccttcagcccgtagaagcccggcccgcagaagctggggatcaggctcgggtggacattcaaaatccggttgcggtaggctgcgatgaccttttcgcccagcacgctcaggaagcccgccagcaccacgacatcaatgctgtggcgctgcagctcctccagcagggcagcatcaaaggcggcgctgtccgcatactccttacggctgacaacagcgctctccacgccaaaattggcagcccgctccagcgcgtatacgccgggcttgctggcaatgaccagcgtgatctttccgtcagggttttcgccgcggcgctcactttccagcagggcctgcaggttggtgccgccgcccgataccagtaccgctacacgcttcataccagctcgaccccgtcaccctcgacgatggtgcccagacggtaggcgtcctgaccgttggcctgcagaatttcgatggtcttgtccgcatcctcagcggcaacggtcagcaccatgccgacacccatgttgaaggtgttgaacatgtcatgctcggtgatgccgccctcgcgctgcattacctcaaacagggcaggggtgcgcacatcggccttggcgatgcgggctgcacagcccttcttcagactgcgggggatattctcatagaaaccgccgcccgtgatgtgggacacacccttgaccgtgacctgctccatgacagccagaaccggcttgacatagatcttggtgggggccagcagggcctcgcccagcggcttgtccatgccgtcaaaggtctttttcagcacatcggggtcattgtcaatgtcaaaaattttgcgcaccagcgagaagccgttggagtgtacaccggtggagggcagggcaatcatgacatcgccgggctgcatcgtggagttgtcaaggatcttggccttatccacaacgccaacggtgaagccggccagatcgtactcctcctccggcatcatgccgggatgctcggcggtctcgccgcctaccagagagcagcccgcctgcacgcagccctcggctacgcccttgacgatctcggcaatcttctcagggatgttcttgccgcaggcaatgtaatccaaaaagaccagcggcttggcaccggcgcagatgacatcgttgacgcacatggccacgcagtcgatgccgatggtgtcatgcttgtccagcagcatggcgatgcgcagcttggtgccgacgccgtccgtgccggagatcaggaccggatgctcaatgccggtgcagtccagctcaaacagaccgccgaagccgcccagaccgccaatgcagttctccgtcatcgtgcgggcaacatactgcttcatcagctctactgagcggtatccggcggtaatatccacgcccgcggcggcgtagctggcagaataacttttttccataatcgaaatatctcccttgcgaatggattcgtaggggcggattccctatccgcccgtgggtgagattgccgtttgcaggcgcataggaaatgcgctcctgcggttacaatttcttattcgggttcgacacgctcaacggtttgtcgtagatgatctccatcgtctcggtgggtgggttgaccggatatttgccggtaaagcagccggtgcagtagccgcagctgctgtggatgcccaactgctgaacatgctcaatgctcaggtagcccagcgaatcagagccgaccatctcgttgatctcctcgaccgtgtggccggtggcaatcaggtctttttcatcgggaatgtcggtgccgaagtagcaggggtgggcaaagggcggggcgctgatgcggtaatgcacttccttggcaccggcctcgcgcagcaggcggatggtgcgggcgctggtcgtgccgcgcacgatcgagtcatcgaccagcacaacgcgcttgcccttgacggtggcggagatggcgttcagcttgatgcgcacgctgctctcacgctgggcctgggtggactggataaaggtgcggccgacatacttgttcttgataaagccaacgccgtaggggataccgctctcctgcgcatagccgagcgcggcgtccagaccggaatccggcgcgccgatgacaacatcggcctccacaggatgctcttgcgcaaggaaacggccagcctgcaggcgggcctcatgcacgcaggtgccctcaatgatggaatcggggcgggcaaagtagatgtactcaaacacacacagggtgtggggggcggtgccgcagtgatcctcgatgctgcgcagaccctcgtggtcggcaatcacgatctcaccgggcttgacatcgcgcacaaatcgggcgcccaccgcatccagcgcgcagctctcgctggcaaaggcccagccggagccatcgggcagctcgccgatgcagagcgggcggaagccgtgcgggtcgcgcgcggcgataagcttggtgtgggtcatgatgaccagactgtaagcaccctcaatgtcatccatcgtgcggctgacagccatctcaatattgggggtcagcagacggttctgggtcagcaggtaggcaatgacctcggtgtcggaggtgccgtggaagatagaaccgctcatttccagcttgcggcgcagcttgggggcgttgaccagattgccgttgtggcagacggccatggcacccttgcagtgatgcaggatcatcggctgtgcgttggaccggctgcgctgaccggcggtggcatagcgcacatggccggtggccatcttggcaccatgcggcagctcctccagcacgcgcttggtgaaaacctcgctgacaaggcccagatcgcggtagccggaaagcacaccgtccacattcagggcgatgccgcagctctcctgcccgcggtgctgcagcgcgtacaatgcgctgtagacggcgctgaccatatcggtcgcgccggttttatcgtagataccaaagacgccgcactcctcgtgcaggccctcggcataatgggaaaattcgctcatcttttgctccatttatcggaatgttaaaaccgtaggggcgcataggaaatacacccctacggaaaaggcgcataatggaatgtgcggcagcctgagggcaggccacgctacacctcacctgtaaaaatggcttagcccagcaggcgcttcatgacctcctgataggcatcggcctcaccgcccatgttgcggcggaagagatccttgtccagatgggcaccggtggtggcatcccagaagcggcaggtgtcggggctgatctcgtctgccagaatgatggtgccgtcaggcaggcggccgaactcgagcttgaagtcaaccagacggatgttggcgtccagcatgatcttcttcagcacctcgttgaccttgaaggcgtacttggcgatggtgtccagctcctcctgggtggccagatcaagggctagggcgtagtagtggttgatgaacggatcatgcagatcatcgttcttgtagctgtactcgagaatgggggtcttgaaaaccttgccctcgggcacgcccatgcgcaggctgaaatgaccggcggcaacattgcggacgatgacctccagaggaacgatctcgaccttcttcacgaaggtgtcgcggtcgttgacttcctcgacataatgggtggggatgccctctttttccagcttctgcatcagagcgttggacagcttgttgttgacgatgcccttgtcgcggatggtgcccttcttctcaccgtcaccggcggtggcatcgtccttatagtggaccatgacgatctcgggatcattggtagaaaaaacctgctttgccttgccttcgtacagctgctctttgacttcgtagttcatgataaacgctccttttaaagattgatgatggataaacaagtgtgacggacttacagcgcggcggcctcagcggcgatggctgcgtccttttttgcaatggcggcggcggtgtcagcccggaacgcatccagcttttcagccagcgcgtcatcagccacggctaggatcgccacagccagataggctgcatttttggcgccgttcagcgccacggtcgcaacggggaacccgctgggcatctgcacggtggctagcagggcatccagaccgtccatggcaccgcccttcatcgggatgcccacaacgggcagcgtggtgttggcggcaaaggccccggccagatgggcagccataccggctgcgcacaggatgacgccgtacccgttggcgcgggccgacttcgcaaaggcggcggcagcctccggcgtgcggtgggcggaaagaatatgggcctcatacggcacgccgaattccttcagcaccgtgcaggcggacttgactaccggccaatcactgtcagagcccatgatgatcgcaacttttttcatgcggttagtaacctcccttacaaagcaaaacagcgcagtggcctgtcagggtacactgcgctgcggtcgtaatgtgaaaagggtatgatggtacagaacgcccgcgccaaaaccaagctgctgcattgcaattgccacggaagatcctcctttatataaagtaagatattgtcctgtggtttaagtgtaaactctgggaaaagaaaatgcaagcactccgcggacatttcagccaaactaccacccggccgggttttaaacggtactttttgtcgtttttgatgggttcttcagggcaaatgtcatactttgtataataccgcgaaatcctgtctgccgatacaccggaagctatgcggcagaacctgctgaataagtttcctgtaatattcggtacaaatttcgtctgcgtcaaaaaagctgcgcaggcaggtgttttcctgtctgtgcagctttggtaaagattgcgcccattatgcgtggcgctttttatccaggcggatcttgtccgaaatcatggcaataaattctgagttcgtgggcttgccgcggagattgtggatcgtatagccgaagtagctgttcagtgtgtccacatcaccgcgatcccatgccacctcaatggcgtggcggatggcacgctccacgcggctggcggtggtcatgttgcgcttggcaatctccggataaaggcgttttgtgacggcattgatgtagccgtggtccgcgatggtcagcaggatggcatcgcgcaggaactgatagcccttgatgtgggccggcacaccgatctggtgcaggatctcagtgaccgtcagctcgtcactgtcgagcgaggcaagctgcgggcgggccgtgttgcctgccgccttcagcacacggctgaccagcacggtttcgtcaaacggcttgacgaagaagaacgaaaagccgctgtccagcagttcctgctcgatctcctcactctggaaggccccggtaacgaagaaggttgtgcggatgctgctggtgttctgagcctcgtagcgctgcttgacagtgatggcgtccatttccggcataaaggcatccagcagcacagcctgcggatggatcgtcagcagggcctccagcgctttggcaccgttcttttcgcagacggtcaccgagacgcccttttcctccagaacatggcggcaaagtgcagacacttgcgggtccgtgtcggtcattacaaatttgatcttttccatcgtcacatatcctccatactttctgagttgcgcgttgtccgcgcatcgaccccattttgttgggttgcctcgtttacaatggaaattttaccataaattaccagctttcgcaagtagttcgacacgacttttctctaatttaagcaaactttcgttcgacagttttctctctttttcgccgtatttcggcacggatttacacaatcctgctcacttttacactttttgcacgctgtcggctgcagggtgcggcggtcaggcatttttctgcttttcccggcggtgaagtcaggcggcagcgtctgccttttccagcatcgttgccgcaaagatcgcataccccttcgcagggtcgtttaccagcacatgggtcagcactgcggcaaggcggccgttctgcacaatcggtgagccgctcattccctgtacgataccgcctgttttttcgagcagcgcctgatcggtcacgcggatcagcagattgcggtttgggtctgttccggtcatagtcacccgctcaatgcgcactgaataggctttggcggccgttccctccacggtagcccaaagctcggcggggcctgtggtgacctcctgcaggttggcaacctccacgcattgccccgctgccgggccgctgtagctgccgtatacccccgccgtatcgttggccagcactctgccaatcggcgatgccgaaaactccccgcgcagctcgcccgggctgccagcggcaccgcgtatacagcccgttaccgtcacaggcacgatctcgccggatagcagtgtcaattctgcgccggtgtcggtatcgctgatggaatggcccagcccggcaaaggtgccgtgcagtgggtcgataaagctgagcgtcccgatacctgcccccgaatcccgtacccagatgcccgccttgtagcagccgttctcgtcccgggtcggcgtcagcaccgccgtacattggctttcgccgcgtctgtaaagcacagtcagcggtgcaccgcccgccgcctgtatggcgctggtcagatcctcattgctgcgcaccggctgcccatttgccgagatgatgagatcacccagccgcagccccgccgccttggcgggattctcgctgcccagcgccgtgtaccggtcagagaatgccacgaccagtgcgccatcggaaaacagcttgaccccgaagggcgtaccgcacagctgcaccgtgcgccgcgccgtggtgactgcgcgcaccgtcttgacaggaaccactccgaacagtgccagcgtaacattgctgcttgtgtcgggcgcggtgctgtccgcaggcacagcgccctgctctttgcgggcagaaaggtacggcagcgaagcgatgcgcagctctgctgccggttcatcggtataaagtgtatccggcaaagccgctgccagcccggcaatgactgccgttcccagcagtgccagcagcgcagccgctgccgccgccaaccgccattttctttgcatctgcatccctcactttgggatagcatgtgcagccaacaggcggattatgtcggccattcttcactaggcaacaaaaaaacagcgcagataagcaattatgccaatctgcgctgttttatttatggtgcagttgagcaatccaaatccgaacctgttttctgatcggccaatgcggttttgaggtcatcaaacgtgatggtcgttgccccttccttatagttgaaggttatcaccattttgtcatcgtacaggaaaatcgcattgatgaaagtgtcaatcaacatcttcctgtgggacttctgccgcacatccagcttgcggaaacggtgaagccagaaggtcataaactcggcgctgacctttggcttcgccagtttctcgcaggcaatcttggtttccagttcctctttcgtggcttccagttcttccaggcggccttttgtggacttggtcaagatcccctgctggatggcattcagcagattttgaatggccgtgtccgcctcccgtaactgctgttcatagaggggcaggttgacattctccctgtcctgcaaatccatcagcatggaaacaatggcctctgtcgcctcatcgtccatcactatcttcatggtttcgcttaccaccaaatcttcaatccattccttgcggacagatttcttgtggcactcggtacgcttctttttcacggacacgcacttgtagtagtggtggacattccctgtgtggctggtgccgctctcaccgcagaggtaggccccgcaatagccgcagaacagcttggttgtcagcagataatcgtcctcggccttgtggcgggccggggctttcttgttctttgccagtttctcctgcacccggtcaaagaggtcttgggggacgatggcgggaataccgtccggcaccacaatgtcccgataggtgtactccccgatatagcggcggttgttcagaaggtgctggacgctgtcgtaggtcatcttttggccgcgagtattcttcacgccctgctcattgagccagtcccggatttgggtcatagtagctccctcatcgtaacgctggaacgcctctcgcacaaagggtgcggtcagtgggtcaagctgaaaatactgttcgctgtcgatctggtagccaataggcagagtgccgccgttatatttgcatttcaaggcgttctccgtcatgccccggacaaccttttcggacaggtcggcggagtagtattcggcataaccctccagcacgctttccagaatgatgccctcggccccgtcggaaatgacctcagtggcggacaccactttgaccccgttctttttcagagcggccttgtagcgggcgctgtcgtagcggttgcgggcaaacctgtccagcttccagacgataatcatatcgaacaggcgcttgccactatctttaatcatgttctgaaattcagggcggttatcagtcttagcggaaaaggccctgtcaatgtagtggcgcaggatggtgataccgttcttctcggcaaaggcagtacactcccgaatttgcccctcgatactttcctctcgctgattgtcggaggaataacgagcatagatcacagctttcatattctcacctcgccgcttgttaaaatacccatcatttgacttgcctgcacgatccgttcaaaagcttctctttgtgagcaagttagatttgcgtgcatggaggggttccggtaagccataaaagcaccctcaaagatagacttaacacctttacgaaaattggctccgcttatttctgatgtatcgcaaaactgatagaagccattgtctgaaagtaatgcgccaattaaacccgctgcatctttaggaatgggagagttaggttttccttccttaaacaattctcgcattcgagtttcaacttctttaatggcggcttcactggcggcggcaaaatgaccatcgcaaaacagcccttttgaaacagcaatgattcgcgggtgaatgtcctgccaaaaccgagtatctatcggttccgaagaaatgtgtttgataattataaaaagctctccaaacgcggctgcattcaacagcatcatgccataaggaggctggggagcagaaaaaagtctgttctttatctctaataattcatggccataaaatgggtattcgtactgaatatttgtcgaaatcgtctgcaaatcattttgtattctccaacaatcggtttgtaggaacgctggtaaggctcctgttgaaagttgggcgttggtacgctgtagccagtcttttattgcagaaatttctttttcatatataaccttcattctccatcctccatcatgcggaacagggtttctttcaatttctcattcatgggagattgcggatcaaaacacatctcaataaagcggcgcatttcctcacgctctggagcggctttaggcttaaactcgtatattactccctggggcttgtccgtccgggcaaaaatataatccaaagatacatcaaagtaatccgcatagcgacggaacagttctactggcggggtggactggccattctcatagcggttgatactggactgtgtggagccgatagcctcggccatttttaactgcgaaaaaccaacactttcccgcagggccttcaaacgcttacccacttctttcatctttcaacctcctattcgggttaattttattataacccgaataatacaaattttcaactcggaaataaaattttctctatgcgttttctcccatctcggcccgcaggccgaataaagaaacggcgcagaccagcccacaattcatggactaatctgcgccgtttctttgggttatggatggggtgcggacatagatgcagaaatgcaatctgtggccgcacaccgacaaaaccgggggtttccaaaggggggctatgcctcccctttggcacacaaccttgcttgcaaggtgtagtgtgttatacctgctggcgcggctgacaggggaaagcgggggcggtgcggtttgcgccccgcttccctcggcaggaaaacgggcggggttttgtgaccgggagggaacaaaaactgtccgttttcagagagcggcagcaggtatacaaagtccccacatgcaagcggaaacaacaatattatctatttattatctttccaacatttttgatagaaatagatattgttccgttcggattatttataaattctatgtattcagaattatcaaaaaaatcagagggtattgttatttcaattcctgtatcagttttaattttatgctttttgccttcccgaatggcataggttcgttcgacgggaatagataccgggataccttgttgatggatttgctgtacaaattcttcggcaagttcatcagattcaggaaaaaccatatggctcaattcaactgtatctaggctgtcggaagtttctgcattttcggcaagaaaagccttcgttctggaaacaatagcagcgctatttttgccatgctgttccgacaactgcaatgcaatgttttttacagcgctgactgcggccttgggcgaaatcgaatttgtacactctaaaatgaagttgggtatgatcgacacatctttcccgtcaaggaagcggcgttgatccatatatctggcacgaagtgtttctgcgttaacaaatgcaaaagcggatatcttttgagagggagttggtagtatggaataatacttgataatgtcgtttctgaccaaattttctccttgcgcaacttgatgtgtaaagccaatttgatttggaaactcgacaattccgatatagcgctcgtcgtttttctcaaaatcacatacaacacaatcgatggatgccgtattatctgtttgtgacagataagaaaatattcttctgcaaaggtcaatggaatagtccacaaagctagtattctcgtttttgtattgtgatagctttgtggcaaaatatccggtagaacttggaacatccacaatagctgaagaatccttaaatgctttatctatatgtttagttagatactcggcaacatctttttgtgtgcaatcaagtccttcttttgagtaaacagtaacaccagaatgttggtcaaatacatgaagaattgcattgttaatctgaatcatcgtcatttttttcctcgctttttttgttttcctctacaaatgaaagtattttataggctaaacttgccctaaaaagtaagactgtgttataaatcgtacttttcaattcgtagataactctaagcgaaaaagtataatagataagaagcaacgctattgccattatactattcgctaaatcagactgtgtgaggatataatcgtaaggcatacaagacaaaaacagctttagtattaaagataatataatcgcaacaaagtacataaaaagaactgattcaaaataccttgtactcgttttaaagtagcttgaaccgtctccataatcaatatttaacagctttttaatatagctgtcgcttaaaaatgcaagcagaattgaatagactgcaaaaatgcaagcaaatatagacagttgaacaccaaagagaatgtcacaagtttgagcggctaatgcaaccgtattctccgcacatccaacgatatacgccaacaccgccccaacgcataggcaaagaacaaatccaaaccaattctttttatttggcaacaattcccgcattgatgtgcatataagcttgtaggcaggactattatccacaaagtcaccaatggaagaaaagtacggatcatcattcacagaacatcacctcctcttttgcaagccaatctgcttaatctcttgacattagtcgagtcaacatagcttttgctctttcatatagcgtcgcattttctgggctcaccgtggaaataatgccatccttttttgcttgcatgacaatatatgtatcaccattttcttcaatgttatctcgatatggtattgtcttgcttgatgagaacgcatcttctttaatccgcctcgtttcgccatcagaatcagttaccttcattgtagtgatggccaaaccggcagtactttctaacacatctttgactccagctttagagtcaggagaattgaatactaaattacctgttcggcttcccacttttgccatctcgtttttcattgcttgtgcaatcggcagtggatcaaggtcgttgttcaacgggaaaaaccgcaatttcagccaattaatcttgtttatatttcttaaaacctcatcaatactatctttgaggggaatatcaacaatatttacaatggcaaagggtagtttttcttcttttgccttgccacgattttgtgcgtgtgtgtatttactcagaatatcgcgaacggttttctgaaagctacgaatatcgggactgcccgattcattctttacaagcaccattctatggtttttcagaaaaatgataaagcgtgaatatggtgcagtcggcacctctgctggagaaggaacaagattaccctcttgaacagttgtgaccactctatactcagtatctttaatgtaattgcccacaaggacatgctcgttgtcaatcatctttatcgtcacatcgccaaaggaatatcgcggcaactcattttcttttccacggatatatccacctgtaaatgcagggaatacgatgtcctcaaaatgcatcagcatcgcttcttcattttctccaaaggtgatattaaaattagcaaattgaatggttttttcttcaagcataaacgacatcctcactttcaataatttaagtatccctttaaataagcaaaataaaattcgacttctatatcaaaccacagcgtaacatttttgcataaagcacttccacgctcttcttttttagctcgcattcccaaatccgcaacaccgtccaaccgcgagcctcgaacatggccgttacttctttgtcgtgcttcatgttccgctcgcgctttttctgccaatactcctgatgattgaccgggcgagtgtttcggcaatcatgtccatgccagaagcagccgtccacaaacacggcaatctttttctttgggaacacgaaatcgggatggccctttactgggtagtttctccgccaacctgtgattccgttctgcttgaatatttcaatcagccgcagttccgtggacttgttctttttggacttgacctgccgcatgatgtcagaccgcttttccgcatcaaaaacatctgccacgacaaatcacctggcttcaaattctatgcggaggctggggtcagtctccgcttccagcacaatcttgttatatcgttcgatgatgatagagagcgtagagttccgcttggtctcgtcaaagaggctatgttcatagacgtttgcagacaagaactgctgaatgtcccatacttcgacgcgcccggccagaccggcgtcctcggcaagattgagagcggtatgtacgcgctcaaaaatcgtgatgataacgggatggcaaccggcgcggaggttagccctgcacttttcgatcagcagcgcgccaggcatggtcgtgcaatggataactgtgttgccaatgacaaagtcgccgttgcgatccgtagggccgtcggctacggaagcaccgtggatttcaaaagaatcttccggaagaatcaagcaaagtttcgctgccacaagatgctgcaacactgtgccgagatactgtgttccggcgttctgcttttgacgctttttcgcctgatcaaatagttcatccagatttgcgccgattgttttagaagtatcggcggtcagaacaaacggctgatttctaaagtattcgcgtacctgctcggcccagaagtcctcgactacggaaaaattcacggattcttccgcgttccatgcgtttagaaagtccacatacttaatcatcaagcccatactgccccggctggttctgccgccttcggaggacaactgctgagtaatgccgtgttctttcagtatctttttcagattggctccgccaagcccagcgacctgtcctttactgctcgtttggaagtcgtcaggattcagcggaaaatccttatctctcaccatacgagtaaactgtacgaccaaagacagcggccccttcgtggtgatatggttttcagattgaaacgctttcaagcgttcttcggaactaatcatcgtataccgcctccgcaattttggttaagaatcgttcccctataaaccgagcgaccggcgcggccacagcgtcgcccatcgccttatatccgtcattgtagctgccgggaagcacaaaactgtccggcgcgcccatcaatctggctgcttcgcgcacggtcaagaggcgcgcatgggtttggccgttcttcttgacgaccaaatactgtttgctgctcccgccttccggcgttcgcaggcaaccggcgatcccatcaaagcgtaactccaactgctgtgttccattccgcgtcctgcgatagcctgtggcgcacacggtatcgagcgtgcgtaattttgtttgatgtcgctcaggaaccagccgtaaaacatcgtctttgtcaaaggttgcgtcatcctcgacaatatctttgagggacacaacgcggcgcggaggcctttccgtatgccaccaaacccatcctggcagttcgcgtcctaactgcgttgcggcgttgttgtgcagccaacacggcccgcttcccaccaattcccctggaattggacaatcttcctgtacggcgatgatgaataccctgggtctggattgaggaacgaaatgggaagcgttcagcaaaacagctccacagcgatacccgcgctctacgagcgccaaatggagaactcggtaattatcgccgccgtttgtcgaaagtaatcccgccacgttctccaacagaaggatcttcggtttattgtccatctcatccagcacgcgcagccattcccaaaccaacccgctacgggacgcatggattccgccgatggaaccggccagagataaatcctgacaagggaaactggcccacgaaaggtgagcgaagggcaagacgcttcctttgatgttcttgatgtcgtcaaggataaaccgatcgcacccgaaattagcttcgtagacagcggccttctgttcgctgatgtcattcgcccaaacaggcgcaaacattccttttagaccatacgcaacgagaccgctgccggcaaaaaattcgtgcatcgtccaaggagcggcagatacgtcaatattctgtttttgatacatggtgctttgaagggccatttttctccctgccttgtcctcgtttatcgtttgtcggcttttctgcgttttccgggataatccaaatacggctcatccgcgccgcgcctgttatgcgattttctttgcataatatctggacttgccgcggggttataccccatttttcggcggcttcttgaaccgttatatacccattcacttgcgacacctcataatcactatggatgcatactctaaaccaagtatattatattcgctcaagcgaaataaagcaagtcccttcgcaagaaataaatcggctcggcaaaaaatattttgaagtacaggaacaaaaggtatatacttatgtcgttattaatttagatagatcgattttgaaaggaggttttgcataatgccatctgtctacaaattcccctacgacaccaatctccgctatctgccccttgtctatctcctgccgcccgatctgcttgcgggctgtcccaccctccgcaagctgccccgcagcatgggcgggctgaacgcttcccccgagtgggccgaggccattcagagcgatgcctatctaaaggagatcatggacgccgccgctgcgctggcctttccccacttcggcttcggcggctggaaagagcattacacgggctatttcccggtgtggcgcttgtcctactcgctgcccctgtgggcaaagggcgtggaacgggagacaggctggggcctgcaagcgatgttccgtctgccgcccgactttgaaatacccttctttgacccggagtatgtgcgggcgctgtttgaagcggtggtgaaacaggccatcgaggaacagggctggcggcccatgctggaagcggtgcgggaaatgccctgtgacgaggattttgagccgtgggacacaaatgcccggaaagatttcctccgcaagtggtatcacacacgctccaaaaaggttcagacggtttcattggaagagctgatggagagcggcgaggacgacagcattttctatctgcccgacccatcccaaaatgtggaggactatgtgatcgccaaggactttgtggagcggttccttaccaccctcccggaacgggacaggcagatcgttcagctccgtcaggacggatatacctatgtggaaattgcggacgctctggggtacggcaaccacagcggggtcatcaaacggatcgaggccgtgaaaaagaagtatcgggactatcagcgcaaggcgtaagccacgcagtcagaaatgacgggcgtggcttttttgcgctcaaaaatcaaaagaaagaggtgtttatcttcaacatgaaaaatttaccgcctgtggaacggcgggcggacggctccctgtaccacatggacagcaagcagcggcgggagacggtgcggctcatcaagggcctgtgcagctactacgacaatggaaattgcctgtatctggacaggggcgaggcggtcacttgcccccagagcaattcttattccgtctgctgcaagttcttccgccatgtgctgctgaaagatcaggaagggaaaggattggaagctgggattttccagtgggaggcgttgaaacggtgcgccgtctgcggcaagcccttttcctccacctccaacagtgccaaatactgcggggactgcaaagcggcggttcagcggcagcaaaaggccgcatacgcccgccgcaaacgggcggagcgtggaaaagtagaggctgaaaaaggccggtaaatcagggcttttcagccctcaaacagacaagtcaatccgttatcattcacacccccggaaacggggttctatttttctacacaggaggttttatggcacaaaaagcacagcacgcaattttacgcttcgccaagcacaaggcggggccagctggggcgctggaagcccaccatgagcggacaaaggaacagtacgccagcaatcccgacattgacaagagcagaagcaaggacaattttcacattgtccaacccacgcagaaataccgcaaggagatcgacagccgcatcaaggcggcggggtgcaagacccgcagggacagtaccatgtttgtggacactctcatcactgccagcccggagttcttcacgggcaggagcaagcaggaggtgcaagcctacttcaccgaggcggcggccttcatggaaaagaaggtcggtaaggacaatatcttctccgctgtggtacacatggacgagaaaacgcctcaccttcatctctgttttacccccatcacggaggacgggcggctgtctgcaaaggagattttgggcaaccgggcgcagctttcaaaatggcaggacaagtttcacgcccacatgaaaaaggtgttccccgtcctcaagcggggcgagagcgcccttgtcaccaagcgcaagcacattcccacatggttgttcaagcagtccgtagatctcacccggcaacagcaggccatagaaaaggcagtgtcggaaatcggggtgctgaacgccgggaaaaaacgagacgaaattttggagatggtggggccgtacttctcccggctggaaaagcatttgggacagatgaagaagtaccaagccaccatcgactatctaacgcaggagaacgagggcctgaaagaaaaggccaacagcgaaaagagcatacagaagcagatggaagtgcttatgctaaaaaaggaaaacgaacaactccggcggtttgtccagcgcatacccccggaggtcaggcaggcgctgaaagaacagcagcagggccagcggcgggataaagaccgccagcggtaacttgttcttgagaaacacggaggtacatttgggaagaagaaaaaagctgatcaataactccgacattccccagcaccagatcgaagcaatagcccgctgcatcctgccggacattctggccttctatgagagcgaggaagggcagcgggagttttctgaatggaagaagcagagagaaatggagaagcaagcggcaaaaacagaataagggcatagcaaaagcggggtgtcatccgaaaatggtgacaccccgcctttttgcgtttatatgaatttcttctttttccgtggtcctcttggcttggaagtcagtttgcgcttcactccattgcgaaaataggcggtttcgtaacggtcaaagaaaacaaataatccgaacccatctcctatcggaaacaagttcggattatattggcttggtgcagccaacaggacttgaacctgcacgtcttggacactggaccctaaaaccagcgcgtctgccaattccgccatggctgcacagcagtattagtgtagcaactttggcgtgttttgtcaatggtcttattccgccgtatcggccggcctatcggtcggaatgacgccgcttgcatcggcgctgacagggtcggcataaacggcgtagcgctgggtcgtatgggtcaggataccgaaggggtagcaggtgtacagaatgacgctgggctcggttgcccccagacgcaccttgtcaatgtcggtttccagaatgacctgcatgtcggtcacctgataggtgaaatcgccccagtcggtttccagatggatcattgccccaagctgtacggagccgaggtctgagaagtaggtgcccgtgtgcgcaccgataagaacggtgccgttctcgccgggcagtacgcagtcgctctcggcgcggcagccggcgccccggctgaactggttctcgctgtcgccccagtagagcgcacagtccaccttggtgccctcgacccagatgcggcccaatttgtccccgtaagcaaccgtgtcatgcgcggcctgcgcggcatcgacctgctcctgccgctttgcggcggctgcctccgctgccagacgctccgcctctgcggcgcttgcagcctcgctggcagcgcgggctgcctcctcctcggctgcttttgcggcagcctcactggcagctgcctgactggccgcagcggcagctgcctcggcctccctctgccgatttttggagaggaccagcgccgcaccgatgccgatgcagaccgccagcgccagcgcgcagagggcaagacatctcgtcagccgggggttcatgtgcggctctcccgagcggcaaggtaggcggcagggccgctctggtagagatcgccgccgtgagcatccagcagaacggtcagcgggaaatcccggacgaccagcctgcgcacagcctcgcagcccagatcaggccatgcgatgacctcgcagctctggacgctgtcggccataagggcaccggccccgccgatggccgccagatagacggcgccgttctgcacgactgactgcttgacggcctcgctgcgcttgcctttgccgatcatacaggcaaggcccagatcgagcagccgcggggtgtaggcatccatccggcccgaggtcgttggcccggcggcaccgatggcacagcccgggcgctccggcgtggggccgacatagtagattgctgcgccctcgatggggaacggcagctgcttgccctgatcaagcagctccatcatgcgggcatgggcggcatcgcgggcggtgtagaccaccccggacagcagcacggtatccccggcccgcagcggtgccagatccgccttggaaagcggtgtttgtaaaatgtattgcatcagcggccctcctgttcccgcgcacggcggcgcagttccttgtattcctcatggtggcggttgacaaattccagctctgccatcgtaatgtcgagcggctcggcgcgtttgccgtcctcatccagcgggatgtctatgcgggaggcttttcgctcctgcgacgggtgcgccttttcctctacttcgtccagcggaatatcaatggtcggtttcggcatcggtcacacctcccggctggcgcggcgggtcacatggcagctgatgttgactgcgaccggcagacaggccacatgggtgggcttctgctcaatggcgacgcccagacaggtcgtggcaccgccaaagccctgcgggccgaagccagtcgcgttgatggcatccagcagctctttttccagcgcagcgtaatacgggtcggcgttcggcttgtccagcgggcgcagcagcgcctttttggcaagggctgcgcaatggtcaaagctgccgccgatgccgatgcccagcacaatgggcgggcaggggttggcccctgcctgctccaccgtatccagcacgaattttttcacgccctccacgccgtcggcaggcttgagcatggcaagacggctcatgttctcactgccggcgcccttgggggcaacggtgatcctgcagccactgccggggacgagatgcacggtcaggaacgccggtgtattatctcccgtgttgacgcgctgcagcgggtccgctgtgatggacttgcgcagaaatgccttttcatagccgcggcgcacgccctcgttgacggcctccgtcagatcgccgctgatgtgggcgtcctgccccagctcgataaagacacaggccatgccggtgtcctgacagatgggcagctccttatcggctgccacgaccagattttgctgcagcagaccgagtgtctcgcgggcgagcggccacggctcggcagcctcagcctgatcgagcgccgccttcacatcggagggcagctttgtatttgcttcgatgcagagtgcctccaccgcatcggtgatggcagcagcggaaatttcacggatgctcatacgcgcgccacgccgctttcccgtgcagcctgtgcaacggctgcggctacagcatcggccacacgggggtcgaacgccttgggcagaatgttttcctcgttcagctcatcgtcagggatgaggcccgcgatggccttggcggctgccatcttcatggcggggttgatgtcccgggcgcggaccgagagcgcacccttgaagatgccggggaacgccagcacattgttgacctgattcgggaaatcggaacggccggttccgatgacccggacgcccgcctgtttggcaaggtcaggcatgatctcgggcgtggggttggccatggcaaagacgatggcatcctttgccattgtggcggccagctcgggggtaagtgcccccgcaatggaggtgccgataaagatgtccgcgtcccgtatggcctcggccagaccgccggaaattttgtcggggttcgtctcctcggccagcttgcccttgtgaccctccagcccggcggggcggccgggcagcaggatgccgtgctcatcgaccgcgatgatgtttctggcacccgcgacctgcagcatgtggatgatggctgtgccggcggcgccggggccgttctggacgatcttgacatcctcaatgcgcttgccaacaaccttcagggcgttgagcacacctgccagcacgatgatggcggtgccgtgctgatcgtcatggaacacgggaatctcaaggtcgcgttcaagctctgcctcgatctcaaagcactccgggctgcggatatcctcaaggttgatgccgccgaaggtcggcgcaatggccttgaccgctgcgatgacctcctcctttgtcttggcgttcaggcagatggggaacgcatcgacaccgccgaactccttgaaaagcacgcacttgccctccataaccggcagaccggcctcggggccgatgttgccgagccccagcacggcggtgccgttggtgacaacggccacggtgcggcccttcatcgtgtaagtatagacatcgtcgggattcgccttgatcttgcggcagggctcagccacgccgggggtgtaggcggtggacagcgcatcgcggtccttacattcgcaaaggctctgtacggcgatcttgccggggaatttgctgtggagttcaagcgctgctttgttatagtccatggggatacctctccttactatataattttactttccgtaatggtgctcggtaggggccggacatgtccggcccgcagccttgccgccaaatcgctatggattttatgttgagggcagggcatgccctgcccctacagagttacttcttttattcatggtgtaccggcgcatagtccggttccagctttatgacgcagaaatgatcaggccatttttcctgcacggaattgcgcagggcgctgaccagcttgacaccgcggtgctgcttgtcggtcatgtactcggcaggcacggcgcagtcaaagatcacattggtatgggtcgggccgggcacgatgcgcaggtcgtgaatgttcgccagcggctcaagcttgcggatctcctgctgcaagaatgccttcagctcgtccgcatgggggtcgccggtcacgaccgggtcaaagtgtatcgtggcgatcaggccgtcctgtaccagcaggtcgcgctcaatgcggtcaatgacatcatggctgtgcatgacatcattcttggaatccatttccagatggaagctgaccaaccggctgccggggccgtaatcgtggatcatcagatcgtgtacgcccagcacaccggggtagctcattgcctttctttcgatatgctcgaccagctccgggtcgggtgccgcaccgagcagcgggttgatggtatcgcgcacaagtgcagcgccgctgtacaggatgaacgccgccacgccaaggcccatcaaaccgtccagacgggtaaagccggacagttttgtcagcacggtggcagcaaggactgcggctgtggtgatgacatcgttgcgggcatcggcggcggtggccagcagagtctcggactcaatatccgtgccgattttgtggttgagccttgccatccagagcttgacaaggatggaggccgccagcaccgcgaccatgacccagttgaagtccacagccgtggggtgcagcacctttgcaaggctttccttcagcagctcaacgccgattacgaggatcatgaccgagacagccagcccggccagatactcataccgggcgtggccgtagggatgctctgagtcggccgggcgcgcgccaagcttaaagcccagaaggctgacgatgttggagcttgcatcagacaggttgttcataccgtcggcggtcacggccacactgccggtcaatacgccgacagcgatcttgccgcccgccaaaagcaggttgcataccacgctgacgatgcaggccagattgccgtaggccgtgcggacggtgcggtcctcggtcttttcatggtttttgataaaggtttttatcagaaattgtatcaaacaggaacgcccctttttagaaaacggcagaccgtgtcagggtctgccgtttgtatggatagtattgatcgggcgcgatttagtcgcggacgatgcaggcgtcgcgctcgggtccgacagagatgtacttgatcttgcagccgaccagctcctccaagcgctttacatagtcctgagcagccttgggcagatcctcaaacttgcgcacaccggtgatgtcgcagtgccagccgggcacagtctccacaacaggctgggcatcgtccagcgccttgcccatcgggaaacgggtcgtggtggtgccgtcggtcagcttgtaggcagtgacgatgggcacctgctccatatagtcgaggacatcgagcagggtcagggccagttcatcgcagccctggcactgtacgccgtagcggcttgccacagcgtcaaacgggccaacgcggcggggacggccggtggcagcgccgtactcatggccgtgctcacgcaggacatccttgtcagcctcggacatagccagctcggtggtgaaggggccctcaccgacacaggaggagtaagccttcatgatgccgatggaaaggttcagcttgtggcccgggatgcctgcaccgatgggggcgtaggcagacacggtgttggaggaggaggtatagggatagatgccgaagtcgatgtcgcgcagcgcgccgagctgggcctcgaacatgatcttcttgccctcgcggtcggccttgtcgaggtaatcgcccacatcgcagatgtagggggcaaacagcttggaatatttctcgcaccatgcccacatctcgtcaacgctgacaggcttctggccgtagatcttctccatggtcaggttcttggactcaacaatcgtctccagacgcttcttgacgccggcgtccatatggacgaggtcgcccatgcgcagggtctttttcatgtacttgtcgccgtagctgtaggcgatgccgcgcttggtggagccgaactgagcgccggtcttggacaggcgctcctcctccaggccgtcctgtgccacatggaagggcatggtgatggtcgcgcggtcagagattttcaggttcttggggctgatctcaacacccttctcggtcagggaggcgatttccttctcgaggtgctcggggtcgatgaccatgccgccgcccataacgcagacaacgtcggggcgcagaatgccggagggaatcaggttcaggacgaatttgccgcgctcgttcttgacggtgtggccggcattgtcgccgccctgatagcgcgcaacaatgtcatagttctggctgagcaggtcgaccatgcggcccttgccctcgtcgccccagttgatgccggtaatggaagtaagcatacgtttctacctcttttgtaagtaaataggcatttcagccttttccggaatccccgggatccgctgccgtttactattataacatagccgtcaagggattgctatagcctttttgtacaagatttcgcggcagcgttttccggcggcggggttttcatcagattttcattttactttttcaaaaaagagtgtataatgttgtggtatgcaattttataaagaaacaggagatacccatgaaactgactcatatccatcgtctgacggcccttggtctggctgtcggcatgaccgctgccctgaccgcctgcggcaagggcaaggacgaggcagctgcctccaccgctgagacggctgcaacctccgacaccgccgccaccggcgagaccgccgatgattccgcctacgcttatctggctgacttcagcttttccgatgcgtttgatgagaacggctacctcaagggcgtgaccgctgccgactatgtaaatctgcccgatgactacgccgacatcacgatcagcgctgatctcggtcaggtcagtgaggacgacatcaccaactatattaatacgaatgtccttgccagctttgccaccgacacgcaggtcaccgaccgcgccgcggcggacggcgataccgtcaacatcgactatgtgggccgcatcgacggcgttgcctttgacggcggcgacagtcagggcaacggctacgacctgaccctcggcagcggtacctttatcgacggctttgaggatcagatcgtcggccatacccccggcgagacctttgatgtcaccgtcaccttccccgaaaactacggcaacgcggacctgagcggcaaggaggccgtctttgagacgaccctgcactacatcaaggagtccgtcaccccggagctgaccgacgactgggtgaaggagaatctctccgccacgatgaacctgaacaacattgacgagctgaaggcgtttgtcaagagcacgatgctctatgacaatcagtccagcgaggtctactccgccctgcacgataaggtcagctacaccgatgagctgccccaaattgcgctggactactaccgcgatgtgctgctgtaccgcatctacacctacgcgcagaactacggcaccaccatggacaccctgctttcctccggcatgatgggcagcagctatgacaatgtggacgcctaccttgcggatgcgcacgacagcatccgctccatcacccagcaggccctgctcatgcaggctgtggccgagaagatgggcttccgctgcgacaccgcaacgatgaacgccgatttcggccgctactacggcacgaccgaccccacccagtatgtgaccgcctatggcgagaactatgtcaagatgaatgtgctgcagagcgatgtaatgcagaacctcatcgacaatgtcaaatatgagtaagcggttttgaccgccccatgcccccgacacccgccgggggcatttttcttgctttttgccgcaaaagtctatataatagtaccatccaaacgggccggcaccgccgccgcacccggattctgagttagtaaggagtcttctcccatgccgctgatcatcccgaaaaacctgcccgcctatgacgagctgcagcaggaaaatgtctttgtcatgcatcaggagcgcgccatgagccagcatattcgcccgctgcgcatcctgatcctcaacctgatgccgaccaagatcgtgacagagacccagctggcccgcctgctggcaaacagcccgctgcaggtgcaggtcacctttttgcagactgccacccacagcacgacccacaccgcacccgagcatatgaaggctttttacaagacctttgatgagatccggaacgagcgttttgacggcatgatcatcaccggtgcccccattgaggatctggactatgaggccgtggactactgggacgagctttgccggatcatggactacaccaaggagaatgtctactcgacgatccacctttgctggggtgcgctggcgggcctgtactaccattttggcatccccaaggtgcatctggacaaaaagatgttcggcgtgtttgagcatcgcgtcacccgcccgtccaacccgctggtgcgcggctttgatgaggtgttctatgccccgcacagccgctgggccgggctggaccgtgccgcgattgacgcctgccccgatttgcggattctggccgagagcgatgttgccgggccgatgctgctctccaccgaatccgggcggcagatttttgtcatcggccacccggaatatgacaagtacacgctggacaaagagtataagcgggacgtgaaggccggcaagcccatcaacattccctgcaactactaccccaacgatgaccccagccgcgacccgctgttccgctggcgtgcgcacgggtaccttttgtataccaactggctgaactattacgtgtatcaggacaccccctatgacctgaaccatctggaagcattggagaagtaattatgcccaagctcagcgcctgtattgtggcgtactgcgattatgacgaggtctgcgccgccgtgcgcagcatcctgcactatacccccgcggcggattttgcgctgtacgtggtggataacgccagccctgacggctgcggccagaagctggccgccacggatttcggcgatgcccgcgtgaccgttatacagttagcggagaatgtcggcttcggcaaggggcacaacaccgtgctggagcgtctggacagcgaggtgcattttatcctgaacccggatattctgctgaccggcgatattctggacggtttagctgactggctgctgacgcagaacggcgcagccatggccaccccccagctgtgctacccggacggccgcctgcagcacctgccccgccgcaaacccacgccgtggctgctgctggcacgccagctggcgccgaagtttggcggtatattcaagaaggctgatgaccactacaccatgcaggacgaggatttgacggttccgcgccgcatcgaattctgcaccggcagctttatggcggtgcgcaccgatgtttttaaggagatcggcggctttgaccccgcgtattttatgtatgtggaggatgccgacctgacccagaaggtgctgcagaagggcactgtctggctggccccgcagtttaccgccatccacgcatggcaccgcgccccgatgcgcgatgcaggcaagttcaagatgcagcttgtcagcatggggcggtatttcaaaaagtggggctgcagcaagggcaaagtttaatgctgaccttgcaaaacaaataaaaattgtgcaaccacccgtttttgcgggtggttgtagtttttttgcgcggctattgtgacatttcctgctgcgcgaccgtttagtgggtacaaggccttgaatcagaaaggaagaatcacaacgctatggaggataacagaatcatagatgccctgctggcagaacccgaaacggggttgcagttgttgctgacacagtacggcgggctgatccataccgtcatttgccgtattctgcccaacaacccgcaggatgccgaggagtgcgccgccgacgttctggtggcagcatggaaacacgccgccgaatttaagcagcaaaaccgtctgctgcgcgcctggctgtgcgtgacggcgcgcaatgcagccatcgaccgttggcgggcgctgcggccccgacaacaggaatgtgaactgaacgaagaattggcgcaggattggatgaccgagcgccgatccaccgaggcggaagaactgattgcccaactgctgaccgaactgccggagccggacagggagatatttttccgccgttattattacagagagtcctgccgcgaaatcggccgcaggctgaacatgcaggaacataccgtcaatgtccgactttcccgcgggcgcgaaaaactgcgcaaacagtttgccgcgctgcgcaatacttattaagagggggttgcaacttatgcgtaactatacagaaaacgctgattccctgttggaacagtatcccacaaaaaccgtgccgctgagcaagcaggaagaaaagcgcatctatgacttggctatgaaaaaaatagagaaggcgggcagctatacgccgcctaagctgaaaaagcaccgccgtgtacccgtgtgcgtggccgctgccgtggctgccacctgtgtgctttcggcaggaattgccgcagcaccgtatatcaaggagttggccgaaggaaaaatcgggtttttcatcgatgccaaatcgcaggcgcaggtgcagaatgtgctggacgccccgcgcggtgagtacggcgggcagcagaccgatacggaaggccacaataccgaaatcggccagacgcagacgctggacggcgtcaactacacactggacacagtgtccatggacgccgccacgctggattgcttctttaccgtaagcggtgagaatgtggtgtcgaaattcctggatgccgacagcatctacccagaatgggatcagctcagcagcaatacgccgtggatggcggcgcaaatcaacggcggaaaggaaatttacacggtgcaaagtgatttttacagacagagcgacgataccttccggttgtggctgcactatcagctgccgcaggagccgcagggcgacaccgttatgctgcgtctgttggattcccacgctgcagagggagaaccggggcttagctacacaatggagctgaacggtgagcaggtgcgtgccggggcgcgccgcgttgcgccgacggtgttggatttcggcattaccgatgccctgctgggcgataaccccatcacgctggacagcctgtgcttcggcaccggcagcggcagccttgtgaaacattccgaggcggatgaaaaatttgccgaaacgcacccctttggtgtggtaagcgaggacgaggaaaagaaactgcggggtgaggatgcggacaaccctgtgatcttcaacggcggaatgatcctgaccgacgatacggggcgggaactgctgcccagctcccccgacggcgtatccggcggtgctgttgcctataccgtgccggccgaaaatgcccaaagcatcacctttacccccgtgtaccacagcggtgtggacgaatacgaggagcgcaccgtgaccgtggacgaaatgcagcagggcgtgaaaattgccaccagcgatgcgggcggctacaccctgcagaactttgccgtgcaggggcgggcactgacgtggcagatggtaccctacggctatgcgcagagctgtgagctgacgccgcaggacgaggaatatatcgacacgaacaccaattcctatgccatgcgcagcagcaccgtggacccgaccaccggcatcatcagctgccgcatcgactactacaccgcagaccccgcgcaggtggcgaaaatcagcgagttccggtatctgttcggcagcggataccatgcggacgaaagccgtgccgtcacgctgccgttgcaataaagaaagtcgcccttgacaaacctgttggtagtgtggtacagtaacactatgcaaggccgctgaccgacggaatagcgtggggtttaccacgggggacgcggcatgatgacttgctttttaagccgaccgtctgggctgcatacactggtgtatggtgtgtgcagcccatttttgtttaacatggaggtatcgttatgctgagcgacatcgaaattgcacaggccgccgaaatgaagcccatcacggagattgcaggcaagctgggcctgcagggcgaggacatcatcccttacggccattacaaggccaagctcaaccataagctggccaaaagcgacaagcccgagggcaagctgattctcgtcaccgctatcagccccacgcccgccggtgagggcaagaccacgaccagcgtgggtctggccgatgccatgaacgcccttggcaaaaagacgatgctctgcctgcgtgagccctctctgggaccggtgttcggcattaagggcggcgcggccggcggcggctatgcacaggtcgtgcccatggaggacatcaacctgcatttcaccggtgacatccacgccatcggcaccgccaacaacctgctggccgccatgattgacaactcgattcagcagggcaacccgctgaacatcgacccccgccgcatcacatggaagcgctgcatggacatgaacgaccgtcagctccgtttcattgtggacggtctgggcggcaaggtcaacggcaccccgcgtgaggacggctttgacatcacagtcgccagcgaggtcatggcggtgttctgccttgccaccgaccttgaggacctcaaggcgcggctgtcccgcattgtctgcgcctatacctatgacggccagcctgtcacagccggtcagatcggtgctgccggtgccatgaccgccctgctgaaggacgccctcgacccgaacctggtccagacgcttgagcacaaccccgccatcatccacggcggcccgttcgccaacattgcgcacggctgcaacagcgccattgccaccaagctgagcctgaagctggctgactatgttgtcaccgaggcaggcttcggtgccgaccttggtgccgagaaatttctggacatcaagtgccgctatgccggcctgaaccccgctgccgttgtgctggtggctaccgtccgtgcgctgaaatcccacggcggcgtggccaagcccgatctgagcaagcccaatgccgaggccgtgcgcgcgggcgctgtaaatctggcccgccatatcgagaacctgcagggcttcggtctgccggtctgcgtggcgatcaacgccttccccaccgatacggacgaggaaatggacatcatttacgatgtctgcaaaaaggccggtgtgccctgcgccctgagcgaggtctttgccaagggcggcgagggcggcaaggcgctggccgaaactgtgctgtccattcttgatgaaagcgcgcgtattcgttacacctatgagctgaatgcaccgctgaccgataagatcgaagcggttgccaaaaagatctaccacgcgggcggggtaagctacaccgccgccgcgaaaaagacgctggacgagctgacggcgcagggctacggcgatctgccggtctgcatcgccaagacgcagtattccttcagcgacaatgccaagctgaccggtgcgcccgagggctttacgctgaatgtgcgtgaggttcggctctctgccggtgccggattcgtggtcgtgatctgcggcagcatcatgacgatgcccggcctgcccaagcaccctgctgcgatggacattgatgtggatgtccacggcaagatcaccggcctgttctgatcgtctgtacaagccatacaaaacacccccctccgggtctgcagaagcaaggttgacatcgcttctgcagctgcccgaagggggtgttgctttgtacggtcaggatatggcaggggagtgttcagccttatgcctcgccggtacgctctgcctgctgtttttcctgctgttcaatatcgggggctgtaccgccgcccggcatcttatggccgaaggacggcacaaagaagtatttgcggataacgaagatcagcgcaatggcccccacactgacgaggttttgaacggcatcctcatgaccgacgatcatgtggcgggcaatggcgtagagcagaacctccagcacgctgccggggctgtgcttggcgagcatcttgataaactcgatgccgatgactatatccagcgcccgttcaaggaaggtatgcacctccatactgtcggcatctgtcaaaagccccggcatgaggttgagcagcggcacaatgctcatcagcagggcgatcagcacaatgcccgacagcacgacctccaatatgccggcggcctcggcaatctgatcgcggaaaatgcgcttgatccattcctctctgccgtgcagggcgcggttggtcaggcgtcgtctgggttcgttcatgggtcgctccttccaaggttgatttttctgccgcagcgcacagctccgcccgccagtgcgggccgtactgcggaacggacagtattttgtaaaattatagcatattttctagagcttttccagcggatttttcattacagaaaaaacttgtcaaaaacgcttgacaatcgcggcggtatccggtataatctaatgcgttgtccgcctctgtagctcagtcggtagagcaggggactgaaaatccccgtgtcattggttcgattccgatcggaggcaccatttttatgcggccgtagctcatctggtagagcgccaccttgccaaggtggaggtagcgagttcgagcctcgtcggccgctccagataagaccacccttcggggtggtttttttatacccgaaacgcgaaaaatagggcataccctgcattttgcccattgacacccgcatatgcacaacggtatactttaaccgttgccgtacagtatcagtgctgcgggcctatgcaagcgccatgtcagcggttggaattgcgcggtattgccctaaaatgttcgctgcctgcggcagcagaacgattgcggtattttataaaaggagtgcggaatcatgaagaataacaacatcaaaaccttcgttgcagttggcatcggcgcagctctcttctttgttctgggccgttttgtggcaattcccagcccggtgcccaacaccaacatcagcctgcagtacgccgttctgggcctgctggcggccatgtacggtcctgtagccggcggtctgatcggcttcatcggccatgccctgattgacctgtcttggggcggcatcccatggtggagctgggtcatcgcctctgccttcacgggcgttgttgttggcctgtttgccaagaagctgaatgtgcaggagggtgacttcaacaaggccaagtttgctatgtttgccgttgcaaaccttattgcgcatgccgtttcatggattgtggttgcccccgtgctggatatcctgatctatgccgagcctgtcaagaaggtctttgcacagggcgcttttgctgccgtgtccaacatcatcacggctgtcgtggtcggcggcctgctgattctggcctacaccaagaccatcgccaagaagggctctctggacaaagagtaacctcgacaaaacccgtatgccttcccacgaatgcgggaaggctttttgcttgtgacatcaccctgcgaggtgccgtatggctgaaaccaaaaccccgatcatatccttccgcaatttttccttccagtaccgcgcgcagaagcagcccaccctgcacgacattgatctggacatctacccgggtgagcgcgtgctgattgcaggcccgtccggcagcggcaaaagcacgctggcggcctgcatcaacggtctgaatcccttctccaaccccggcgaatgcaagggcagtctgattgtggacggcgttgacgcgccccacagcagtatctttgagctggccgggcatgtgggcaccgtgctgcaggacccggacggccagttcatagggctgaccgtgggggaggacattgccttcgcgctggaaaacagctgcaccccgcaggaggaaatgcacgaaatcacccgccgtgccgcagagctggtcgggatcgaaaaccacctcgactatgcaccgcacgaactttccggcgggcaaaagcagcgcgtcagtctggcgggtgttatggtcgatcaggtcaaggtgctgctgtttgatgagccgctcgccaatctggacccggctaccggcaagcaggccattgagctgatcgacacgatacagcagaaaaccgacaccacagtcctgattattgagcatcgtctggaggatgtgctttggcgcagcgtggaccgcatcgtactggtcaatgacggccggatcttggccgacctgcatccggatgagctgctttccggctctctgctggcggaaaacggcatccgtgagccgctctatctgacggccatgcggtatgccggcatcgacatcacaccggaaaagcaccccgcgcatattgactcggtcgcgctggacgaggccgatacggcgcggctgcacgcatggttcaaggcagagccgctgcctgcgccgaagccggcccccgccccgctgcttgaggtcaaaaacctcagctttggctacagcaagggccagcataccctgtccgaggtcagctttacgatcggcaggggggagatggtcagcatcgttggccgcaacggtgcgggcaaatccaccctatccaaactgatctgtggctttgagacgcccgactgcggagaaatatggtttgacggtaagaatctcaaaggcgaaaatatccgccgccgcgcccggcacatcggctatgtcatgcagaaccccaaccagatgatctccaagacgatgatctttgacgaggtcgccatgggcctgcagggcaacggtctgtcggaggacgagatccgcgcccgggtcgaggaaacgctcaaggtctgtggtctgtacccgttccgcaactggccaatctccgctttgagctttggccagaagaagcgcgtcacgattgcgagcgtgctggtgcaggaaccggagcttatcattttggatgagccgactgcgggacaggatttccgccattataccgatattatggagtttctgcgcgggctgaacgcgaagggcataaccgtcgtgatgattacccatgatatgcacttgatgctggaatacacgccccgtgcgctggccttctgcgatgggcggctgattgccgaccggtcggcagcggctatcctctgcgatccgatgctcatcgggcaggcggcgctgaaggaaaccagcctttacacgctggccaaccgctgcggcattgccccggcggagaattttgtggaacgctttatcgcagcggacagggaggtgcgtgcggatggctgctaataccgttttgaactatctgccgcgcaaaagcgtggtgcatgaactgaccggtacgacaaagctggccttctttctgctgtttacctttgccagcatgatcacctacaacacatgggtgctgctgggactgatggctgtcagctttgcggcgttcaagctaagcaacatcaagctgcgcgaggtccgctttatgctggtgttcatgctggtgtttctggcgctgaacgatctgtttatcttcctgtttgatccgaatcagggcacgactctctatggcacccgcacggtgctgtgccatcttttctggcggtatgacctgacagcagagcagctgttttacatgttcaatatctcgctcaaatattttgtggcactgcccgttgcgatcctgtttatctctgccaccaaccccagtgagttcgccgccagcctgaacagcatcggcgtctcctacaaggttggttattcggtggcaatcgcgctgcgctacatcccggatatccagcgcgactatcacagcatcagtcaggcgcagcaggcgcgcggtgtcgagctgggccgcagtgagccatttttcaagcggctgaaaaacgctgtcagcatcctgctgccgctgattttaacgagcctgaaccgcatcgacacgatctccaacgcgatggagctgcgcggcttcggcaagagcgacaagcgcacatggtacacccgccgccccttcgctcgccgcgactttatcgcgctgggccttggtgctgtgctgctgctcatcagtctggccgtgacgatcaaattcggccggttttataatccgtttgtgtaaaagagcatagaaatgcaaaaggcgcccctgcggaaaacaactccgctgggacgctttttatgctctaagccctgtcaaacacagccgcccgctcaggcatcatcacacctgagcgggcggctgtgttattttatcaaaatcttactgcatcaatccgcagaccagctgtgcatacgcaacagggtcctcgatgggcagacctgcaatcagcagcgcctgatcgtagagcagctcagcgtatttggcgaccttgtcggcgtcgccggcggcgtgggcggccttcagtgcggcaaagacggtgtgattggggttcagctccagcacctttgtgctctcgacgccttcggcgttcggcatacggcgcaggaccttctccatctccatcgagatgccgccctcggcggtcagcgtgacgggatgctcctgcagggtggggttgaccttgacctccttgaccttgccgctcagatccttcttgatctcctcaaacagatccttgttctcggtttcggcggcctcggcggccttcttctcgtcctctgtttcaaggcccagatcaccggcattgatgttctggaaggtcttttccttgtactcatgcatgacctgcaggcagaactcatccacatcctcggtgcagagcagcagatcatagcccttgctcagcacaagctgggcattgggcagcttgctcaggcggtcggtgtcgtcaccggcggcaaaatagatgcacttctgatcctcgggcatcttctcgatgtactcatccagcgtgacgagcttcttctccttggcggagtagaacatcagcaaatcacccagcagatccttgtgcatgccgtagtcgccatagatgccgaacttgatctggcggccgaagctcttccagaaggtttcgtacttctcgcggtcgttgacgagcatcgcgtgcagctcgttcttgatcttcttttccagagagttgcgcatcagtttgagctggttatccttctgcagcgtttcacggctgatgttcaggctcagatcctcgctgtccacaacgcccttgacaaagctgaaatagtcaggcagcagatcgccgcacttctccatgatcataacgccggaggcatacagggccagacccttctcgtactccttggtgtagtagtcgtagggggtggaaccggggataaagagcagcgccgtgtaggtggcagtgccctcggtccggctggtgatgacccgcagcgggtcagtgtagtccatgaacttggacttgtagaactcgttgtagtcctcgtccttgacctcactcttggggcgcttccagatgggcaccatgctattcagcgtttccagctcggtgtaggtctcatactcgggcttgtagtcgtcaccggcgtcctccggcttcggcttctggcgggatttctcgcggaacatcgtgatggggaagcggatgtagtcgctgtacttcttgacaaggtttgccagcgtgtattcctcaagatactcgctgtagttgtcggtatcggtatcgtccttcagcaccagaatgatctcggtgcccacctcgtccttgtcggcctcagtcagggtgtagccttccacaccggtggactcccacttccaggcggtatcggcgccctgtgcgcgggagatgacagtgaccttcttcgccaccataaaggcagagtagaaaccgacaccgaactgaccgatgatgtcgatgttatcgctttggttttcggtcttgaaatcgagcgagccgctcttggcaatcgtgccgaggttcttttccagatcctccttcgtcatgccgatgccgttatcgctgatggtcagcgtgcggctgtccttgtcaggctgaatatggatcttcagatcgtccttcgtgatgccgatggtggtatcggtcaggctcttgaaatagcgcttgtcgcaggcatccgacgcattggagatcagctcacgcaggaaaatctcgcggtttgtatagatagaattgatcatcaggtcgagcagctttttgctctcagccttgaattgatgcatagccatagtagaaaacctcacttataaaaatgaaattagcactcttatatctgaactgctaaagctagtttagcactcttttttataaagtgcaacccttgtgggctattttaacaaaaaatttaaattcaggccttttcaagcgtcggattttgaggtatgcttacaatataagataataagtgcaggggcggatgctcgcatcgacccctgcaacgatccttatcagaggggaataccactatgagcatctacggtgaccgcgcctatgcggcattttttaaaggctataactgctgccaatcggtggcggttgcctttgcggaggagatgggcatgaccgaaaagcaggccctgcagatttcggcaggcttcggcggcggtttcggccgtatgcgggaggtctgcggtgccttctccggcattacgctggtgctgggggcgctctacggcagcgatgacccggcaaaaaagacagccctttacaccgatgtgcaggctttggcggctgagtacaaggcccgcaacggcggcccgaataccctgatctgccgggagctgctgggcttacagcaggccgagggcagcccggttgccagcccccgcaccccggaatactacaaaaagcgcccctgcccggagctttgccgcgtagccgctgacattatggcggagtacatcgcggcgcacccgcgagactcaatcaccacgctgtagggcggccggtcctctggccgccgcccaaccgcaacattcccgggagggataaatccctccccctacatgcagaatcagaatcgaggaaactatgcagctctataaccaaaccctccccagcggcgcaacgctcgtcggctacctgcgggaggaaaccactgaaatgcctgccttcaacacgcgccctgccatgcttatcctgccgggcggcggctatgcctactgtagctcgcgggaggctgacccggtcgccatgcagtttctgcaggcaggctacaatgtctttatcctttattatacctgccgcaagcaggagagccagccggcgctgcgctggcagccgatgaccgatgcggccggtgcgatcctgcatatccgcaagaacgcggtgcagctccatatcgacccggctaaggtcgcggtctgcggcttctcggcgggcggccatcttgcggcgtccacggcgatcctgtgggacgctgagccggttcggcaggcgctcggcatctgcggaaaagaggctctgcccgatgccgtggtgttgggctacccggtcatcaccagcggcgaattccggcatgacggctcgatctgcaacctctgcggtgacgatgccgccctgcgcgggacgatgagtctggaaaatcaggtcagtgacggactgccgcccttctacatctggcacactgtggaggatgcctcggtgccggtgcagaattccatgctgctggccacggctttgacagcccacaaggtaccgtttgagctgcaccttttcgcccatgacggccacggcaccagcacctgcacgcaggaggtcaacacccctaaccgccacaacagcgcatgggtgcccctgtgtaccgattggctggccgacacactggatttccacctgtgagggcggtagaacccggccgctgtgacgaatgctgggacgcctgcccgcgcctgtctgcgggggagccgttcgattttgcctgtgcgggctgcggtgactgctgccgccaaaggcgtgatctggtgctgtccggctttgatctgtaccgtattgcgcggcggctgcggctctcgccgcgcattgtggcggcggccttctgcaaaagctatattgcgcccgaaagctgcctgccggccctgcgcctgacgcccgaccccaaaaccggaaactgccgcttttttgaggggagcgcctgcgccatccatgcagcccgtccgctggcctgcgccctctatccgctggggcagagcatcgacaccgaaaccgcagctgtcgagtattatgtccagaccccgctgtgcggcgcacgggtgggggagggccgcaccctgcgggattatctgaacgatgccgctgttaccgagcgggcgggtatagacgcgcggtgggctgttgtgtgtacccggctttcccaacggctgcaggcggcgggcgggcaggaaaatccccgctttgcggccgctgccagacgcattgagcgtgcgctctactatgagtattcactcggcgatgacttttacccgcagttttgccaaaacatagaaattttgatgccgctgctggaaagaatgctgtaaacagaaattgcaggggcaataaaaaacgctgtgacccatcccgaaaggtcacagcgttttttatttatgcaatcagcagataaagaacccgccgcgtccgccgcagcagcaccagcttaagatgttgcaaaccagcaggtacatccagaacgacaggcaaaactgcccgggacggccgctgggctgggcgtagggctgctggtagcttgtgtagctgcgacccggactttgcagctggtccagcagattctggtaggcgtagttgttcggctccatcgaaaccgccgtgcgggcctcctcctgcgcgcggatgttgttgcccaacccctgattggcaagggccgcgtagtagtgccactgggcagtacggccggcggcagagatgccgttcagcgtgttgagagcctcctcataaaagccgctgcggatataatttgccgccgcccgcagttcagggtcaccggcggcgctgccatagctttgccgcccggccgagctgccggtgctgtaatagccgaagccgaacggcccgaacccgaagccgccgcccgcaaaggggtcctgatactgctggctgtagccgctgctctggccgtaggtctgcccgctctgccggtaggcggtgccgccgccctgcttgatgcgcatgatctcgctgtaggcggcctgaacctccttgaaatgctcctccgccgccgggtcatcggggtgcaggtcagggtggtactgcttgcacttctggcggtaggcttttttaatcgtttcgtcatcggcaccgggggcaatgcccaatacgctgtatggatcagtcatggcgttgtgcctccctgtgctttcgtaccagcgcgtacttgctccatacgccggaatagatcgtgttgtacaatagcttcccctccggggtgtccttcagaatcggcagcatctcaaaatgctgtgcgcagcggcccatctgctgggtcagcagctcatggcagcgctgctcgtaggcggcgggcggcagttcatccgccaactgctgcagcgcgttgaagcggccgcgccgggcgtccctttgcaggtcatcgtaggcatccatcaggtagatgaacgcccccagcccctgtcccatgccgcgcagcgccggtgcccatagatcgtctctgcaggcgaaaacctcgcccagcagcgcgccgaaggtgttgcacagcgcgtccagatcgtggctgcccgagccctccagcacattgagctggtcgagcatcgcagcaattttgctcatctggcggggccagcgctggcgcaaagcgggcagatacggctcaagccgctgcgcctgtgccaaactggcgcggcggtggtcgtcctgccagtcgtccataaaattataatatgccagcgcggcagtcatgtcagccgcatattcggtaaacgaattgtcggcacgggggcgctttctaaggggatggggggcacagcgccctgcagcaagggcggtgggctcatcgtacagcgcagtcagcaggatgcagacgaacgccatatcatagctcagcgccagctgcccggtgcggccgtagcggcggcccagcgcctgacacagcccgcagtaatagccctgatagcgctccatctcggcatctgccagacccttgcggtaaatcgtaacatatccaaacatacggcgtcaactctttttgatgaactggtggccgcatttagggcaggtgatgctgattctaccgcgcccgcgcggtacgcgcagctgctggccgcactgggggcagcggtagtagtgatattctctgcgctgcttgaatcgcacctgctgcttggcgaaccacgctgcggcgcggctctggtaagaaaggtattttaagttttcagcgtagcgcttgcgggtgttgcggctcaaaatgcggaaatagctgtaaatgatagcagccagccccagccaatacagcacaggggagacccatgcgccgatgacgatgagaatgagggatgcaatgcagagaaagccgctgaactggtcaaacccatagcggccggacataaagcgctgaaaccagcctttcattttacaaaaaccacctttttgcggcaaagccgcattgtttacacttcagtatgacacacaaatatgggcaaatcgtgaacaagcgggaaatagagtttgaacaaaagggctaagcgccttaaatctcttccgcgaaatagtcgctgtcaatgcgcttgagtttatagactttctgaacagaaacacctaagccgtattcaatcatcaaagatgtgagcttctgtccgtcgaccagaataatatgctgtgcgtcggcatattctctggcacccttggaaaatttggcagttgtaatgaaaagccccttttctacgcggggcgggcccatcatggcaccgaaaaatttctgaatctccggttttccgattgttacatcgggattccagcgtttggcttgtatgtaaattaagttgaagccgagcttatcctcgtgtataactccgtcaattccgtcatcgccactgtatttggtcttgaagccatctccataatccattgccttcatcaggtcaacaaccaactgctcaaaaaatacaggtgtctgctgcatgatttcagaaagcagatcgtcggcgagggtgtcgtttatcgtcttgtgcaacgcgtccatctgttcttcaggggtttttacatcggccaaagaaggagtggacgcagtagaagctgtgatctcttcgttaccaacaaaggcggcaaaagaagcataatgttgcttgaaatatgcattcgtgatggaaacgccattatcgaccagccgcttgccctcggcggtgataacataattgccccggctgggagtgtcaacaagaccagcctttttcaaataggtttttgcccaatttagtcgattgacaaatacagtttgccgttggctgggtaactgttccgttaaatcttcggcggataaatgcagcaattctgcaacatcggcggcaacggcctttgctgtgtgcagctgtccgtcttttattaccgtaaggaagggaacatacagttcatcatatttcggcaacgccattttatcagctccttttttcgggcaaattattcttcgagaactatcttcactacacactccacatgtttcgtccgcgggaagagatccaccggctgcacctccacggccttgtagccatgctcggtcagccatttggtgtcgcgcgcggcggtggctgcattgcagctgaccatgaccactgtgcggggggccatctcggcaatggcggtcagggcggcctcgtcgcagcccttacggggcgggtccactacgatcacatcggggcgggcaccctcggcggcaagctgtgcggctgccgcaccggcatcctgacagcggaaatccgcccggtcggcatccagccccagacgggcggctatctgtctggcaccgtccacagcctgcggcacgacctcgacaccgaccagacgccggcagtcaggcagcatcgaaagcccaatcgtgcccatgccgcagtagaggtcaagcagaaaatccgtctcctgcagcccggcatactcccgtgccttggcgtacagcgtttcggcagcgggggtattcacctgataaaactcatgcacgcccatgcgcagcgggacgccggcaagtgtatcctcaatgacgccggggccaagcgcggtgcgggtcctgcggcccagaatcacattggtgcgctcactgttgcggttgacaaggatcgttgtaagggcgaactccttttgcagggtggcgcaaatctctgcttcgttgggcaggccgttgccgttcacaacaaagcagagcagccgctggccgctgtgccagccctgccgcatgtagaggtgccgcacacggccggtgtgtgtttcctcgttgtaggcggtgatgccgttttcctcaagcagcgcacaggcgcgcgcggccagttggttcatccactccggctgcaggcggcagtcggcacaggcaacaatgcggtggctgcgtccggcaaagaaaccggtcacgatatgcccattttcatccgtgccgaccggcagctgcaccttgttgcggtagcggtcggcagcgggtgcggccagcacctcccgcacagggacatccagcttgccaatgcgcgcaaaggcgtcccgcacaaactgtgtcttggcggcgcactcggcctcgtagcggatgtggcgcagtccgcagccgccgcaggggccggcaacggggcagtcctgccggatgcgatccgggccgggggccagcagccgctccactcggccgaaggcatagcttttcatcggctttacgatgcgaacctcggcaatgtcgccgggggcggtcagcggcacaaaaacggcctgaccgtccttgtgggccacgccgtttccgtcattggagatggatttgatctcgagggtgatgatctgatttttcgtaaaaggcatgtctgctccttaaaaataaagttacgggttggtgttctgcagggcggtttccttttccagtgcggacagatacttgctcggcggcacacccttgacctttttgaacacgcgggagaagtagaactggtcaaagaagcccaccgacacggcaatctcagcaatggaaaggccggagtttttcagcaggctgcaggcctcactgacacggtagtttgtcaggtagtcgatggggctttgcccgacattcgacatgaaaacacgatacagatggctgcggctgacgccgaccgccttggcaatgtcatccaccgagatgtcgtgcgagtagttgaactggatgaacttgatggcagccagcacatactggctgctcgacgagcctacattgggcatggcctcgcgggcttccttcatcaggtgcgccataaatatgtacaggtagcccgtcatcattgcctcgcagtgcggctccggcccgcgggaaagatagatgttgtacagcgcttcccgcgcggtctgcagatcccggcagtggtgtacggggtgtgcctcggaaaatggtgtctgctgcacaagcttattggcgcacgcgccgttgaagccgacccagtaatactcccacgggtcggtctcatcggcggcgtaggtgatgagctggttcggcttggcgaggaacagatcaccctcctgcagggtgtgcgagacaccgttgacctgatagacacccttgcccgctacgaccagatggatcaggtagtggtcgcgcacgccgggcccccatgtgtggcccggctggcattgctcacgcccgcagttaaagatcgagagctcaacattatctgtgtagctctgcttgtaggattgcttcatctcatggatggtcatggctgcacctcgcttttgtgatatttctattatagcaagccattcatcaaaagtccataaaagagcctgaaattatgtttgctttttttgcaggatttgctatactgaaaacaagaaatcgacagagagctgttcgtttggctgtctgcctaaaaaagacaggctcattttgtgcatatctacgaaaagagccgccccgacaggaaaggtgagtggaatcatggcaaataccattgaactcaaacagcagatcgcacagggcgaatatgacgccgcctttaccaaattgtacggtgcagccgccgtgcaggagcagcgcaagcgctataccgacctgatcgacgaatttgaaaaggagtacggcacctcccgcacggtccgtctttactctgcccccggccgcaccgagatcggcggcaatcacaccgaccataacaacggcgtagtgctggccggctccgtcaatctggatatggttgcggtcgtttcccccaatgaggataacatcatccgcgttaagtctctgggctttgacaagatcgacgatgtcgatgtcaatgttctggttccgcagccgcaggaggccgagcactccgcctctctgatccgcggcgtggcaaagggcattgtggatgccggcggcaaggtgggcggctttgactgctacagcaccagcaatgtgctgcgcggctccggcctgtccagttctgcagcgtttgaggtctgcatcggtgccatcctgcgcggcgaatataacaacaatgacatggagaagttcagtcaggtcaagatcgcacagatcggccagtttgcggagaatgttttcttcggtaagccctgcggactgatggatcagacggcctgcgcggtgggcggcgtcatcaccatcgacttcaagaatcccgaaaagcctgttgtgggccagactgtcattgatcttgccaagcacggctttgtcatgtgcatcagcgatacgaagggcagccatgctgacctgaccgacgactatgccgccatccgccgtgagatggagagcgtggccgagcagttcggcaagaaggtcctgcgtgatgtggacgaggacgagttctacaaggctatcccgcagctgcgcaaggctgtgggggaccgcgctgttgtccgcgcgatccacttctacaatgactgccgccgcgcggcacagctctgcgatgccgtgcgcgaggacgattttgcagctttcctgcgcctgatcatcgagggcggccactccagctttgagttcaaccagaatgcctacagcatcaaggccccgcaggagcagggcgtgccgctggcgctggcgctgagccagaaggtgctgaacggccgcggcgcatggcgcttgcagggcggcggctttgcaggcaccattcaggcctttgtccctgtggagctgctggacgcctacaaggcagccattgacggctgcttcggtgagggtagctgccatgtgctgaacatccgcaactacggtgccgtgcctgtcacgcccgacatgtaaaataaaacataaaaaacaccgtaccagtgcagaaatgtgctggtacggtgttttttgttatctctgtaggggccgggcatgcccggcctgcactattacattttcttccgcaaaatccatattcccagtgccagcatcccgcaaaccactatggtaaacaccgcatgtatctgtatgctcagataccacggtgcagattgcagcgcatacagcccggggtgggcgcgataatcccaacaggtatacaggctgacgcccaaaaacaccccgataaagcaccaaaacgcagcgtttaaaatggtgtacagctttttcataaacattgtcctttgacccattcgtccaaaaacgacatctgctcttcggtgtggaaccaatgctcgccgcttggcatgaccgtaataggcgcatggactttctgcgcaaacgcggccaacgtttcataggaggtcagattgtctttttcgccgtacaaaatgcaggttggtacattccacacaagcgggtgtgcccgcacgtagcagagatactcccacgacagggtttcgccaaaatcggtggcgacttcgccctgcgcgtgcagcacattctccgtcaccccagcccagcccatcatatcggaaatgagcgtttccatattcacgatgggggagataaacaacgctcggtcaataaacttctcggataacgagctcatcgagaaaaatgccccgatgctgtttgccagtagtacgaccgtatcgtactgctggcgcagaggtgtgaaaaatgccgtaaactccgaaacagcgtcccaaggtgtctgtgcctgataatcgaatccgatgacgtcatacgcaggaaacagtttcttgtaatgttcggcttccgccgcactgccgccctttccgtggatatatacaaccaactttttcataggtgattcttctcccaaatcagcgccagccccttaaacagcaggtctgcgtcatagatgactttgcgcttgcagcagggcataatgtacggtgccagtccgccggtcgcaactacggtcagcggctgaccaagctctgtctcgacccgatcagccagtccgtccagctgggcggccgtgccgaacattgcaccgttgttcagcgcggctaccgtgttggcaccgatgagatgctccggcggctcgggtgcaatgggcggcagttgggctgtgcctgcgctgatggcccgcagactggtctgcacgccgggtacgatgaagccgcccagaaactccctctgcgcagagatgacattgtaggtcgtggcggtgcccagatcgactgtcatgcagggcaggggatagtgtgcggcggcagcggcggcatcggcaatgcggtcacggccgaccttggcaggctcgtcaacctgaaagctaagccctgtgtccagcgcacagctgacgatcagcggctcctgcccggtcagccgcttgcaggccgctgccagcacctcggtcagctgggggacaacgctgcagacaatgacgccctcgcaggcggcagggtctacctgcaggcggcgcagcaggaatttcatctcagcggcatactcatccgctgtgcagcggggccgcgtgaccattcgcattgtgaactggatagagcaatgctctgcccccgtcagaccgccgatacagatgttggagttgccgatgtcaactgctaaaaccataataaattccttttatagataaaagacaagagataatagataagaaatatggtggatcgcgtcgctttgcgccgctcaaaattattatacttgtttgcatataaggcgtcaatctgctataataaccacaatacaaattttgtttttgccaaaggcgaaaactccaccaattttattatcttttatctagtatctcttatctagttattaagggtgttgattttatgttacttaccggaaaaaccatcgtcctcggcatcaccggaggcattgcggcctataaaatgcctaatgtggcgcatgcactggtcaagctgggggccgatgttcatgtcctgatgaccaaaaatgccactgagtttatctctccgctggtatttgaaacgctgacccgccgccgctgtcaggtggataccttcgaccgcaacttccagtacgatgtggcgcatatcagccttgccaatgcggcggacctcatgctcattgcgcctgccacggccaatgtcatcgccaagctggcccacggtcaggccgatgatatgctgaccaccgtcacgctggctgcgacctgccccaagctggttgcgcccgccatgaacacccacatgctggaaaatcccatcacgcaggataacctcaaaacactgcagcactatggcttcaccgtcattccgtccggctccggtatgctggcctgcggcgatgtcggctccggccggctgcctgaggagggcgtgctggtggactatgtgctgcgtgagcttgcctgtgaaaaggatctgcgcggcaaaaaggtcgttgtgtcggccggtgcaacgcaggaatccatggacccggtgcgctacctgacaaaccattccaccggtaaaatggggtatgccgtggcccgcgcctgtatgctgcgcggcgcagacgtcacgctgctggcgcccaccggttgcacgctgccgcctgttccgtttgtcaagactgtgccgttcacaacggcagccgacctctttgaggccgtaaagacccatgccatggacgccgatgcactggtgatggcggctgctgtggcggactaccgccctgccaccgtggcagctgacaaggtgaaaaagcatgacggcgagatgagcattgcccttgaacgcaccgaggacatccttgcatgggtgggcgcacacaagccggagaagctgtttgtctgcggcttttcgatggagacgcgcgatctgatcgagaactccaccgctaagctgaaaaagaaaaacatggatatgatcgttgccaataacctgaaggtccccggtgcgggcttcggcgtcgataccaatgtcgtgacgatcattaccgagcagggcatcaccgagctgcccctgcagagcaaggacggcgttgccgggcatatcgcagacgcaatcgccaataaataacacatacccccgcgccctcctgcatattcatttatgaatcatgcaaagggggcttttttatgtgcggaattgcggggcaggtcgggcgcgacccccggacgatacagggccggtatgcggcctactgcgccatgcagcagacgctggcgcgccgcggcccggaccagcggggtatgttcatcagcggccgggcggcgctgatccatgcacggctggcggtcgtggatcttgagaacggcctgcagcccatgcagctggactggcagggggaaacctatgtgctggtctataacggtgagctgtacaacacgcctgagctgcgggctgcgctgctgcaccgcggccaccgctttgccgggcactccgacactgaggtgctgctccatgcctttgcggaatggggtgaaagctgcacggcaatgtgcaacggcatttttgcgtttgcagtctggcaggtaaatgcgggcaggctgtttctggcgcgggatcgctgcggtgtcaagccgctgttctataccctgacggagcagagcctgatcttcggcagcgaaatcaaaactctgctggcccacccagctgtgccgccgcgggtggatgctgccggtctggcggaggtgctgctgctcggccccggccgcacacccggctgcggcgtgttctgcgggatagaggagttactgcccgggcagtatgctatctacgaggccgacacggctcgaatgacactgcatacctactggcggcttgaggatcatgagcatcccgatgattttactgcgacagcacgcaaggtgcgcgagcttgtgacagatgccatcgagcggcagttggtgtccgatgtgccggttgctgcatttttgtccggcgggctggactccagcctgatttccgccattgcggacgccaattttgcggcgcagggaaagcagctgcaaactttttcggttggctaccgcgacaataaaaagtattttcatgccacaaaatttcagcccggtgcggatgccccctatatccgcaaaatgaatgagtttctccatgcccgccaccattggatcacgctggacaccccggagctggtcccggcgctgtatgcggcggtggatgcgcgcgacctgcccggtatggcggatgtcgatgcatcgctgctgctgttctgccgacagatcaagccccatgccacggtggcgctgtcgggagagtgcgccgatgagattttcggcggttacccgtggtaccgtgatccggcagtgcgggaaaaatacggcttcccatgggcgcagtccacagcctatcgcgcctccttcctcaagcccggtgtgctgggcagcattgacccggctgcttttgtggatgcccgctaccgccaaacgctggcagaaacctccgcccgacccggcctgtcggcagaggaacagcgtatgcgccagatgatgaacctgaatttcaaatggtttatgcagaccctgcttgaccgtaaggaccgtatgagcatgtacagcgggctggaggtccgggtgccgttctgcgactaccgcattgcggagtacctctactctgtcccgtgggaatacaaggactaccgaaatcaggaaaaaggtctgctgcgcgaggcaatgcgtggcgtactgccggatgaggtgctgtggcggcgcaaaagcccttaccctaagacatggaatcccagctaccttgcggccgtctcggccgagctgcgcggtgtgctggctgacccggccgcgccgatcctgcgcatcctgcgcgcggatgcgctggaaacgctgctcgcatccggcgcggataatccgatcccgtggtatggccagctgatgacaacgccgcagaccatcgcatggtttatccagctgaactactggttagagaagtataaggtggagttggtgtgatgtagagggcggcgttctcgctgccctacgccttttgccctgcgggtagggcggccagtcctctgaccgctgcagcccgttcccgtcacaacagaacttccgcgcaaaaataatttattttccttccccatctgttcaaaccctgcccgatgtgctataatacctcaataggactacaaatagagaagggagacccctcatgcagcaggaaaccgttatcgttctggatttcggcggccagtataatcagctgattgcgcgccgcgtccgcgaatgcaacgtatattgcgagatttattcttaccgtaccgaccttgccaagatcaaggctaaaaacccgaagggcatcatcttcaccggcggccccaacagtgcctatctgccggattcgcccaccatcgaccccgaaatttacacttggggtgtgcctatcctcggcatttgctacggcagccagctgatgatgcacatgctgggcggcaaggtctgcaaggcccccgagcgtgagtacggcaaaacgctggtcgatctggatactgccagcccgctgtttgatacgctgcccgcccagaatgtctgctggatgagccataacgattacatcgagcaggcagcccccggctttgaaatcattgcccatacccccaactgcccggtggccgccgcgcaggataaggcccgcggcctgtatgctgtgcagttccaccctgaggtcctgcacaccgagaacggcaccaagatcctgcacaactttgtgtataaggtctgcggctgtgtcggtgactggaagatggactcctttgtcgagaactctgtcaatgctctgcgcgagaagatcggcgatggcaaggtgctgtgcgccctgtccggcggtgtcgattccagcgtctgcgcggctatgctggccaaggccatcggcaagcagctgacctgcgttttcgttgaccacggtctgctgcgcaagaacgagcgcgagcaggtctgcgaggtctttggcgagggcggtcagtttgacatcaactttgtctgcgttgacgcccgcgaccgcttctataagaagctggccggcgtggaggcccccgagggcaagcgcaagattattggcgaggagttcatccgcgttttcgaggatgaagctaaaaaaatcggcgctgtggactttttggcacagggcacgatttacccagatgtcgtggagagcggcctcggcggtgaaagcgccaccatcaagagccaccacaatgtcggcggtctgcccgattatgttgacttcaaggagatcgttgagccgctgcgcgacctgttcaaggacgaggttcgtcaggccggccgcgagctgggtctgcccgagtaccttgttgcccgccagccgttccccggcccgggtctggccatccgcatcattggtgatgtgacccccgaaaaggtcgccatcgtgcaggatgccgatgccatctggcgtgaggaagtcgataaactccccatggcccagcgccccagccagtactttgccgcgctgaccaacatgcgcagtgttggtgtcatgggtgacgagcgcacctacgattacgccattgccctacgcgccgtaaccaccaccgattttatgaccgccgaggtcacaatcctgccgaccgagaccattaccaccgccgccaaccgcatcgtgaacgaagtcaagaacatcaaccgcgtcatgttcgactacaccacgaaaccgccggcaacgatcgagtttgaataaatcgagttgcttaaaaaagccagtgtttatgcgggtttcagcgatttcgattagtcttttgataacaaattgataacagtcatagcaagtgccattattcttgttatccagtggtttatgggtaacggaacaattaacaggtggcttgcagactaaagttcggagcttggctctgaacaaattccatattataaactaagcccttagctgtggttaataaccatagttaagggctttttt

SEQ ID NO: 14180 - DNA, 1773 bp, Unknown
  gut microbiota DNA sequence
gtattcctgcgcggagctgaatgtgctggacgatgacggcgcgcagacccggatggttgtgctgaccgtgctgctgagcagccttgtgctgaccgttgtgctggcatttttgctggccacctacctgtccgagccgatccggctgctgaacgcgcggctgcaccgcattgccgaaaacgacttttcctacgatcctgtgattgagcaggccgatggcgagctggggcagatcgggcgcaccgtcaacgagatgacgatgagcatcgaaaacctgctgcgcacacagcagcaggactacgagcagcgccgccgcattgagatccagcttctgcaaagccaggttaacccgcactttttatataacacattggattccattcgttggatggccgtcatacaaaaatcccctggaatcgaaaagatgactcgcagcctgtccaatttgttgaaaaacatcgccaagggcactcaggataagatcaccgtgcaggaggaacttgccctgctgcacgattatgttgaaattcaatcggtgcggtatatggaggctttctcttttgatgaccgggtgccgcaggaactctattgctatcgcgtcatcaagctgactctgcagccgctggtcgagaacgccatcttccacggtattgagccgaccggcgagggtggtacgatcacagtatcagggcatgaggaaggcagcgacctgttgctgtatgttaccgatgatggcgcaggaatacccgccgacacactggccggcctgcttaccgccgagcgcccgcgcagccatgcttccttaaacggcatcggtgtctacaatgtccaccggcggctgcagatgctttacgggcctggttatggtctgaccatagagagtgagccgggctgcggcacctgcgtgaccgtgcgcatcccgaaggaggagtaaaatgtatcaggttttgctggtggacgatgagccgttgattttgtctggtatcaagtttatgatcgactggcagaagaacgactgccaaatcgcggacacagcccgcaacggccagcaggcgctggaaaaactgcgcacactacacccaaacatcgtcatctgcgacattgccatgcccggcatgtcgggcaccgaactgctgaagcaggccgccgaggaatttcccgatattgtatttatcatgctgacgaatcacccggattttcagctggcgcagcactcgttgcgttaccgcgctgtggactacctgctgaaaagcgatctggatcccgccgcattggaagaaggccttgcccacgccaaggccgagtgcgacacccgcgccaagctcaaccgtgtgcagctggtagacgactatttaagcagcaaccgccgcaaattgctggaaaatgcttttttgaatctggtacaaagccgccccggcgctgcggacgccaaagccacagaactgctgcaaagcgcgggcgtgctggatcgttatgcggtggcctatctgccgcttgatttcagcgacactgattgggactcggccccaccggatgagcgtaccaagctatttgcttgggtgcaggaactgtgcgagggtgtggctgagagctgctttactcgccatgcgctgctttcaaccaatgctgccagccaaagccaatcgctgtttctgctctgttggcagctggagagccctgttgcatgggagaagagactgacgacctttgctgagaaagcggtatctgcctgccgtaccatcgctaagaccggtgtttcggtcatgggtacagact

SEQ ID NO: 14181 - DNA, 1153 bp, Unknown
  gut microbiota DNA sequence
ttgtcattgacgcctatttctcggcgaccaagctgaaatggattctggacaatgtgcccggcgtgcgtgcgcgggccgagcggggcgacctgctctttggcacggtcgagacttggctgatctggaagctgacctgcggcaagatccatgtgaccgactattccaacgccagccggacgatgctgttcaacatccacacgctgggctgggacgatgagatcctgcagatccttgacataccgcgctgtatgctgcccaaccccgtgcccaacagcgagttttacgagtacgccgacccgatgcacttcggcggcgagatcaagattgccggtgcggcgggtgaccagcaggcggcgctgtttgggcagacctgcttccagcggggcgaggcaaaaagcaccttcggcaccggcggctttatgctgatgaatgtcggtgaaaagccggtgttctctcacaacgggctggtcaccaccgtggcgtggggactggacggcaaggtgaattatgcgctggagggttcgattttcgtggcgggcgcggccatccagtggctgcgcgatgagctgcatctgctggaggatgccagggactccgagtatatggcgcagaaggtgcgggacacgaacggctgctatgtcgtgccggcctttaccggtctgggcgcgccccactgggaccagtacgcgcgcggcgcgattgtggggctgacccgcggcgtcaacaaaaaccacattatccgcgccacgctcgacagcctgtgctaccagatcaacgatgtgctgactgcgatggaggctgacagcggcattgcgatgacggcgctcaaggtggacggcggcgcctgcgccaacaactacctgatgcagacgatggcggacatcagcagcctgccggtcaagcggccctgttgtgtggagaccacggcgctgggcgcggcctatctggcggggctggctgtcggctactggaagtccaccgaggatgtgctgcagaactgggccgtggatcgcaagtttacccccgccatcaccgaggaagagcgcgccgcgcggctcaagggctggaacaaggcggtgcgctgctcctacggctgggcgaaggaggattgaccccctaaagccttccccacgaaccaacaacacgaggtaca

SEQ ID NO: 14182 - DNA, 3957 bp, Unknown
  gut microbiota DNA sequence
cgcgggcgtggccgggtgtgcctgcgcacgggagctttcgcgctacagcgcggatattctggtgctggataaggaggaggatgtctgctgcggcacctccaaggccaacagcgctattgtacatgccggctatgatgctgcccacggcagcctgatggcgaaactcaatgtcgagggcagccgccggatgcccgcgctggccaaggagctggattttgcctacgcccagtgcggcagtctggtcgtctgcctgagcgaggaggaccgccccgcgctgcaggggctttacgagaacggctgcgccaacggcgtggaggggctgcgcatcatcgagcgggacgagcttgctgcgatagagccgaatgtctccgatcaggcggtggcagcgctctgggcgcccaccggcggcatcgtctgcccgttcgggctgacctacgcgctggcagaaaacgccgcaaagaacggcgtacagtttcagttcaacacggcggtcacggggctgcacccccttgcggacggacgcggctgggtcatcgagaccgaccgcggcatgctggaggcgcgctgcatcgtcaatgcggcgggtgtctacgccgatgtgctgcacaatatggcggacgccgaccaccccatgaagatcacggcgcggcgcggcgattacttcctgctggaccacacggccgggcagcatgtgcggcatacggtgttccagctgccgggcaagtacggcaagggcgtgctggtcacccccacggtgcatgggaacctgctcatcggcccgaccgccattgatgtcgaggacaaggaggccaccgctacaacggaggcaggccttgatgaggtgcgcgccaaggccgggctggcggtcagggatctgccgctgcgccagaccatcaccagctttgccggactgcgcgcccatgaggcgcggcacgactttttcatcggggagatcgcgcccggctttgtggactgcgcggccatcgaatccccgggcctgtccagcgcgccggccatcggcgcaatggtggcggatattgtgcgggacagcctgcacttaaaggaaaacccggcctttgacccgacccgcaagggcattctggaccccaagacactggactttgctgcgcgggcggagcttattaaacagaatccggcctacggtcagatcatctgccggtgcgagagcgtgaccgagggcgagatcgtggatgccatccgccgtgtgccgggcgcgcgcagtctggacggcgtaaagcggcgcacccgcgcgggcatgggccgctgtcaggcgggcttctgcagcccgcgcgtcatggagattctggcgcgggagctgggcgtggaccagagcgagatcacaaaatccggcggggattccaaaatcatcgtcggcacgaataaagatacattttgagagggggctgcgtccatgaataatgttgatttggtcatcatcggcggcggcccggcagggcttgcggcggcggtggcggcccgcaagggcggcgtgcaggatatcctgatccttgagcgcgacagcgagctgggcggtatcctcaaccaatgcatccacaacggcttcggcctgcatacctttaaggaggagctgaccggccctgagtatgcagcccggtttatcgagcaggtcgaggcgcttggtatcgcctacaagctcaataccatggtgctggatctggcggcggacaagaccgtgaccgccatgaataagacggacgggctgtttcagctgcaccccaaggcggtcattctggcaatgggctgccgggagcggccgcgcggcgcgctgaacatccccggctaccgcccggcgggtatctttaccgcaggcacggcccagcggcttgtcaatatggagggctatctgcccgggcggcgggtggtcatcctcggctcgggcgacatcggcctgatcatggcgcgccggatgacgctggagggtgccaaggtgctgtgcgtggccgagctgatgccctattccggcggcctgaagcgcaatattgtacagtgtctcgatgatttcggcattcctttgcggctgagccatacggtcgtggacattcagggcaaggagcgggtgaccggcattacgctggcccgcgtggaaaacggcaagcccgtccccggcaccgaggagcattacgactgcgatacgctgctgctctcctgcgggctgctgcccgagaacgagctgagccgcgcggcaggcgtggcgctcagccccgtcaccggcggcccggcggtcaatgagagccttgaaacgaatcttcccggcgtgtttgcggcgggcaatgtgctgcatgtgcatgatctggtcgattatgtctccgaggaggctgcagcggccggcgcgcacgctgccgattttatccgccgcggtgagcagcccggtgggacggtgctgcccgtgcggtgcgaaaacggcgtgcggtacacagtgcccacggccatccgccccggctgcgcaggggataccgtgacgctgcgcttccgggtgggcaatgtctacaaaaacaagaaaatcgcggtgtatcgcggtgatgcctgcatctacagccgcaagcggcctgtgctggcccccggcgagatggagaccgtccgcctgaaggccgagctgctgcagggcccgggcgaggccgtgaccgtaactttggaggagggctgacgatggaaaagcgtgaattgacctgcatcggctgccctatgggctgccccctgaccgtagagctggaaaacggcgcggtcacggcggtgtacggcaacacctgcccgcgcggcgatgcctacgcccgcaaggaggtgagtgcaccgacccgcattgtgacgacaacggtgcgggtgaccggcggggtactggccgctgtgagctgcaagacgcggacggacatccccaaggacaaaatctttgccgtggcgcgggcgctcaaggctgtgaccgtggccgccccggtgaccatcgggcaggtcgtgctgcccaacgccgccgacaccggtgtggatgtgatcgccacaaaaaatgtggctgtaaagtaagcggagaagcccccactgtcagggggcttctttcgttccggggctcacgggcgctgtgttatgaaaataactttcccaaaaggttaaatatttcaagaattttgggcaaaaatcaacggcatgtttgaataatgcacaaaaaaactgtcgttttttcagcttttcgacaattctgctaaaaacactttcttttttatgaagaatatgttaatatctaattaacaaagtgctgtggctgcagaaccagacagctccggcaccgagttgggagaaacccactcaaaaatttggaggaatgcttttatgatgaagtatctgcagaagctcggcaaagctcttatgcttcccgttgctgcactgcccgtctgtggtatcctgatgggcatcggttacgctttcgctcccgctgttatgggtgctgagggcgcaacttccggtttcgcttacactctcggtttcctgctgatcaaggccggcggcgccctgatcgacaacatggcttggctgttcgccatcggcgctgctgtgggtctgtctgacgaccacgacggcactgccggtctggccggtctggtcagcttcctgatgatgcagcagctgctcagccccggcgttgtcggcgctgtccgcacgctggaggaaggctccgtcgattacattgctttcagcaagatcgccggcaactccttcatcggcatcctggccgccatcatcggtgctgcctgctacaacaagttcaagaatacccagctgcctgactggctggcattcttcagcggcaagcgcagcgttgctatcgtgaccgccgttgtttccatcgtggtttccgttgttctgctgttcgtctggcccgtcatcttcggcgttctggttgccctcggcaacggcattgccaagatggac

SEQ ID NO: 14183 - DNA, 21906 bp, Unknown
  gut microbiota DNA sequence
atacgcgcccctcatccggccctgcggggccaccttcccccatcgggggaaggcaggagattatttcagcagcttaaacagctcctccgcgcacgcctcgggcgtaatcacattctccggcatggggatgccgagcttgaccagctcatcgcgcagctcggcggcctgcggcacatccagatggtagctgtgcagccgctccgtctggctgaacacctgctccggcgtgccctccatcacgatgcggccccggctcatgaccagcacgcggtcagcctgagcggcctcctccatataatgggtgatcgagacgatcgtgataccggcctcccgcagctggcggattgttttcatgacctgactgcggccgtgcgggtcaagcatggcggtcgattcgtccagaacaaggcagtccggccgcatggcgataacgcccgcaatggcaacgcgctgcttctgcccgccggaaagcttgtagggggcggcatcgcgcttttcatagatgccggccagcttcatggcctcgtcaatgcgggcgcggatctcctcaggcggaacgccgaggttctccggtgcaaaggcgacatcctcctccacgatggtggcaacgatctggttgtcagggttctgaaataccatgcccaccttctggcgcacatcgtagagatggtcctcgttgcgggtgtccatcccctcaaccagcaccgtgcccgcctcgggcaggaggatcgcgttgaagtgcttggccagcgtggatttgccgcagccgttggcccccagcaccgccacgaactcgccgcggtggatggcaaggctcacgccgtccactgcatagctgggctgctcggggtcatagcggaaatggatgtcctgaacattgatcataggttcttctctcggcatggtttatctctcccagatggcggttgcgccgcagggcacaacaccgccggtggcggagaccggcagaccgatctcatcgcagtgggtgtggccgcccgtgacggggcagagcgtcgttttaacgatgtattccatgaccgccgggcttaagccctcggtgtaggagttgatggcaaagaaaagcggctccccgctgagcacctgctccgtcagggtgatgaggtcgtagacattgtcctccagcttccagatctcaccgctggggccgcggccgtagctcggcgggtccatgatgacggcatcgtatttgctgccgcggcggatctcgcgctgcacgaacttcacgcagtcgtccacgatccagcggcaggggcgctcggcaaggccgcttgcggcggcgttctcccgcgcccaggccaccatgcccttgctcgcgtccacatgggtgaccgaggcaccggccgcaaggcacgccagtgtggcgccgcccgtgtagccaaagaggttcagcacccggatcggccggccggctgcgcggatcttttcctgataccacgcccagttgacggcctgctccggaaagacgccggtgtgcttgaagccggtggggctgacgatcagggtcagatcgttccagtggatctgccacttctggggcagtcttttgtggtaatcccactgcccgccgcccttggcggagcggtagtagacggcatcagcgttcgcccacagcgggctggtttcggcatttttccagatgacctgcgggtcaggtcggatcagcagggtgctgccccagcgctccaaccgattatggttggtagcatccagcagctcataatcccgccaggaatcagcagggcgcatattcaagtctcctttttgtctttttcatcggtcaaaacatactctgctggccgttgtcattatcgtcaaagcggcggggcacggccatgtgcagatgctcataggcaaggcgggtcacacagcggccgcgcggggtgcgcgtcagcatacccatctgcatcaggtagggctcgcagatgtcctccagcgtgacgctctcctcgcccagggcggcagccagcgtgtccagacctacggggccgccgccgtacatctcgatgatggcgcgcagcacgctgcggtccagctcatccagacccagctcgtcaatgtccatccaccggcgggcggcgatggcggtctcctcgtcaatggtgccatcgccctgcacggtggcaaagtcgcgcacccgcttgagcaggcggttggcgatacgcggcgtgccgcgggcgcagcgcgccagctcaagcgcgccctcctcggtgatcggcacacctaaaatcccggcgctgcggctgatgatatgccccagctcccgcgggctgtacagctccagcttgagcaggatgccgaagcggtcgcgcagggggccggtcagctgcccggcacgggtggtggcacccaccagcgtgaaccggggcagattgatgcggatgctctgggcgctgggacccttgccgatcatgatgtcgagggcaaaatcctccagcgcggggtaaaggacctcctccacctgacgggacaggcgatgaatctcgtcaataaaaaggacatcgccctcctgcagattcgtgagcagggcggccagatcgccgggcttctcgatggcggggccggaggtgatgcggatctgcacacccatctcctgcgccacaatgccggccagcgtggttttgcccagacccggcgggccgtagagcaggatgtgatccatcggctcgccgcgctgctgtgccgcccgcaggtagacccgcaggttgcccttggccttctcctgacctacatagtcatccagcgttttcgggcgcaggctgacctcctccgcatcagcggaggaggcgtcggggctgaccagacggctggggtcaacggtgtattcctgattcaagctctagcactccccttcccattaaatgcgcgacaggctgcgcagcgcaatcgtgatgatctcctgcaccgagagggtctcgtccacccgggccacggcagcggctgcatcggaggcggcgtacccaaggctgaccagtgcggccacagcctgcgccggtgcggaggtgggcgcgggggcggcgctgccgcccgcaaagccggtgccggcggccagacccttgccgaccttgtccttcagctccagcgtgatgcgctgggccagcttgggcccaacgccggccgccttggtaaaggccttgtgatctccgctggacgcggcaagggcgattttttcgggcgtcatgatcgacagaatcgacagcccggccttggggccgacaccggtgacggcggtcagcatcttgaagcagtcgcgctgctcctccgttgcgaagccgtagagggagacatcgttctcggtcacattcatgatggtatagacggtgccctctttgccgacggggggcagagcctcgccggtggtggcgggaatctgcacgaaatagccgaccccgccgcagctgatcacaacggaatccagcgtttttttgatgatttttccggttagacagtagatcatggtgtgtccttcttttgtatggtggaaagccttcccccttggggggaaggtgcccgagggcggatgaggggcagcttgtcgggtaccgcacgcaaacgggtgattgcggaaacctcatccctcatccggccctgcggggccaccttcccccacttgggggaaggcaagggattatctcaccggcgtccccatcaggcggctgcggctgcagtggcagtgggcaatggccatgcccagcgcatcggcggtatcgtcaggcttggggatgctctccagatgcagcatcatgcgggtcatctcctgaatctgcttttttgcggccttgccgtagccggtgatggcctgcttgacctgcatcggtgtgtattcgtagatcggcacgccgcactgggcggcggcgagcagaatgacgccgcgcgcctcagccacgccgatgacggtggtctggttgtgctggtagtacagcttctcgatagagagggcctcgggctgatagcgcttgcagatatccagcacgccctcgtatatttcaaccagacgctgctcaaacggggtgtccttctcggtgatgacagccccgtagccgatgggcgcaaagcggttgccgatgtattcgacaacaccccagcccacaatggcgtagcccgggtcgatgcccaaaacacgcatttatcccatacctccccactttaaccgatatagtataccataaaaacaacgctgcgtccactgtttggggtaaacattccgtgaatttgcacagaaaaagcaataaaaattctacaaacaaaaaagcacctcccggacagggagatgcttggctgtaagggcagcgatcaatacccgatctgccgcttggcggcccgcagcgccttgcgcaggggccggtacaacagcagcataatggcaaagttgcctgcgccgtgcagggcgtcatagctcaggccgctcagccaccagctcagcgcaaaggccggggtcttggcaaacaggtagacggcagcgcacagcccgccgaagcacaggccgtacagtccgctgaacacagcccagagcagtgcgtggtccatacggcgcaaaagccatgccagcagcgccagcagataccacacatacaggtacatggcccaccagaggccaaacccgtacaagacgccctgcagcagaataaagaccgtgatggcagcgggagtctcccgcgggagctccagcgcaaacaggatgatgagcagcgtcacgggctcaatgttcggcaggccgctcatggcctgcttgctgacaacgagcagtgcccccatcagcccgctcaataccaggctgacaacgcggcggtggttacttcgtgtaggtgaaggcatagctgtcgccgtcatgcagttcgatgtcggccacgccaacggaggtcatctcaccggcggcatcggtcaggcaccaccaggtaccatcggcgttatagtcggcctcctcgccgttgacaacggtgacaaagccggcagcggcctcctcggcgctgatgataccggcggcggccagcgcatcgctgagcttttcgccgtctgcggcgtcaagggtcaggacggtgctttcgccgtcggcaccggtgacggtgaaggtgactgcgatggcagcagcggcgtcctcggcggtggagacagcagcggactcagccggtgctgcctcggaaacgacctcagaggagacagcctcggaggaggcggaggatgcggaagcaccgcagccggccagcagacctgcggccagaatcaggctcagaaccagagcagaaagctttttcatgggatgttacctctctaaaattgtgattgcgtacaaatttgcgcagcaatcattatacaaaatgccaagaaaaaatgcaagtgccgggtggggctatgagcccagctgctcgcggtggtactgcagcgtgtagagctggtaataccgcccgtggttggctaaaagctcctgatggctgccctgctccagaatcttgccgtgggacagcacgatgatgttgtcggcgtgctggatggtggacagccggtgggctacgatcagcatcgtgccgacagagcgcatcttttccagagaatcctgaatcaggatctcggtctcggtgtcgatgtttgccgtggcttcgtccagaatcatgacactgggcttgtgcaggatcgtccgcgcaaagctcagcagctgccgctgcccggccgagaagttgttgccgcgctcgcggacctcctcgtccagaccgtggtcaagcttggcgataaacttgtcggcgttcacatagcggcagacccgcaggatctcctcatccgggatgccctcctcccgcaggacgatgttgctgcggatcgtacccgagaaaaggaacacatcctgcagcatctgcccgaaatggcggcgcagcgaggaaatcttgatcttgcggatgtcgatgccgtcaatcaggatctcgcccctctggaactcatagttgcggcagatcagcgacaaaatcgtgcttttgccggagccggtggaccccacaaacgccaccgtctgacgcgggtctacatggaaggagacgccctgcagcacccactcgccgggtatgtagctgaaccagacatcccggaattcgatttcgccccgcacctcttccagctcgatggcatcgggggcgtccaccatcttcggctcgatgtccatgagcgagaacaccttttccgaggaggccagcgccgattgcagccagttgaactgctcggccagattctgaatgggggtgaagaacttggagatgtacatgtaaaaggtcacgatggtgccgccggtgatggtctggcccataaaactcacgccattcaagtgccccatgccgcccagatagaacaggcacagaatggagcagatgtacagcatatagaccagcgggcggaatacgccgaacacaaagatctgctcctgcgtgaccttggagagcgtctggcttttctcgcggaactccgccatcttctcatcctcgcggccaaaaatctgcgtgaccttgatgccggacaaattctccgacaggtaggtgttgatgtcggtggtggcgtccttcaccttgcggtaggcgcggcgtgaaaacttgcggaagatgaccgtgaagatcacgatgaacggcacaaagcagagcaccatcagggtcagtgcgtaattcaggcagagcatggcgatcagtatgcctaaaatcacaaagatgtttttggtcagactgacaagaagatttgtgaacatcatcgagatggcgttcgtgtcgttcgtcacacgggtgacaagcttgccgaccggaatctcgttgagctgctcatgggagagggattcgatgtgggtaaacagatcctcgcgcaggtcggagatgatgcgctggccgacccgctgcaggatgaccgcctgcaggtaggtgctggccatggaaaagaccagcacacctgcatagactgccacaccgatgtagagctgcggcagggcgaaatccccggataccagctcctccagcgcaccgacgatcagcggtgaaacaatgtcgtaggcaatggaaaagagcatcaaaaacaggacaatgacaaactttgcgcggtagggcttggcataaccggccagacggcgcaggatctcgctgtccgccatcgtgcgctcaaagcccatcgtctcttttttgtccttgaccagcgcgtaggccagcaccagcagcgccgtcacggcaccgatgacggcgccgaccagcaccagcggattgagttcagtcatctgtgtcacctcccgcttcgtcctccagcttttgcaggtccaccatgcggcggtacgcagcgcagctgcggtagagtgtatcgtgggggccgacagcctccaccctgccgtcctcaataaagatgatcttgtcgagctgctccaccgtagagatgcggtgggcaatcagcagggtcgttttgcctgcgcggctcgctttcaggttgtcgaggatgatgcgctcggtgcgggtgtcaacggcggagacggaatcgtccagaatcaggatcggtgcgtccttgagcagggcgcgggcaatcgagatgcgctgcttctgcccgccggaaacggtgacgccgcgttcgccgaggacggtttcaaacccgtccttgaagtccacgatgttgtcacggacatcggccagcgcagcggcatggtcgatctcctcccggctggcaccgtccacaccgaagccgatgttgtgggcgatcgtatccgagaagaggaaattgtcctgcggcacataggcgcaggcgtttcgcaccgagcggatggatacgctgttcacatcctgcccgtccacaaacagggtgccgtccggcacattgtaggtgcgcagcagcagatccaccagcgcggtcttgcccgcgccggtcttgcccacgatgccgacgctctcgccggggtgcacggtgaaggagacatcccgcagcacatcgtattcaccgtccggatagcggaaattcagatgccggaactcgatgccgccgcgcgggtcggccaggtcggccacgccgtcccggtcggccacatcaatcggcgcatcgagcagctcggtgatgcggttcagcgatgccctgccgcgggccgttttttcgatcagcatcgagatggccatgatgggccagacgatggcctcaaagtagccgatatactccaccagctgcccggcgttgaactgcccgcgccagacaagccagccgccgtagccgagaatgacacagatgaccgactcgacaaaaagggtgaccagtacctcgagcagggtggcaatctttgtgtaggtgacattgatctcctcgttctgcttgttcagcttacggaaggcaatcagctccttcagctccttgacgaacgccttgatgaccgcgatgccggaaaagttctcctgcgcaaagtctgacaggtcggaaaaagcctgctggcgctcctcccaccgcttggtcatgacctgactcatcacggtgccgatggcgaacatgacgcccgcagggatcagcgccagcagcgtcaggcggaaatccatccgccacatcttgaccagcgccatcagccccagtacagcggcgtcaaagaacatcaggatgccgtcaccgaagcactcctgaatggtgtcaaggtcgttggtgtacaggctcatcaggttgccgaccttgttaagctggtaatactgctgggacaggcggcggctgtggtcgaacatccgctcccgcaggtcagcggtgacccgcacagccgagccgaaaaagcagatgcgccacaaaaagcggcctaccaccataagcactacgatccagatcataggcaggcagatgtgctgaaacagcacctgcttgtcaaaggggattgtctggccgtttacgaccacctgccccagattgacgccgttgatgaccagccggtacagctccgggatcagaagctggatgtagtccaccatcaaaagcgacacaatgcccagaagcagcaccggcgcatttttgaggtagtatcggttgatgtgtttgccgaagatcacggcgggtatacctcccttatccatacagtgtgcggcaaaggccgcagataaccagtatagcgtacctgcgcggtttcgtcaatcgtcccccgaaaatgcgcagaacggtatacaaaaaaatccccaccggggggtgacccgatggggatttggtgcgcggtacaggactcgaacctgtgacctcctgcacgtcaagcagatgctctaccagctgagctaaccgcgcatgtcgcgccgcctcttggcgacgcatattagtataacagatgcttttacaaaatgcaagcccttttgcaaaaaaacttttgctttttttgctgtatgcgcggggcggggcttacggcacagcggtctccagctgcggggcaccgccggcaagcgcctctgcggtcaggggggccggtgcctcggccggcttgtccagcttttcgcgggcaacggccagcatcagcttgatgcggttctcctgattgacacgggtggcgctggggtcatagtccacgggggtgatgttcgcatcggggtgcagggcgcggatcttgttgatcatacccttgcctacgatatggttgggcaggcagccgaacggctgcgcgcagacgatattgccgtagccgccctcgaccagttcgatcatctcggcggtcagcagccagccctcgcccattttggcacccagagagatgatgccctcgggcttcttcatcagctcgcggaaggagcccggcgcgtagaagccgtacttgcgcatggcatcatagctggcgcagccgatcgaatccagccagctcaggaagaaatccgcaccgcccgctaccagcttattgccgccgtacaggtcgatgtccagccggtagttggctacgcagtattctacaaagcccatcaggccgggcaggttgacctcgcagtcctgactttcaaggaatttttccagatcgttattgcccagcggcgaatatttgacataaatttcgcccaccacgccgaccttgaccttcggcacacgggtgatggggatcgtggcgtagtcggcggcaatgtcgtagaaccggcgtttcatatcgtgggcggaataattcttgtcgtccttgatccagccctgaatcgtggcaatccacttctcagtcatggcgtcggcgtcgcccctgcggttttcataggcgcgggtctggctgcgcagcgccaccagcagatcgccgtagaagatggacgcaatgaccttgcgcagcagcggcaaggtcagcggcagaccgctgcccttttccagcccggagaagttcagcgatgccacggggatattgccgtagcccgccttgacgagcgccttgcgcaaaagcttgatatagttggacgcacggcagccgccgcctgtctgtgtgatgagcagcgcggtgtggtccagatcgtacttgccgctgttcagcgcgtccaaaaactgcccgatgaccagcagcgccgggtagcaggtgtcgttgtggacatatttcaggcccagctgcgcgacctcgctgccgcagttgcccagcacctcggtctggtagccctcgctggcaagtgccgcctgcataagccggaactgggtgaccgccatgttgggaatgagaattttatgggtctttaccatgtccttggtaaagttgggagtcatgtattccattcgatttgcctcaatgatcagtaggagtaagagccgccccttgacaagggaggcttttggggttactgcttggcctcgtgccgttcctccagcgctgcaaacaggctgcgcaggcggatgttgaccgcgccgaggttggtgatctcatcaatcttgagctgggtgtacagcttgccgcccgcctgcaggatctcgcgcgtctcatcggtggtcacggcgtccagaccgcagccgaaggataccagctgcaccagatccatgtcgggattctcggtgcagtatctggcggcggcgtacaggcggctgtgataggtccactggttcagcaccgaggtctggaatttctgctcatgccagctgacggaatcctcactgacgacagccgcgccctgacggatgatgagctggtcgatgccgtggttgacctccgggtccacatggtaggggcggcccgccagcacaatgatgcggcggccctcggcgcgggcggcggcgatgatctcgctgcccttgtcgcgcagctgctgcatgtggcggtgatactcgtcataggcggcgtcaatggcctcgcgcaccgcctttttgtcaagaccggggaaatatttgtcaagtgactgctgaaatttcttgtagaaatccttccggcgctccagattgaagtagtcgtagaggaacttcgttgcgttcagctcggggcagttgccctccagcacctcggggtaataggcgaccacggggcagttataatggttgtcccccagatgctcatcaaggttgtagctcatgcaggggtagaagatggcgtccacgccctgcccgcacagccagtggatgtggccgtggctcagcttggcggggaagcaggctgtgtcgctcgggatcgttgcctgaccgctctggtaaaggctgcggctcgagaaggggctgaccacgacctcgaacccgaggcgggtgaacagcgtgtgccagaacggcagcagctcatacatgttcaggcacagcggcaggccgatgcgcgcgcgcggtgcggcgggcgcgggggcattgcgatagccgtccagcagcttcagcttgtaggcgtacaggtcaaggtcttcgttgttggccttgccggtcacgggcttgtcgcagcggttgcccgagatgtaccgcttgccgtccgcaaatacattgacggtcagctggcagtggttgccgcacccctgacactgcacggtgttgaccttctggctgaactgcgcaagctcctgctcggtcagtacggtgctgcgggcgttctcccctgccttggccttgccgtacagcgctgcgccgtaagcgcccatcaggcccgcgatgtcggggcggatgacatggacgcccatctccttctcaaaggcgcggagaacggcctcgttgtagaaggtgccgccctgcacgacgatgcggcggcccagttcctcagggctggaggcgcggatgaccttgtacagcgcatttttgacgaccgagatggacagaccggcgctgatgttctcgatcgaggcaccgtccttctgcgcctgcttgacgctggagttcataaagacggtgcagcggctgccgaggtccacaggcttgtcggcaaacaggccgagggcggcaaactccttgacatcgtagcccagcgcttgggcgaaggtctgcaaaaagctgccgcagccggaggagcaggcctcgttcaggaagatgttggtgatggcgccgtcctcgatcttgaagcacttcatgtcctgcccgccaatgtcgatgatgaagtccacatcgggcaggaagtgcttggcagcggtaaagtgggccaccgtctcgacaaggccgcggtcgcagtggaaggcatttttgaccagctcctcaccgtagccggtcgtggtcacactggcgatctgcagcccggggtgatcccgatacagcttgagcagcgtctccttcacaagcgggatcgggttgccgaggttggggcggtagctctcgaacaaaatgttggcgttgttgtcaatgacgaccagcttgatggtggtcgagccggagtcgatgccgatatgcacggggccgcagtctgcgccgaagggcaggcagggcacggtggccttcatgtggcgggcgtggaacgcctcgtactcctgctgatcggcgaaaagcggcggcaggcttacataggtggcggcggcgctgtagttgtccagccgctttgcgacctcgcgcaggtcggactcctcatcggcgtagaaggctgcgcccagcgccacaaagagcaggctgttttccggcagggtgccggtgacgccgagcgttttgtcaaagctctggcgcagtgtccgggagaaggtcagcgggccgcccagatacaggatattgcccttgatggggcgtccctgcgcaaggccggcgatggtctggttgacgactgcctgatagatcgacgctgcgatgtcccccgcctgcgcgccctgattgatgaggggttggatgtcgcttttggcaaaaacgccgcagcggctggcgatcgtgtaggtgcgggtggcgctctgggcggccttgtccatctcatcggcacccatcttcagcagggtggccatctggtcaatgaaggcgccggtgccgccggcacagctgccgttcatgcggacctcggtgccgttggtcagaaagaggattttggcatcctcgccgcccagctcaatgatgcagtcggtgcccggcatcaggcggttggcagccacgcgggtggcaaagacctcctgcacaaagggcaccctgcagctgtcggcaaggcccatgccggcagagccggagatggccagatacgcgcggccttcaggcagatattcggcggcgactttttccaaaagcgctctgcccttttctaaaatatggctgaaatgacgctcataggtagaataaacgatctgcccggcgtcattcagcacgacacatttaatggtggtggaaccaatatccagaccaactctcataggctttagcctcctgcgggtcaggcaaacccactgaagctgcgcgccgtagggcggataagcggggttgccgttggggtgattgcgggatactgaaggccgggtctgccccaaggcgctacaatatcagcatatattatacaggtttcttgaaaattcggcaagagtgccgccgcataaaatcgttgtcaaatgacaggaattgtacaaaaacacggaagcggtgcgaaaaaaatccgcaccgcttccgcgtcaaaagaaaagaggagtatggatgaaaaacttggggtcctgttcatcaggtcaggtccctgctcccttcctgagaacatctatagtataccccggatttgtgttaaagtcgtgaatgaatattcaataaattaagaagggtttgtgaacaaatgggaggggcgaaaaggcttccccccccctcggggaaagctgtccgcaaagcggactgatgagggggaccttgccgcgattgcttcttcacggggctctgcggcacacgcgcccctcatccggccctgcggggccaccttcccccccttgggggaaggcaaagaaaaatctcacccagctgcatcgccgggtgagatttatgtattgaagtttactgttcttccccattcagcctgtcgatctgatcctgcagcagctgggacacagggcggcgcgtgttgcgcagccggtgggccggggctgggggcatgtggtgcgcgggctgggccttcttcgcctttacgcgcagccggtcggcgggcttggctgccggggcctgcgcggcggcggggcgcggcggcaggggtgcaggcggatccgtctccggtgtgccctgcgcaaagctgcgcatgtcggtgcccaactccttcagctcggcctcagtctggtcaagggcctgatagatggcctgcgtcaggccgtccagatccagcgtggcggcgctcagccgttcatccacgcgggccagacgctcccgcaccagcataacgcccgaggcgatgctgcgggcattctcggccatgcggttcttctggctgtctgcctgctgcttcagctccttctcggcgctctcggcgtacaggcgggcatcggccagaatcttaccggcctcaagctttgcctcccgcaccagatcggacgcgggggtgctcagggacgaggtgttcagctggcgcgctgaatccagctgcttctgcaactcctcgacctgcttttgcagatcgtcattcttctgctgcagatcgtggtgcttcaactgccagatgttggcgtttttctgggattcgcgctggttggactggtaggaggcagtctgcttctgcagcgcctcaagctgctcctcgctctcgcggcggcgggtctcggcggcctcggcgcgctggttggcagcggccacctcggccttgagtgcctcgatccggctgtcatcgctgctctgttggctgcgcagctcgtccagacgggactgcatctgctgcagctggcggttgtactccagctcatgctgctgggcctcgttggccagcgcgttcatgtaagccagcacatcatttttatcaaagccgaacaagctggaacggaagccctgttcctgaatgttcataggttcagacggcatggctttttacatcctctcgcagaaaattgatcaggaacgcttgttcaggatgctgagcagatcgtcaaagtaatcgccgtcatcctcttcctcagccggggcagcaggctgggcagccacgggggtatccatgccggtgctgaaagactgggtgaagatggggttgggcatcggcgggttgatgggctgctgtgcgggctgcacgggggcggcgggctgcacaggctggacaggctgtgcgggctgctgtacagcggtctgctgggcggcgcgtttggcgtccacatgggcctgaatcggctcgtccacctcgggggtgctctcaaagccggtggccacaacggtgatgctcatctcatcgctcaggcgctcatcaaaggcagtaccccagatgatgttggcatcgggatgggcgctctgggtgatcatgctggcagcggtttcgacatcctccagaccaatgtcggggctggaggtgatgttgatgatgacgccgcgcgcaccggcgatgctggtctccagcagcgggctggagatggcagccttggcggcgttctcggccttgccggcacccttggcaacgccgacacccatgtgagcgaagccggcgtccttcatgatggagcggacatccgcgaagtcgaggttgatgaaggcaggaatattgatcaggctggagatgctctcaacgccctgacgcagcacattgtcggcggcctcgaaggcgttcatcagggtgatcttctcctggctgatgagcttcaggcgctcgttcgggatgacgatcagagagtcaacatgcatcatcagggaggcgatgccctgctcggcctgcgccatcttgcgcttgccctcaaaggcgaaaggctttgtgacgatgccgacggtcaggatgcccagatcatgggcagtctcggccacgacaggggcagcgcccgtgccggtgccgccgcccataccggcggtgataaagaccatctgcgcacccttcagggcgttggtgatctcatccttgctctcctcggcggcgcgctggccgatctccgggtcagcaccggcaccacggcccttggtcagcttggcaccaagctggaccttctgggtggccttggagttcagcagggcctgctggtcggtgttcattgcaacgaactcgaccccggacagaccggactcgaccatgcggttgacagcgttgccgccgccgccacctacgccgatgaccttgatattggttacattttgcatttcttcgtcgagaacgaatgccatgagtgtatccccctaaaagtgaagttgttaaaccggacccgatgggtactgcaccccgcgcaggggcacactggtccgctattttttacatataactgattattagaatatcaaattttacatgcaatttcaataccctgagggcaaattcataaaaaattgcgtttctccctgcgcttttgccggacaagaacgggatagaaacgcgaaaatttggcagattgctatattttaaagggaaaggcaggcagttcccgcaaaaagcgccgcagggggcggaccgggtctgccccctgcggcgcgggttttgaattacgctgtgccgtgcgcggcggtgcagtctgccccaaggctgtgcagctctcccggcaggtcggcgtagccgcgcgggatatgcccggggtcgcgcagcgtggtctgcccctcggctgcaagcgccgcaatgagcagcgccgcacccccgcgcaggtcgggggcggtcacagcggctccgtgcagcgcagcaccgccgtcaatgtgcagccgccgtccctgcgcggtgcagccggcccccaatgcggcaaaccctgctgcgcaggcaaaccggttggcgaacaggcggtcatagatttcactctctcccgctgccgtcagcagcacggcggcggccagcggggcagtgtcggtcgcaaaggcgggccaggcgtcggcggtcagtctgaccccgccccgcagcggcgcggcggggtcgcgggcaagccgcacgcagtcccctgcccgggtcacggtcacgccggtttcggctagaaagcgcagaaaggccccgtaaacggccgggtcgcagccgcagatctcaacctcgccgccggcggcggccagtgcggcggcataggtagcggcagcgatgcggtccggcagcgggcggtgcgcggtgcccgccagcgggcagcccccgtccaccgtcagcaccggcgtgccgcagcccagtatccgggcaccgcatgcctgcagaaaatgcaccatatcgcctatttccggctcctgcgcggcgccgcgcagcacggtgcggccccgggcgcagcaggcagccatcagcagcgtgagggtcgcgccgacgctcggcaggcgtagcgtaaagtccacgccatgcagcgggcctttgcgccgcagcgtcacggcgatgccctccagctcgacctcggctcccatggcggccagcccggccagatggatatccaccggccgcggccccagacggcagccgccgggcagcggcagccgcacataccctgtgcggcagagcagcggcgcaaggtaaaacaccgagctgcgcattgccccggcaagggattcaggaatctcgccgcagagcgtctgcaccggccgtgtacacaggtccgcgccgcaccgccgcacatcggcccccacggcctgcagcagcgcaaggctggtcgttacatcggcaagggccggcacctcctgcaggcggcagggtccgcggcagagcagcgtggccgccagcagcggcagcgtgctgtttttggcggccgccgggcggatgcgcccatgcagagcctgcttgccggtaatggtgatcatctgcatgtgcgggcctcccccgaaaaaatatggaattgtatgcaaaaaggcttcccaccgagggggaagctgtcagcagagctgactgatgaggggcgtgtttgccgcagcagtaccattgcagggcaacgatggaaagtctgcccctcatccggccctgcggggccaccttcccccaagggggaaggctggggtatatcttctaccctgttatatgccgcctgcccggcaacatattacaacagcatcggctgcagctgcaccccgcgcagggcagcgtccagcgtgtcgggcagcagggtaaaatcacttttcaggctgcggggctttttgtagcagtcatcctgaccgaagggcacaaaatagtagctgcgccgctgcaaaagctggcccagcgccggggcgctgcccgccagaccatcgttggtggagggggccagtatgaccggccggccgccacgcagcaggcttttggccgccagtgtcaccggggtcgcgctgatgcccgcggccagcagcgccatcgttgtgccggtggcaggggcaatgataagggcatcggccagcttttgcgggccgagcggctccacgctctgcagcgtggtgagcggttcatggccggtcagctccaacagggtctgccgcagggctgctgcggtgccaaagcgggtgtccagccctgccgcgctggcgctgagaatgggcaggatctcccacccgcgcgccgtcagcacctgtatctggggcagcacggcggaaaagctgcaaaagctgccgcacagcgcaaaggcggcagtgcgtttcggccgggtcatcatggctcgctcctttctttctgttcttcgtgctcttccagaatggccagcacggtctgggcaatcagcgctccggcggtctgcggggcgcagcgccccggcagggccagcgcatgctcggcgtgcaggcccagctcctcggcggctgcaaagtcggtgccgccgggcaggctggcaaggtcgatgatcagcgccccggccggcagccgctgcaaaagcgtgcgcggcagcaccggcgcgggaatcgtgttgatgacggcgtcaaaccccggcagcagcgcgggcagggcagtcagcgcagcggcgcggcagccgctgcagcgggcgttggcgcgctgctcggggctgcgggcagccacggtgacccgcccgcccagcagtgccagccgacgcgccacggcacggcctacccggccgtagcccagcacaagaaaggcactctcccagatcgtgcgctcccgcaggcggagcagcagctcaaggcagccctcggccgtggggacggcgttcagacattccagttcgggccgctggaaatagtcgatcagcggcagcccggcctcccgtgcggccagccgtaccggcaggccggggcggcctgccagaatcagcgtcccctgccctgcaccctgcagggcgcgggcaacctcatcgctgacgcggccctgagacatcggcagcaggatgtaatccgctgcggcggcattgtcggcggcggtcacgccgcagcctgcgcggcgcagcacacgggccgccgcctgctggcgggcatcgtggcccaccacacagaaggtctttggcatacgcgctcacctcgttttgttttgcgccatactatgtcctgcccgcgcagagtgtgaacatccgctgatggcccgccccttcgctgcggacgggcggtgacagcaaaaaagcacccatcccgtttggggtgggtgccttgggatcaatagagcttcagaccatcgcagcggctgcgccagacggccagcgggtcgatgggaacggtgccgatgcgcatttctgccacaacggccttgctgcagccgcccagcagctggccctgcttgacggtatcgccggtcttgacctccagtgaggaaagaccgtagaagatgctcttgaggcctgcgccgtgttcgatcacgagggtgttgccgtagaggccgccgaggtccttcgccagcagcacacggccgctggcgggggcaatcatcgagcctctgccgtttttggggcggatgatcacattggtcgaggtgcgcccgccgtagccgtagttggtgccccgctcactgtaggggcggcccgcgtactcagtcatgccgtaggtcagcggggtgtcaaagctgtcaaggaagggctgcacaaagccgcctacggaccactggatcttgtcgtccacggtggcgaacagcttgctgactgccgccggggcatcgtcctcgccgatgtagggcgcggccatctgggaggccctgctgtagtccttgtagctgaaggagcctgcgcgcaccgacagggagagctgctcggtgtagccgtcggccgatacctccaaatcaatgctgccgggcgtctggttccatgggatgggcaggtagcagatccagccgctgcctgccttgacaaagccgacatttttgagggtggtcttgatggccggggcatcctgcccgagggtctggccgacccgcactgccgccacaccgccctgcgccacgctgtcggttgcaagttggatggacggcttgatgctgaccgtaaagcggaactgccatgtctcagtgccggtcacggttgcctcatcagcgggggtgccgcttgtgctgacgatcagcttggcatcgtaggtgccgttctcaacaaaacggtagctgcgaaagccggtggcgctgccgtcatagatggattccccggcggcatcggtgatggtcagctgggcgctgtagccgcccggcgtgatgaccagatcgggcgaagcaccggacaccggcagtgccagttcggccggggccgggttcggcgtttcggcataggtgcggcggagccagctgccgacgatcggcacatgccatttataggcggtgggggcaagctcctgtccgtcaaaggtggccttgatctggggcagcatatcgggggtggcgttgtggtagagccacgctacgccgccgcacgcgatgaccagcacaaaaagcacgaccagcagcagccagcgcagcatgccggtcacaccgcgcccaagcttttgggtaagggtgtccgcaggctcctcctcggtgtcctcctccgtgctgtccggctcggcgggcggcgcatcaggggtgtcctcggcgggggtgtctgccagcccggccatgatctgggcgatggaaagctgcgccgtgcgggcgatggtgtccgcacgggcctttttctcgggggcgtcctcctccgtggcattggcagcagcctcatctgcatcgggcacaggctgctccggctctgcgcaggcggtatcttcgggggcaggctcggccgctgctgtttcatcggcgccggtatcagacagggctgcctcggcaggctctgccggttccggctgctcggcggcctcgggctgtgaggggactgtttcaggggtttccggcagtgacacggggatggcgtctggctgcggggcgtccggagcctcgggcacctgcaggggtgcaggtgcagtttctgcgggggtctccggggtatcgctcacagccggctgctgcttcggatctgccgtggcggcgggctttttgggcttgcctttggccgctgactttttgcggctgcgcctgcggggcgcggcgggggctttttcggcccagtccacaccggctgtggctttcttctcttcttccatgcttactcccactctcttagggcaataccgcataattttaagcgccgatacggcgag

SEQ ID NO: 14184 - DNA, 10053 bp, Unknown
  gut microbiota DNA sequence
cacccggccatacacacggcacggcgggccgggggcaccgcgccgatcgtaatattctatgggcggcatcgccgtgcgatgcctgcgttattcagtctcgcggaattgcagaccgctgctgccgttcagggcaagctgcgggtcggtggatttgctgccgatgcgcagctcatagatcaggctgtggctcgtcccggcagtacccagcgggtcgccggtggaaaccgactgcccgcgcacaacgccgaccgtttccagaccgtacagatagctttttacgccgcagccgtggtcgatgaccacagtgccgccggtcagggtcagcgtaccggcaaacacgatgttgccggcctgaggggcagtgactgtctcaccgtctgcggcagcataggtcaggccggtggcctgaccgctgcgctggccgtccaccatctgggtggtgccgtaggccagactgaccgcaccggcgctgggggcctcgaaccggccattccatagcttggcggagctgccggtggtgtaaagcggccagatcgcgttgcggaactcctctccgccgccgacatcctcctccgccgggacggagacggtgtcgtacagtgtgcgggtcaccgtcagggtgatctccttttgcagggtgccgcaggtcagctgcagcgtatggtcgccgccctcggcgttgtaggttacgggcaggtagcccatgtaccccgtggcggtcttgcggaaccatacatcgccgagatcactctcaacggtcggctcgccgtccagaataccggacagctggatcgccacgatgctgccctgcggcgcgcgctcgctgctcagggtgaccttggggttcatcgccattgtgtagccggcgcggtaggcgtaccagcccaccgggtcgccgggggcatcactgtcgctgtggtgggcggtcactatgatctgatacgcgccgttctgggtgtaggtataggtgttgcagtcggtcaggccgcccgaccagacggtgccgtctggcgcggtgatctgcacctcggccgctgtgacccattcgggcagggtcagtgaggggatcgtatcggtgaaggtgccgagcttctgcacggtcaggttggtcgggctttcataggtcttgctgaccttgtcgcccagcacgggtatggcccagtcccaggcgttggcggtcagcgtcagcccgccgaactgcacgggctgctggggaagtcggtcctcgccggtgcggctgtagagaaacgccgctgttccgccaaggatcgcggcaaccatggcggcgaccatcaccagccaaagcagcagtttgcgcatgatctagctttctccattaacaaaagactgggcgccgtcaggtcagcgcccagccggttcgtattcggtcacacaggaccccgatggggattactcctcggtgttgggggcgtcggggatcttctcgtaggtggtggtgtcctcggcgtcggtgtcgtcctcgtcatcgaaatcatcataatcatcgctgaagagcaggcgctcgtactcgtccagctccttctcacggtgatgcaggtagagggcggcggcggtcagggcaccggcagcggcaaacaggaaggccagagcggcaccgaaggtggtctttttcatcatgataaaaactcctttgtaaaagctgcgctgctgcgtcagcttggtgaaatgttcccagcgtgtcaaaaaatcacattcttgccctactgaatgtgtaggggcgaccattggtcgcccgccaacttggcgcagcaacgcgtttcccaagaaggctttttcacagacaaatggacacgggcgagcaatgctcgcccctacaagagcttttgacagcctgatgttccgatttactgattttattatacccgacatcccgcgcaaatacaacagcgtaattgtaaaatattgcgcgcagcgtcccccggcagaggcatcagaacagccggtcggtcgggtacagcccggcctcgctcatctgcttgagagcggcgacaagctcgggcttgtcctcacggtaggtgatgccgtgccatttgtcggcgctggtcagcacatggacatcggcctcgccgcgctgcagcgccgccgtcacaacggccggcaggtaatattcgcacttgagcgggtttaccggcagattctcctgcaggaaggctgcaaaaccggccttggcctgctgcacatagccgggcgtgaagccccacagattcatcgaaacaacggcgtctgcaggcaggtcgcaccagcttttgccgccgtcctcactgtaatggatgccgccgtcatacggctcgatgcaggtgcgctcggtcacgctgacaaggttgtgctgcgcatcggtcacacagacaccgcggctgacgctgccgttggcactgaccgtgttgcccagcaggaagcccaccatcgcccaggcgtagcggtcgccatcggcgtgggtgctgaggtagtcgtagacaaggcggaagccctgcgggccgtagtagtcatctgcgttgatgaccgcgaacggcgcatcgccgatggcctgctctgccacaaggatggcgtgggccgtgccccagggcttgacgcgcccctccggcacggtgaacccctccggcagcttgtcgagctgctggtaggcatagcggacctcaaacccggcgcgcagggcgcgggcgccgacagcctccttgaaggcctgctcgatctcatgcttgatgatgaagacaacggtctcgaacccggcgcggcgggcatcgtaaaggctgtagtccagaatggcctcgccggacggccccaccgggtcgatctgcttgagcccgccgtagcggctgcccataccggcagccatgacaacaaggataggtttggtagacatggaaattccctcactcatatggtattgtcttataataatactgcgtttcaccttccgttgcaacccctgacaaaatacaaaaattccatacaaaaacggcagattgtgacgcagtttgctatggcaactttgcacagaagatgctataatgaggaaaaccatgaccgggagggaaaatcaggatggaacataccggaaagcgcgcactggtgctggcggggggcggtgccaagggaagctaccagatcggtgtctggcatgccctgcaggcgctggactggacgccggatatcatcaccggggccagtgtcggcaccctgaacggctgtcttttcacgatgggcaaggcccgcgaggcagaggaactttggcgcagtctggagatccatgatgtgctggaggtccccgaatcgctcaagcgcgaggaactgcgcgccttcttccttgatattttccgcagcggcgggctgaatgttgagccgctggctgagacgatcgaccggctgatcgacgaggacgccgtgcggcattccgccattcatttcggccttgtcatgacggagctgggcagcctgcgcagcgtgcaatgcccgatcgaggagatccccgagggacagctcaaggactatatgctggcgtccagcgcctgcttccctgccctgcgcccgcgggaaattgacggtgtaaagtacattgacggcggctggcgggataatatgccgttggatctggccgcccgcatgggcgcgaccgagctgcttggggtcgatgtggacggcatcggcatcgtgcggcccaacacgactggcctgcccacccgcattgtgcgcagccattgggatcttggccccacgctggactttgaccctgcccgcgccgggcgcaacattgcgctgggctattttgatacgctgcgcctgttcggccggtgcggcggcacggcctacgccatgctgcccgataacgaggaataccttgcccatttcgcggagcggtaccagaaaaaccttgccgaggtctgcgcccgcgcacccgagatagatctggtcgagaagaatgcccgcacccgggcaaactacccggccccttatgcgccgaaccccagcgccccgacccgcggtgcgctggccccgctggagctggcggcagagcgtgtcggtgtgccggaggacattccgtataccccgaagctgctggctgcgacctttatgggcagctttgacaaggacccggcagaccggttccccgccctgctggagggaaaagaaaacacccttgtgaccgagcgcgccattgccgccgctgtgccggaggagtttgtcacggcccttgtgagcaaaacactctccgaaatgccgattttgtaaaagagcttcccccccccggggaaagcgaaggagattcaaaaaggaggccaactctatgcacacctacaccggcgtgccggcttcggccggtattgtggtcggcccggtcgagcagatcgaccacggcaccacagggctgcaccgcatcgtctgtgacccgttccgggagcgcgcgctctatgatgtggccgttgtgctggccaaggacgagctgcgccggctgagccagcgcgctaaaggtcccgatgcggatattctgctgtttcagatcgccctgctggaggatgaatccttcaccaacgagatcggcgattatatcgccgccggtgcgggcggtgctgccgccgttgagcgggcagagcagatttttgcagaccggctgaagaatgtggatgatgaatatatccgggagcgcagtgtcgatgtctgtgatgtctgccgccgggtcgtggatattctggacggccgcccgcgcagacggctgcatctcaagcggccgagcattctggtcgcggatcggtttttccccagcgatctgttcagccttgaccgccggatggtgctggggcttgccagcgatcaggacagcacgatcagccacgccgccattatggcgcgcagcatgggtatcccggcggtggtgcagctgggggacggcgcagccgccatggcggcgggctgccgcgcgatccttgacgccgacaacggcacactggtggtcgagccggacggcgcgcagatcgcccgggtggactgccagatcgcgttgaaccgcctgcacggccaacagcctgacccggtggccgccctgccctgcctgaccaagggcggcacagccttccgcctgatgcagacctgcaacctgatcgacaacgaggtgccccatacgcagggagcggcgggtatcggcatcgtgcgctctgagagcgcgatcctttgcgatcagagcgagcagacccagacgagccgcctgaaggaatatctgcgctcggccgagggcgtccccgtggtgctgcgcacctgtgacacccgcgccgatgatgatgccccctggtctgccgagctgcaggcgcggctgggcggagaccggctgttcaagtcccagatccgtgcgctgctgcgcgccgccccggaggggcatctgcgtgtcgtgttcccgatggtaaaggatgcggcagactgggatacctgcctgcaggaggtcaacaactgcaaggatgagctgcagatcagcggtgtcgagatcggtatgccgatgctgggctgtgtgatagatatgccctcggccgctctgatggccgccgacatcatggaccgcggcgcccagctgatggtcattgacgcggaggacctgacccgctatacgctgggccttgtgcagaaccccaccgctgccgtgggccagctgaccaaccccgctgtgctgcggctggtcaggagcgtggtggagcaggcagcggcccgcagtgtgccggtctatgtctgcggcatcacggtggcggcggtgagtgccatgccggagtacctcaggcttggcgtgcgcaccttcagcgcagagcctgccgcgctgctgccgctgaagaagctgctgatggagcaggaggtttgaaacctgtacccccgcagcgtgccgagaaaacgcccctttgcagcgcgtaacaaaatgaaaatgcccgccgttttcacggcgggcattgttcatgcgatcaattactgagcagcagccttgttggcgcgcttagccatgcggctgatcttgcgggcagcggtgttcttatggatgacacccttgctcttagcagagtcgatggcagagacagcgaccttaacggtggcctctttgtcagcagcattgctgtcgatggcagcgtttgccttcttgacaactgttttcaggttggacttgacgaccttattgtgcagagcctctttcttggcctgaacaacgcgatccttctgagatttaatattaggcattcgttccacctccttagttccccataacagtacaagttatcctatcatactttttgcaaagttgcaagtggtttttgaaaaaaacttcatagaaagcaaaaaaagcgcataaaatttgggtgcagagggggtgtgtgccatgcaaagactgcgccggtgggcctcggcggcggtgtgcgggggtgcttttgcggccggagtgctggcggttggggcggcgctggcgttctgccccgggcgcgcatggctgctgcggggggcgctctatctgcaggacccggcggctgcggcggcgcttgactggcccgccgccccggcacagagcgtcagcagcccgcagcggccggaaagccgccccacgccgctgcccacgccctgccctgccccggcaccgtccgcaacgccgcagccatccgcagcccccacggccacaccgctgccaagtgccgcgcccgaactggcagacgcgggccgcatccgtgcggtgcagctgcggcagggcagcggcaccggctatctgcagcttacggcgggcagcatcaaaaatagcaccgagcatccggactctgacctgcgcgccgccgtcacgacccccagcctgcctttttctattgagagggacagcgccgcgccgcaggtgctgatcatgcacacccacgccacggaaagttaccagctttggcccgaccttgtctatgacaaaagctatgcggcccgcagcaggaacacggcactaaatgtctgtgccgtgggggctgagatggcccgggtgctgaacgaggccggcatcaacaccctgcacgacacaacgctctacgatgcgcccggctacaccgacagctacaagcgcagccgcgccggtgtgcaggagtatctggcgcggtatccctccatcaaggtcgtgctggatgttcaccgcgatgccatcgaggacgaggacggcacccgggtcaagcccgtgtgggtgcaggacggtgaaagcacggcgcaggtcatggtcattgccgggtgtgacaacggcggcagtatcgccctgcccaactggcggctgaatctgcgtctggccgccgcatgggaggccgccatggaggaggtataccccggcctgacccgccctgttctgtgcgggtacaggttttataaccaagatttaacgaccggcagcttgttgatagaggtcggcggccatgccaatacgctggatgaagccgtgcgcgcaggccgctgcgccgccgaggcgctggctaaaattctgtaagctgccttatggaaacaacgccgccctgcaccttgcaactcgataaatatcggctctttactttttattaaatacctgctacaatagtgatattcatagtataaagaggagtggactacccatgcagagaacggaacttgcatcgctgtacaaggctacccccgcagacggctctaaagtcactgtctgcggctgggccaagactgtgcgcgattccaaaaatatcggcttcatctcgctgtcggacggcagctgctataagcctgtccagatcgtgtttcaggcagataagctcgccaactatgccgagatcgccaaatgcggcctgtacaccagctttgaggtcaccggtacgctggtcgtgaccccgggcgccaagcagccctttgagatcaacgccgacgaaatcaccgtgctgggtgcctgcggcggcgattatccgctgcagaaaaagaagatgggcatggactatctgcgcacgatgacccacctgcgcccccgcaccaacaccttcaatgcggcattccgcgtgcgcggtcaggcagcatttgccctgcaccagttcttccacgagcatggctttacctatgttcatacgccgatcttcaccggctctgactgcgagggcgccggtgagatgttccaggtcacaacgctcgacctcaacgacattccccgcaacgaggagggcggcatcgactttacgaaggacttcttcaagcgccctgtcaacctgaccgtctccggccagctggaggccgaggccatggcgatggcgctgggcaatgtttacaccttcggcccgaccttccgcgccgagaagagctacgatacccgccatgcggcagagttctggatgatcgagcctgagatggcctttgccgacctgaacacctaccttgagactgccgaggcgatgacccgctatgtcatccgctatctgctcgacaactgccccgatgagttggccttcttcaaccagttcttcgacaagggcctgatcgagcggctggagctggtcgcaaactccgagtttgcccgcgtaagctacaccgatgccgtcgagctgctgaagaagaacaacgacaacttccagtacaaggtcgagtggggcaccgatctgcagactgagcatgagcgctatctgacggagcagatcttcaaaaagccggtgttcgtcaccgactacccgaaggagatcaaggcgttctacatgcgcatgaacgaggacggcaagaccgtggccgccgccgatatgctggtgcccggcatcggcgagctgattggcggctcccagcgtgaggagcgcctcgacgtgctggaggcccgtatgaaggagctgggcctgaacaccgccgactacgactggtatctcgacctgcgccgctacggcagcgtcaagcatgcgggctacggtctgggctttgagcgcctgctgatgtacgtcaccggcatccccaacatccgcgacgtcatccccttcccccgcacctgcggaggcttctgatgcagcccattgccgcaccgctgctgcaatggttcaacgcgaacaaacggctcctgcctttccggcaggagccttctgcgtaccatatctgggtcagcgagatcatgcttcagcagacccgcgtggcagcggccatcccctactatgagcgttttatcgcggcgctgcccgaccccgccgcgctggctgcctgtgagccggacgccctgcgcaagctgtggcagggtctggggtactacaaccgcgtcaacaatatgcagaaggcggcccgcatcgtctgtgagcagtacggcggtgatctgcccgccgactatgaggcgctgcgcagcctgccgggcatcggtgactacacggcgggcgcagtggcgagcattgcattcggcatcccggtgcctgcggtggacggcaatgtcctgcgggtctttgcgcggctgtacaacgatgatgccgatgtgatgacccccgccgcaaagaaagcgtttaccgtgcgggtggttgaccagatgccgaaagccacccccggcccgtacaatgaggcactgatggagttgggcgcgctggtctgcgtgcccggtgcgccccggtgcgaggtatgcccgctggcgcagctgtgtcaggggtacgccgcagggcgtgctgccgagctgcccgtgaagcctgcgccgaaagccaagggcagggtgcctgtgacggtggcgctgatcgagagtgagcgcggcgttttattgcagcgccgccccgcccgcggcctgctggccggcctgtggcagcccgccgcgtgggaaaagagcctgacccgagaggagctgaccgctgcgctggcgtcactgggcgtgcgggccgcgctgggcgaggcattgccccccgcaaagcatgtgtttacccataaaatctgggagctgggcggctggcgcggtaccgccccggcgtgcgacctgccggagggctatgtctgggccgccgccgaggatctggccggggtatatcccgtgccgaatgcgttcggcgcgtatgtgaaggcgaaataggtcgtaggggagggattcatccctcccgggcacat

SEQ ID NO: 14185 - DNA, 3539 bp, Unknown
  gut microbiota DNA sequence
aacacaacaacttttaatcgagaaatattgattgtagaaaaaacaaatgatggaaagccttttgaactccatacctcttatgacgataaagaaaaatattatcgcaacttacgcaatctgtggctatttctactgctcatgtttgcactattcgcagttgcaatgcaatcaataatctttggtatttttgcgttggtttctataattcctggcagtatatatcaaatacagataatgaaaagtcggaaggaagccaagacacaggaatggtgaggaaataaatagcaaacccagctgagcctgtcaacggtcaagatgaacggtgcaaatgcgccgccgttgacagccttgcccgtctttgctgttcggtaatcaagaggctgacagcacaaaatccccacgccggggacgctggaataccgcaggacaggcagcacccgccgctaccaccccggctatgagtgtaagtgggcgaccaataccgttgtgcataagtgcagctatgacgagaacaaggcccgcagacaggaccttgagatttattattcttttgttgacaaggtggacttgcccgaataaccgcccgacctatccaacacaagagctaagtgacggataggaacagcaatttttttacacttctattacttctttatcacacaacagtaaaacgccccgggccgtatggaactccacacagcccggagcgttatttattgtgcgggcggatgcaagcatccgcccctacagcctgtcggcttcagcgcagtacaagcttgccctcggcatctgcgtccacagtcagggtatcccctgccgcatgggagccgccgatgatctccttggcgatcatcgtctcgacatgggcctgaatataccgcttcagcgggcgggcaccgtagatcgggtcatagccgccgtcaatgatggcgttctttgccgcatcggtgacgaccagctccagctgcttgtcggccagacggcggcgaaggtcagccagcatcaaatccacgatggagccaatttcctgcttcgtcaggctcttgtagtatacgatgtcatccagacggttgaggaactccggacggaactgccgcttgagcagctggtcgatggcgttcttagcctcctcggacagctcattcttgcccatcgcacggctcttttcaagatcctccagaatcaggtcagagccgaggttggaggtaaggatgataaccgtgttcttgaagtccaccgtgcggccctgactgtcggtaatacggccgtcatccagcacctgcagcaggatgttaaagacatcgggatgcgccttttcgacctcatcgaaaagcacaacactgtagggatggcggcgcacagcctcggtcagctggccgccctcctcatagccgacatatcccggaggcgcaccgatcagacgagatacgctgaatttctccatatactcggtcatgtcgatacggaccatgttcttctcatcgtcaaacagggcctgcgccagcgccttggccagctcggtcttgccaacgcccgtggggccaaggaacaggaagctgccgatcgggcggttggggttggcgataccggcgcgggagcgcaggatcgcgtccgcgaccttctgcacggcctcgtcctgaccgatgacccgctgatgcagcgtgtccggcaggcgcagcagcttttcgcgctcgccctcgaccaacttggagaccgggataccggtccagcgggccacaatgcgggcgatctcatcatccgtcacacggtcacgcagcaggctggattccttcttcgcctcggcgattttttcttcctcttccagctgcttctgcagggtgggcagcttgccgtattgcagctcgccggccttggcgtaatcaccggtgcgggtagccttttcgatttcagccttggtggactccacctcggcacgcaggctctgcaccttgttcacggcgttcttctcgttttcccactgggccttcttgctgttgaagctgtcgcgcagttcagccatctctttttcaagagtggccagacgctgcttggacagttcatcggtttccttctttaaggaggcctcctcgatctgcagctgggtgatgcggtggttcatttcatcgagttccgcaggcatcgaatccagctccgtcttgaccatggcgcaggcttcatccacaaggtcaatggccttgtcgggcaggaaacggtcggtaatatagcggtcggacagggtcgcggcggcgatgagcgcagcgtcctgaattttgacgccgtggtagacctcataccgttccttcagaccacgcaggatcgagatggtgtcctcgacggtcggttcgttgaccatgacaggctggaaacggcgttccagcgcggggtccttctcgatatattcgcggtactcatcaagcgtagtcgcaccaatgcagtgcagctcgccgcgggccagcatcggcttgagcaggttgccggcatccatcgcgccatcagttttgccggcaccgacgatggtgtgcagctcatcaataaagaggatgatcttgccctcggacttcttgacctcgttcaagacgctctttaagcgttcctcaaactcgccgcggtatttggcacccgcgaccagcgcacccatatccagactgaacacggtacggtccttcagattttcgggcacatcaccgcgcacgatacgctgggcaaggccctcggcgatggcagtcttgccgacaccggcctcaccgatcagcacagggttgttcttgcgcttacgggaaaggatacggataacgttgcggatttccgaatcacggccgatgacagggtccagtttgttggcacgggccatctcgacaagatcctgcccgtactttttcagggcgttgtaggtgtcctccgggttatcactcgtcacacgctggttgccgcgtaccgcactgagctgctgcataaatttctcagtcgtaatgccgaacatcttgaaaatttcattagcagccttgccgggacgctgcaaaatgccaaggaacacatgctctacgctgatgtattcatccttcatctgcttggcctgttgttccgctgcgttgagggcgcggtcaagatcactcgagatataaattttctccgggtcacggccggagccggtcacacggggcagtgcctcaaccttctgcaaagccgcctgtgcaaaggcattggcgtccacgccgagggtctgcagcatctgcgggataagtccgtcctgctgctgggccagcgcagcgagcagatgctcctgctccactgcgttgttggaatattccaccgcgatgcgctgcgcagcctgcagggcctcacgggtcttttgtgtcatttgttcgatattcatagtgcgtacctccttcattgcagatatcgcattgtttggcagtcagatattaagattgctaaccagtttgtactttcagtgcctttgagccattttctggaagctcatgtatttttagcactctatctgtccgactgctaatattgtagcacatttccataccgtg

SEQ ID NO: 14186 - DNA, 1472 bp, Unknown
  gut microbiota DNA sequence
gcagaataaatcaagccaagatatttcaacagtaaagcggcaccgccatgtagcggtgccgctttgctgttgaaggagaaaaagtaagtctgcgatcagcccttatccgcgccagcggtaatgccctcgacatagaatttctgcatgatgacaaacaaaatcgagatggggacggacaccagcacaccgcctgcacagaacagcgcaaagtagttgttgatgagcgttctctgcagcatattgaacaggccgatggcaactgtccagtcggtggagacgccggagttcagaatcatcttcgccatgacgaagtccgtccagggaatcataaaggagctgatgatggtgtacaccaaaatcggcttggacatcggcagcacgacctgaaagaatatccgcgcatcggaggcaccgtccagcttggcggcctcacgcagggaaagaggcgtagtatcaaaaaagcccttgcagatcaggtagccaagtccggacgaaccggcatagaccatgataagaccggcataggagttggtcaggttgaggtacttcaaaacgaagtaaactgcaatcatcgccagaacgccggggaacaggttgacaatgaccgacagattctggagcagcctgcgtcccttaaagcggcagcagctcaatgcgtaggcgaccatcagcacaaagcaggtggagataacgcaggtaaagcacgcaaccacaaaggtgtttacaaaccagcgcgggaactgcgcaacggaatcggggtggaacatgatgttggcgtagttgtccagcgtataaccagcggggaaaaaccgccgcacattgatgccccggtcagtggagaaggaggttgccaccagccagacaatgggcaccagccagatacctgccagcagggcaagaaccagatggcggatgacgctgcgcacaccgcggacgatgcgcccttggcgcagctgtgcctgcgagctgcagggcagcgaaactgtttgctgtgtcaagagaacgtcgcctcctttttattgatgaagcggaagcaaaccagtgtgaaaatggcacagatgataaacaccataatgccgatgaccgccgccatcttatagttgtactgctcctgcgtcagacggaacagccatgtaaccagcaggtccacttccttggcgctggacgatgccatggcttgatccttagtgatgtagacatcctgcgtcagcaggtagatgacattgaagttgttgacgttcttgacgaaatccgtcaccagcgcgggcccctgcacactgagcaggtagggcagcttgatataaataaagcactgcagcgggctggcaccgtcgatggtagaggcttccagaatatcgctggggatgttcatcagcacaccggtggcaatcagcatctggtacggtataccgacccagatgttgatcataatgatcatgaacttagcccaatgctgatccgtcagaaacggg

SEQ ID NO: 14187 - DNA, 1204 bp, Unknown
  gut microbiota DNA sequence
gccgctgccgcctgcaccgctgtctaccgcttctgcacgctgtttaccatggagccgtggctgcagggcatgaatccgtccctttattacaatgtcagccgccttgttcaattctggatgtaaatccccggaggaatattatggataaaatcgccgtattgatcccttgctacaacgaatccaaaaccgtcgagaaggtcgtcacggatttccgccgcgtcctgcctgacgctacggtctatgtctacgacaacaactctaccgatggcacggccgagctggccgccagagccggggcggtcgtccgccatgagtaccagcagggcaagggcaatgtcatgcgccgcatgttccgcgaaatagacgccgaggcgtacatccttgtggacggcgatgacacctatccggctgaggctgcgcccgagatggttgccgccgtgaccgagcgtcaggcagacatggtcgtgggtgaccggctgtccagcacctactacacccagaacaagcgcccgttccacaacttcggcaacgatctggtgcggttctgcaccaaccatctgttcggcggcaagatcaaggacatcatgaccggctaccgtgccttcagctaccagttcgtcaagacctatcctgtgctgtcccgcggctttgagatcgagaccgagatgaccatccacgccctgcagcgcaacatgcaggtcgagaatgtcgttattgactaccgcgaccgccccgaagggtccgagagcaagctgaacacctactcagacggcttcaaggtgctgggtacgatcggccgtctgtttaaaaactaccgcccgtttatgttcttcggcattctggcggccattctggcggttctcggcatcggctttatgctgccggtgctgagctggtatctccagaccggtctggttccgcgctttcccacgctgatcgtctgctgctttgtgctggtcgcagcgctgctgctcttcatctccggcatcatcctgtcgagccagctggccaaggatgcccgcgattttgagttccagctacagactgtgcaccactggcgcacccacaaaaaggactgacccatcatgcgcgggcgtaccttcgcacaaatgctccggcagcatccgctctttgcaggactgtttacgctgcaatccctttttgtcgttttgctgctggcggatcttctgtacccggcggcaat

SEQ ID NO: 14188 - DNA, 3276 bp, Unknown
  gut microbiota DNA sequence
atccgctattcaaataatagcggatactttttttgtgtacgcataaggtcattgaactcatccgtatatttttacgataacactatttttgcaaaaagtcaaaccgtcaggaacaaatgtcactattgatttgtttatcataaaaagcacctctcctatactaatagtaatttggtatcactattagatatatttctgggagaatgctatgacaaatgctttattaggacagcggcttcgccagcaacggaaaaaaagagggctgacgattgaacagttggctgaaatgattggtctttctaaaaattatgtcagcctgatagagcgcggccggaaacttcccagtatggcaacactcattaaaattgtaaacagtctgcatatttccgcagatgttttgctgtgtgacgaagtagaatctgtaagctgtgttgtggacgaagaactggatcagcgtataagggcgctcgaaccacatcagcgcaaggcggtctttgccatacttgattctgttattgatgcaataccagatttaactgcatcctcgtcagaggattctgctgaataagcattatatatacattagttcgacgctttgcgccaaaccgataaaaccgcagtatgccagatggtcaaatcgaccatctggcatatttttttatctccatatcagaaaatgtatcgtaaaagcgatacattactatgctcgcgcacctccgcctgtttttgcatgaaatgaagtcaaaaacaacggaggtcaaaccaaatgtcgaaaaagtatattcagaacggcgctttgattcccgccgaagatgaacaaatcatctcggaattaacagcatatctgtctgtttcgctccggaatgagcgcagtaaatacctgaaaaaatatggaaaaattcgtgattttgagtcctcaatcgaagatttgaaaccagattttgagccagaagatagttcctttgaggagaggattgagcaaatgctcgcatgggatatggtgaaaaactatcttccactgttgactgcaaaagaatgtgaggtcgttttatgcttatatgtaaatcagctcagcacagcagatactgcccaaaagatgaacctgtcgccggaaactgttcgctggcacaagaaaaacgccttgcagaaaatccgcaaggcaatggaggaaaatacctgatgggtgcttatattgatcttctgaaagccgcgcaaagcggcgatactgctgcggcaaccgtactgtatgaacagtaccagccgttaatcaaaaagctgagttggcatgacggcatatttgatatggacttatatcaaaccctttctgttgcatttttggtcgcattatcgaagtttgagattcgataaccccaaaatataaattttttcaaaaataccccaacgattttgcccgtaaattgatgtttatattatagagggacaaaaaagccctcttccccttgagtaccttgacaactgcatatccgaatcaccggttacatacaactgaccttgccgcaacccaatgagcgtcggcaagcacgattcagaggcaacgccataatcctgcgtatacggaggagcgcccctgcctgctgaataagaacagcgtggaacctgttctatgcgatgaaagggtcagcaatcatgatacgcaccgttgcgataccctcaaggaatcggcggtactgccaacaatgtggtacaggaagcgggagctgcgccagcagccgggccggggattcgccctattatccggggagtagtgtcgaataggataatatttaattccagattatggcggtcacttgcttttggcaggtggccgctatgcttgtggaattaaatctgcaaattcagtaaaggaggatggctatgaggggagaaacctttggaaagcgagaaattttccgtaaatatccggatgtggtggatgtgacccagctctgtaaaatgttaggcggttcgcggcccgtaagtaaaaagacagcttataggctgttgacttccgggaaaataaaggcattccggctggggcgcagctacagaatccccaaggtaaatgtgattcgctttttgcaaaacggattgtttgacgaatgcaacactgacgatttcctgattgacagtgtggaggaatgaaagaaagtctgctatgctaataacggttacacaaatgtttgatagccggaaaggagactgctatgaggacaaaagtgacaggctatcttacacaaaagcgcggattttattatgttgtcctgaatatgccatccgacataaagggaaaacgaatccgcaaaacattaagtacaggtttatccactgcgcgaaacatgacaaaagccaaagaagttatgcgcgaaatgattcgggaagccaacgccggagaagaagtgcatggcgtgatggaacggaaggccgtgcagagcaccgcgccggagagtagttctccacgcccggatatgctgttttcggattatttgcagttctggctccagtggaaaagaagtacatgggaggaagtcacctattcgggttatgctgccaatgtaaacacatggattgctccttatttctcacaacggggaaccaagctgaacgaaatcaatgtgctggacatagaaatgttctatgcccatgaaaagaacacacgcaacatcagcggaaatacggttgcacattaccatgccaacatccacaaagcactggttgatgcggtgagattgaagctgattccgcataacccagcctcggatgtggaaaggccaaaaaaggataacttcgtagcaagctactacaccgcagatgagctgatggagatgttcccaatatttgccggaacaaaaatggaactgccggttcttctggctgcctattatggtctgcgccgcagcgaagtggtggggctgaagtggtcggccatcgactttgtgaataaaactatcaccatttcgcacacattcgagcgtgtcaatgtggacggaaaggcggtagatatatccaaagaacggacaaagaacaattccagcttccgcacattgccgctgatgccggaggttgaaaccgcattgattgcagcgaaagcccgtcaggaaaagcagcgcaagcagtgcgggagaagctattgtaaaaaatatctggagtacatctgtgtagacgatatggggaatcttgttaatccaaattatataagcggaaacttcagcaacatcttgcgcaaaaacggtctgcgtccaatccgattccatgatctgcgtcacccgtatgtcaagc

SEQ ID NO: 14189 - DNA, 2222 bp, Unknown
  gut microbiota DNA sequence
actttgcaaaaaaggcaaaacgagcaggaaattttctgcgcgttttgcccaagttcgtacctgttcagttgtgcaatctgccagcaccatggcggtcgattatttctgcggcagcagtaccctcagggtgaaccactcgttttcccagtgcagggtcagggtgccgccgcgggcctcagcggcagcgcggacgcttttcaggtcatagccgccgtggctgctgcgccggggcagaccgtccgggccaagctccacaggctttgtgcagtagttttcaaaccgcagcatcacaaagccgttttgggcgtaaattgccacccggatcagccgcttttcggggtcctgctcggtcagcacactctcggtggcattgtccagagccgtgccgacgatggtgcatatctcccccgttgtcaaaaaattcagcagcgtgccgtctgcgacacaggtcatgttgatgccgtgctgctggcagtacaggcttttggctgtcagcagcgtgtccagcaccgggttgccggtcttgttctcggcctcatagcggcggatgttgctctccatctcagccagcgcggcattttgcttggcctgatcccgctcggcccggatggccgcgatctgcattttcagttcgtggtagcgccggttgatcaggcgtatattctccttgctctggcggtactgctcatattggcggtgcagtaccgcgtccatggcggaaagctcgctgtgcagcgccgtttcccgcagctgctcatgctggacactcaaaatcagcaccccggcaaaatccaccagcgtgcggatgtagtagacgctcatcgtcgcctgtgccgcggcgataaagctcaggttgctcacagcaaataccgtcagcgccataacgaccgccatcagcgtggccgccgccgtaacattcagccgcgcggcgatcacacggcggcgctccagccagtacagccccccgtacagtgcgccgtagacggccgccgccagcagcagcgccggcatctcaccgcccccgcgctgcggccagagccagcagtgcagctgccattccagactggccgccagctctgccagaacaaacgcccgcgcgcagctgtagccggcctcccgcaggttcatctcccgcgtggcccagaggtagagatacatcgccgcgatggccgacaccatgcagggcacccaccacgcaagcggcacatggccggtcaggtgcaaaaacactgccagcagaatcgcccagacggcggttatgccccagtacaccggctttgcagtgcgggacggccgtgcctgcgcatacagcagggcggccagaatctccgccagcgccgtgtacagccgcggtacatccggtaaaacggacattacccctcacccccgatgaaatccgccagcgccgcaaggaagctctttctcttggggcggctgatctgcagctcatacgggccgacctgcacaacgctctgctgcacaccggacacctgtgccagattgacaagatacccgctgttgcagcgggcaaagggctgcgcagccagcttttcctccagcgccttgagcgcaccgggggccgagaaatcaccatcctcggtgtaaaagtggatgcggtggccctcactctcaatgtagtagatgcctgccgcatccagcctgcgcatgccgccgtccaccggaacggccagatagtggcgcacacggcgagccagctggttcacagccttctgcagctgctgcgaaaaagcaaaatacggcacgggcttcagcacataatccagcgcccccaccgcgtaccccttgatggcatactgcgccatgttggtaataaaaatcagcagcacatcgctgtccagcgtgcggatgcggcgggcggtctccatgccgtccagatgcggcatctcaacatcaagaaaaataatgtcgtagaccgggcggtattcctccagaatctcgacaccgcttgcaaaggccgaaacctcaaacggtgtaccgtactgccgtgtatagcgctgcacatagcctgtcagctgctcccggacggcggcctcgtcctccacgatcgcaatgcgggtcatccgcagcacctccttttggctggcatcgcacccgggcatcgctgcataacgcgcgtgccagtgcagtgcgcggtgatgcccggatattttttcctgctgttagtatagcataccgcgcccccctgcgcaagaactgcctct

SEQ ID NO: 14190 - DNA, 443 bp, Unknown
  gut microbiota DNA sequence
tcccgtggccgtgccagcgcggggacgaggacgccgtattccttgacgctttcggcggtttcctgcatggacgcatcctcccgcacctgaaagggatgatccggaaatggatgcagctcggagagcggaatctgaacgactacttcctgctgcggcttcggctttttggatggcgcgggctttttgcccggttccttctgcactgttttttcaggcatcttgttcctcctgtcggcatctgattttggatacaaaaaaaggacatttcttcttttcagaggaaatgtcctgatttcttggacgggctgacagcccacccaaacggtattttatttttgtcgttactataacaccccctacgatataactacttcgcggctcgatttttcggtttggaaaaggatgaaaaaccttgccagataaccgaaaacccttgatatacg

SEQ ID NO: 14191 - DNA, 476 bp, Unknown
  gut microbiota DNA sequence
tccccgccgccgccaacggccacggcggccagagggctggccgccctacaacccacttaaaaacccgtgcgtagggcggggtgcccccaccccgccgaaacctaacgccatctcccatttccccttgaaaagtaaataaaagaaaaaagcactacctcaaacgaagtagtgctttttggtgacccgtgcgtccatctcccgcggactaaaaaacaatccgcaggatcgttttttgccgcctgcgggcggccgtcctgttcgattcctcgcacggaagcaccaaaaaaactccccagcctaagctggggagcattttttggtgacccgtgcgggaatcgaacccacgttaacggcgtgagaggccgctgtcttaaccgcttgaccaacgggccatataagagaagccggcatctacctattttcacaggccgtttccagccaactatcttcggcacaagtgagcttaacttctgtgt

SEQ ID NO: 14192 - DNA, 4211 bp, Unknown
  gut microbiota DNA sequence
atacgcagtgaaaacggacctgatcgatgtgaaccccgccgacaaggtggaccgcccgaagaaaaacgaatttaccgggaacttttacagcaaggatgaaatgaacgcactgttcgacgctgtgcgcggcagtaaaattgaggtggcagttatgttgactgccttttatggtctgcgtcgcagcgaggttgtagggctgaaatgggctgctgtggactttgagcagaacacccttgaaatctgccacacggtcacaacggttcggctagacggaaaagaagtgcttatagaatccaatgacacaaaaacaaaatccagcaaacgcaccttgccgcttgtgccggttttccgggaaaggctgcttgccttgcaggaggaacagaaagaaaaccgcaagctgtgcggtaggtgctacaacaaaaaatacgcagactacatctgcgtagacgcaatgggcaatctgctcaagccggattatctctccaattcgttccagattatcttgcaaaattatcatctgcggcgcatccgctttcacgatttgcgccactcttgcgccagtttgcttttggcaaacggtgtcccgatgaagatgattcaggagtggctgggacacagcgatttttctaccactgcgaatatttattcgcatttggactacgcttccaaggtttcttcggcagaagcgatgctgaacgggcttggaatgggttcaaatccgggaaatgacacttaaaaaagtgtgatttctctccaaaacagggcgttttctctcctgttatgaaattgtcaaactcaaaaatcccgttttttgcataaaaaacggcacaaagtgcttaaaaagcacgttgtaccgttgactggcggagcatcagagatttgaactctggcaatgtttttagcgtcctatcgcatttcgagttttatcgcctaaaccaccactggtggaatttgccggtaaaaagcggaagttactggaagatgattcggcggcaaaacgaagaaaaaagtcgaaaagagagtcctttttaacgtcaaaacgtcgcaattcgaacccatttcaaaaagctgattttccgggaaaaatgagagaaaaatgggcgtttttggcacgttggagagatgttggagagaaaagccggagagaacaaaatgggctgattttccttattacaacaggcatttacagaattacgttgactaaattttatgcaaaaatccccttatcgaaaaaatcaaaccgccccctacctgctgttgatgagttcaaatagcggacggtgattatagtggattacagttatgattttgcaaaaatcaaggaaacttaccccgaaaaaatcgggctggaacagatgcgtgtcatctgccatatcagtaaaaagacagcccgatacttgctgaaaagcgggcttgtgccctgcatagataccggtaagaaaacgcggcagtacattatcaacacaaaggatgttattgcctacctaaaaaagcgccaatccaacccgcaaagatatacacccccaacaggctactacttggaaagttggaacaagggaagcccaaggaaaacccttacgctacgggaatgggccaatcttgacacggcaaaagacaaagataaattcgcggcttttctgaaatgcaagatgcggctatacagcgatgtactaagtgctacggaagtcagcaagtttaccggctaccatcataataccattacaacgtggtgcagcaatggatattttcggtacttcaaaataggcagcagctacatgataccaaaagtttgcatcctaaattacttggtcagtcctcatgtgctggatagttatagaccggcacaaaagatggttgcccttgccaaagagtttagccagcagggaaagccaactgaaaaaagcagtgcataggtacacgcctgtgaatatatggaaacagcgtcctccgaatgtaattggcggacgctgtttttgtaaattctatatcaactggtgacaatttgtcaccagttcgtatgtgacccagttctctgtcacatggtcatggaacgcagcgtttggattctgccctcaatagcggtagcaattttcgcagctcgcccatcatcaaactgggcagcatcctccaagatgtcctttaccttgccagaaaatccatcaaggcgctccagcggcaaatctacataaggtgcgatcaattttagctgagattgctgcgacgtttcaaacggctttgccggaaccattgcatccgcgctgatggcgcgagtgagtgtcatctgccaaaggcttgtgccgctgtcatagataggggcaagtcctttccaatctagcgtttcggaatcacggaggaaaccgaaattacccaagtgtcggtctgtgttggctaagatataatcggcggccagcatattgcagatatttttttgtatatcggagattccaaccgcattacagcaatcgttaaagtgctgccagttggagacaccctgttgctgcggcagcagtcgcataaattgggcagcggtgacaagttctgtgtgctcgtcagtgaagcactcgcaagcggacatgacctgcccgccctgatctacgagccaataggaaacgtgcggcataccgagggtgtcatacaacgaagaggcaacaatttcattgtaaggctcttgctggtaaatgcccgaaccggcctttaacagaatccgtttcccgtccgcaatgcgccagcgcttttgtaaaaagccatccgaggtattgcagggagaacacaaatccggctgtgcagagagaacgccctcaccaaacaaggcgcggcccacatcgtcagaaaagtcattctcgtaaaagtttacatcatgccagcgttgcggagcatcgcagggagtgacccaatattgatcggaaaggctcaggccgctgcacttgacgagcagaagttctgcatagggaacgtgcagtgcttccagcgcgtgttccagcccggagcggcttgcaggaataccacgcccagcccaccatttacgcagggagagaacatcgaaactgccgtcgatatgttttgcgccgagggggattctttgcgcagaaagaatctcagccacatcaattatatcgccggttttttcggctatttcaataacagccacttgatggtcacgctgcatcaagaaaaaacgcatggatgctcacctgccttaccttatcataatagattataccttataagggttacctttgcaacgtgcgaaatagagcatacaacgtaaaatcaatataaatgcaccaaggggatactatacacttttataggaatgggcgcggcgcgtccctctcccccacaccccctctccagctggctgaagaaacagccagctgaaaaagagaatatcgtttcttacaagcatcttacctgttcgcagatgaggtgctttttttattacaatcttggaggtcatcatgggcaaatatcagaagaacatcgaggctgcgcggcgtatcagcgtcatgcagtaccttgaaacctaccatcccggcgagcttgtccgcaaaacagacaaggaatatcgcacaaaaacgcacagcagccttgttattacccctgcgaatgggaagtttcactggtacgcccaaagtgtgggcggtaacaatgctatcgactatctgacgaaggttgagggtatggattttgtgtcagcaatacggctgttgagtgcgatgactccaatgcccgtttctattcaggcggctaaagcaacacctactcggcagcatatgattcgtccgtttgaactgccagccgcagatcgaaacaccgaagccgcagtcgcttatttgatgcagcgcggtatcagtccgaaggtactgcgttattgcgtgaacagcggtatcctgtaccaaaccacacgcggcagctatcgcaactgtgtgtttgtgggcaaggacgcagaaggtgtaccgcgctctgcttttcagcgctgctgtcaaggcggctttcgcggcgatgccgcgggcagtcaaaagcagtatggttttctgattcctgccgagattgaaacctgtgataccgtagaaatctacgaagcccctattgatgctatgtccggcgcgacgttgcggcagtacaagcataatgcaccgtggcgcagcgtccactacttggcgctgggtgggctgaaccaccagccgattgactactttttacagcagcat

SEQ ID NO: 14193 - DNA, 1765 bp, Unknown
  gut microbiota DNA sequence
ggtcagcgggggcgttgtgcatttattttaatccagccggaacacctgctccagcttgggctgggcaccggtgacggggtccatctccagctccagaatgtccttcatgtagtcgttccagcggtcaacgaccgggctttcggcctgcaccttttcggcgtaggcaacgcccttttcgcactcgtaatagccgaacagctcatcgttgcagtagaaaatgctgtaattgcagatgcctgcatccttcagcaccttgaccatctcgggccagatttccgcgtggcggcgctgatattctgccttgcagccgggcttgatgcggcccttccatgccatatgctccatttgatatacactccttttgttatacaagcttttctagctccagctttgcgcggcggcaatgctccagttcggctacgctgccgtcccacgcctcgttctcaccgacaaagcgcaccgtgctgtccttgacggtcaggccgtccacgcagcgggcgtacagcgccgggatggcgtgcgggtagatgtgccgggccgagggctgctcgtcaaacaagccgccgggctgggtgccgcggtgctgcagcgtcaggtgcatctcgctgatgcgcaggtcctgaatttcgctgtccggctcaccggccgcaaaggcgcagctttcacttgtcaggtacaaatggtcaaagctgacgcggcggatcacacctgccgggccggtcttgcccttgcgcggtgtggcgctgacaaacaccggctcgcccttgccccaccagcccggcgcaccgggcagctggtaggagtcggcgtagcggcgggtgcagccggtcagatggtggacatggatgtcctccaccgtgccgccgtcccgcacccagacgcccaccgcgcgggagcagtcgtcaatgacgcagtcgctcagcgtcacattgcggatcacaccgtgggtttcggttccgattttcagcgcagaatcgcgggaatgtaagatgcagcccgtgatggccacattttcgctcgcaccgtagcggcgggacatcggcccggtggatttgaccacgatggcgtcatcgccggtgcgcacgatgcagttggagatgacgacatcctgacagcaatcggggtcgatgccgtcattgttcgcgccgcggtcatcgttcaaaatcatgatgttctggatgcgcacatgtcggcagcccgccatgtgcagcgtccagaacgccgcgtcctgcagggtcacatcgcgcacggtaaagttttcgactgcctcaaacagcatcatgcgcgggcggaacgcctcgcagaatttcgggcactcgtggaagccgttgtccacattcttgtccaaaaacaccttgtcgccctgaccgtagatcgtgcccatgccgctgatggtcacatttttggcgtggctggcccccaaaaagaagccgccctcccagccgtcggcggtgtcgtcagggtcggtgccgtccccgccctgcgggaacggggtaatatctgcggggttcaggctgctgataagcaccgcgccgctctccagatgcagctccacattgtccttcagcagcacggagccgctcaaaaagcgcccggccggcacgataacgcgcccgccgcccgccgctgcggccgcatcgaccgcctgttggatggctgccgcgcagttggtcacaccgtctgccacagcgccgcagcgtaagatactgtagtccatcgctcctgctccttttttgtctatggcaacaccgcacaattcccgcct

SEQ ID NO: 14194 - DNA, 6472 bp, Unknown
  gut microbiota DNA sequence
ttctttcttcagcatagcacagaagcaggggtatgtaaagtgcaattatcacaaaggatactgcactatgccgcatatcttttgctgccccggcattgtacaataaagaataatcacaagataaaggagaggaatgttatgccctgcacgctgcctgcatcgctggccgatgccgccgtctgccgcggctcctttcatgccgttttgggcggggaagccgaggataccgtttttgccggcttttccgccgcgctgcaaaaagcacaggcggagggccgtattctgaccgcaagccttttccggtatgaaaaccacctgtttttttatgccgaggggctgaaccgcccgttcacgccgcaggggctttgccccgcgctggacgcggcgctgctgccgtggccgcccgctctgggtgaggcagaaccccgcccgtgggccgccatgcagccgtatttttaccacgatgtacccaccaccgccgccgactggcagcagggccgctgcccccagcgccgccgcggccgcattgcgctgctgccgcccgacagctggtgcagctatatggagcatcacctgcgcattgtgaccgaagggctggtcgagggggaccgctggcatctcatctgtgtgcaggagggggtgcttttctcctaccttgaggagccgcgcaccaatgtgaacatcaggcaccagccgggcgcgcacagccccgagctggacgcatggatcgccgccgaccccgaaagccactttgcacgctttacgccggagcagaaggcccacccggacagcggccacaactttgtatttttgccccgcattgcgggaacggaggactgaattatgacaaggatcggatgccgcgcccatgattacggcaagctgcccgccgccgagctggccgctgtgctgcacgccaagggctacaccggcgcccagctggccatgccccgcggcattgcgggcattgcggattttgcccatatcaccgaggaacagcttgcagagatccgcacggcctttgccgcgcaggatgtggaaatttcggtgctgagctgctatcaggacctgtctgcccctgatgcggacgcccgccgcgccgctgtggatgccgtaaagcgcacactgggctatgccaaggtgctgggtgccaaaatggtgggcagcgagaccgcgtggggcccctgcacggacgaagaaaaggctgcccgccgcccgctgatgatcgacagcatcgcccgcatcaccgaggaggccgcccgccttgacgccgtgtttgcggtggaatcggtggatgtacacccgctctgcacgccggagctgctgcgcgaggtgctggatgccgccgctgacgaagcccactgcagggtcatttttgaccctgtcaacctgttctgtgcaaaggatgggcaggacagggcatatcaggctgcccactggagccgctggctggaggtcatcggcaatcagcttggcgctgtgcatgtcaaggactgccgcatcggggccagcgacagcaagacgctgctgccgctgggcgagggggatatggactatacggccatccgcgcctttttggctgcgtgcgcccccgccgcgccgctcatccgcgatgaggtgatcctgactgccgacacggccgatctgcactatctgcaggcgatggccgccggcctgtgattcacagcgcccacaggctgccgaaagcggcaaaaaattatttacctacgatattgtaaatctctctgcagatgccttgacaatacctgctggttgtgggacaatggccttaacgcaatgccgatgcttgccgcccgcagcaggccccaagccgcgccgggcggaaaaacaacgactgaaaagtgaggtatctgaactatgactcccgacctgaaatggctgactgacccgaccgtgtttgctgtgaaccggctggatgcgcactcggaccatgtttgctaccgcagcgaggcggagatccggctgggcagcagctcgctgcgccaaagtctggacggtagatggcgctttgcctacagcgcctgccccgctgcccgcccggcggatttctaccgcgaggacgcggatctctctgccttcggcacgatctgcgtgcccgggcatatcgagctgcagggctacggccagatccagtacaccaacaccctctacccgtgggacggccgcagctatctgcgcccgccgcagatcgactgggacgacacccccgtcggcagctatgtgcgggagttcgatctcgatgaggggctgcgcgggcagcgcgtctgcgtcagctttcagggggccgagcaggcactgtatgtctggtgcaacggccactttgtcggctatgccgaggacagctttaccccctcggaatttgacctgacgccgtatatcaggcagaccggcaaccgcctgtgcgttgaggtgtacaagcacagcagtgcctcgtggctggaggatcaggactttttccgcttctcgggcctgttccgctcggtctatctctacgccaagcccaaggtgcatatccgtgatatctggctcaaggcggagctggccgagggcaacaccaccggccttctgacccccatcgtcaagctggacggcgagacggacggcgcacgggtacacctgcgcctgaccgatggtgaggagttcgccctctttgatgagtacattgacggcagcaccatcgagctgagcgccatccacccgtggagccatgagacgccggtgctgtaccatgccttgctgaccctgtatgacgctgacggcgccgtgcaggaggtcgtgccctacgacatcggcttccgccgctttgagatgaaggacggcattatgtgcttaaacggcagccgcatcatcttcaacggtgtcaaccgccatgagtggaatgccgagaagggccgcgccattgatgagagcgatatgcacgccgcgatggccgtctttaagcgcaacaacatcaacgctgtgcgtacctgccactaccctaaccagagccggtggtatgacctctgcgataaaaacggcatctatatgattgacgagacgaaccttgaaagccacggcagctggcagaagctgggtgtggtggagccgagctggaatgtccccggcagcctgcctgaatggcgggactgcgtggtcgatcgcgcgcgcagcatgtttgaacgcgacaaaaaccacgcggcagtgctgatctggtcctgcggcaacgaaagctatgccggcgaggatatccgcgcgatggcggcgtttttccgggaaaatgatcccggccgccttgtgcattacgagggcgtgttccagtgccgcgcgtttgacgacatcagcgatatggaaagccggatgtacgccagccccgcctccatcagggagtatctggacgccgacccgcagaagccgtttatcctctgtgagtatatgcacgacatgggcaactcgctcggcgggatggaaagctacattgcgctgatcgaccggtacgaaaagtatcagggcggtttcatctgggactacatggatcaggcgctctggcataccgatgcaatgggccgccgcgtgctgggctacggcggagattttaacgagcgcacgaccgattacaacttcagcggcaacggcatcgtctatgcggacggcaccgaaaagcctgccatgcaggaggtccgctactggtacgacacccccgagcgccgcgccgcgcacgatgcgcgcaacaagctggcggcagagcgcagcgccgccgcgctggccgccgcatggcaaaagcgccccgcacaccccctgacggcggtcgagggcgacggcaacatctgcgtcaagggcagcgggtttgaggtgctgttctccattgcggagcaaggcccgatctcgctgcgcagggacgggaccgaatggctgtggcgcgccccgcgcccggcgttctggcgtgcctccaccgacaatgaccgcggctgcagcttcccgcagcgggcctctgtctggatgggtgccgatgtctttgtgcagagaatgggctttaccgtgcaggaaaaatccgagcagcgcgtgcgggtgcaataccgtttcggcgtacccggcgtgcccggcgcccttgtcgagatgacctacacggtcgaggcacggggggctttgcaggtcgagtccgtctaccatgcagtgcccggcgcgcccgagctgccctgcttcggcgtcaagtttgagacgaccgcccccgtggtccgcacctgctggacgggcctttcgggcgagacctaccctgaccgccgcaagggcggtgtgttcggctgccatgcggagaccccgcacattgagccggcgctggtgccgcaggattgcggcctgcacatggacacccagcaggtgtgcctgcagctggccaacggcaagaccctgacgatcgagcagaccggcgaggcgtttgccttcagcgcgctgcccaacacggcgcagcagatcgaggccgcgcagcacctctgcgagctgcccgaaaccgaccgcaccagcattacggtgctgggtgccgcgcgcggtgtcggcggtattgacagctggtgcaccgatgtggaggagccctaccgcctgagcggcgagtgcgaccgcagcgtgcgcttccgtatcgtactgtaaaagatgagctgaaaaaggggccgtttgcacctccccaaaaaacaaagaccgaagtgaaaagccagaaagggctttgcagcttcggtcttttgctttactcgctcataatgatagcctcctgtttgttataaacctatttcttgttgcttttttacagcagcgcggtcagaaatccccagatgtgttggagcagctgtgttcattgaaaacttgcaatttgcgaacaactcgcatattgactttcttgctttcttggattatactatttgcgaatgaaatgcaaattggaggcgcggtgacttgcatagctacagcacgcggcagcgaaaggttctgctttcctatttgagccagcacccggacgagctgttgtccgcacggcaaattgaggacgctttggcagataaaaaaatcagcctgagcgccgtatatcgaaaccttgcacagttagagacagaggaaaaagtgcggcggagcagcaagagcggcacgcgcgaggtctactatcaataccttgatgccgaaagctgcaaaggtgcgctgcacatgagctgtatcaaatgcggcaagacctttcacatggcagatgctaacgcagctttgctcgcaaagcatttggcgcagagcgaacattttatgttggacacgactgacacgatcctctatggaacttgttcggactgcaagggaaaataacgattggaaaggaggacagaccatgacaaagaaatttcgttttatgacgggcttgctggccgtagtgctggcctttgttatgctgtcctctgttgcctatatcgcagcggaatccgaccatgactgtaccggcgtggactgcgccatctgccatcagatcaacgtctgcgaaaacctgctcaaaagcattgggcttgccggctccgccgcagctgccgtagcggcgattctatatattctgtgccggatcattccctcctgcacagaggttgcccgtacctttacgctggtttctctcaaggtcaaactttcagattaaacataaggcaacaccgcacaattcccgcctgacggcttaagcaccgctccggcggctgcggcacggcatctgcgttgccaaaatgctcgccaatacacaaagtattgcctgcgcttttggcttagcatctgccgcacctcgctcgccgtatcggcacttagaattatgcggtattgccataagaactttttacaagggtgtagtctatctgttttcggatagacttttgcggcgttgctgttacccttgtatttttgcgcccatttttaagttcttatcatgatctggaggtaacaaaccctatgaaaaaaataactgcgctgcttgcgcttttgatgctcgtcggcgctcttgccggctgcggaaagcagaaccataccaacaaaaccgacaaactgagcattgtcaccaccattttccccgaatatgactgggtgcgtgcggttttaggtgacaaagccgataacgccgaagtcacgatgctgcttgataacggcattgacctgcacagctatcagcccactgccgatgacattgtcaaaatctccgactgcgacctgttcctctatgtgggcggcgagtccgacggctgggtggacgatgctctgaaaaatgccaccaacaagaacatgaaggtcatcaacctgctggatgtccttggcgacagtgtcaagaccgaagaagtggtcgagggtatgcaggaaacagagcacgatcacgaccatgaccacagcaaggaagtctccacctttgaagatgacgaggttcaggacagaagcctgtctgattgggcgggcgacttcccggctgatatga

SEQ ID NO: 14195 - DNA, 1598 bp, Unknown
  gut microbiota DNA sequence
gaggacaaagaccacgagcatgaagaaggcgaagagcacgagcatgaggaagaaaaggacgagcacgtttggctttctctgaaaaacgcggaggttcttgtaaacgccatttccaagtctttgcaggagctggaccccgacaataaggacacctacgctgccaacgccgctgcctatattgaaaagctctctgcgctggacggcgaatatcaggctgccgtggacgctgcgacctataagaccgttgtgttcggcgaccgtttcccgttccgctatctggtggacgattacggtctgagctactatgccgcttttgtgggctgctccgccgaaacggaagccagctttgagaccgtttccttccttgccaagaaggtggatgaattgaaactgccctgcgttctgaccattgagggcgcacagcataaaattgccgaaaccattgtccagaacaccgctgagaaaaatcaaaaggtgctgaccatggattccttgcagtccacctcttctaaagatgtggcaaacggtacgacctacctctccgtgatggagaagaacctgtccgtgctgaaagaagcattggggtaaggaggtaggtctatggctcagctcacttgtcaaaatctccgcgtcggctatgatggaaagtccgttctgcaagatctcagctttgaggtctttgcaggcgactacctctgcatcgtaggggaaaacggctctggtaagagtacacttatgaaaacgatccttggcttgcagccgcccatcagcggcagaattttgacaggcgatgggctgaggaaaaatgagatcggctacctgccgcagcagaccgtcgtacaaaaggatttccctgcatccgtgagagagatcgttctctccgggtgtcaggggcgctgcggcagccgccccttttataacaaagaagaaaaacagcttgccgaagaaaaccttcggaaaatgcagattgataacctctcaaagcggtgttatcgagagttgtccggcgggcagcagcagcgtgtgttgcttgcccgtgcgctgtgcgccacacaaaaaatgctgctcttggacgagcctgtttccgggcttgatcccaaagtgacagcggaaatgtatcgtctgatcgacgaactgaaccatcgggacggtatcaccattattatgatttctcacgatattgccgccgcagtcaaatacgccagccatattctgcatattggcagcaccgttttcttcggaacaaaggcagagtatctccaaagcccgcaagggcggctatttgccgcagagaaaggcagtgatgaacaatgaccgcaatcttggaaaaactgaccctctattgggcgtacccctttgtccgctatgcgctggtggtcggcgtgctgattgcgctctgttcctctctgctgggcgtaacgctggtgctgaaacggttttccttcatcggtgacggactttctcatgtggcgttcggagccatggcgattgccgctgtgctgcaaatcaccaacgaaatgccgctggtcatggtcattacaatcatcagcgccgtgctgcttctgcgtaccgggcagaacacgaagatcaagggcgac

SEQ ID NO: 14196 - DNA, 6964 bp, Unknown
  gut microbiota DNA sequence
cagcgaaaataaaaaggcagtgcatcatgaagcaatgcactgcaggggttcagtaattgtcgcgcgatttcttgcggagcttgcgccagatgttgaatgcggaaatgaggagcgcaagcatcagcagcacaacgaccatccagccgctgccgccctcctcgtagctcttcatctcgctccactgggagtccatagcagcgttgatgtcctccggcagggtctcaaagacctcggccttgtccagcacgtccgcgcctggataagcaatctcgctgtacttgaggtcatcgtccagcatctcccacacggcggtgataggggtggaatagccgatgaagtcgcagttggcaaggcccacatccggctcgcacatatagttgatgaacatctcggcggcctccttgttcttggcattggccgggatgcacatactgtcgatgaagaagttgacgccctcctccgggtggacaaaggccagatccgggttctcgtcaatcatcgtgatggcatcgcccgcgtaatagggggccatggcggcctcgccgccctccatcttgtcaaagacttcgtccatgacgtaagcctgtacgatgttcttctgctctttcagggcgtttgtgatggcggtgatttcatccacggacttcggattcatcgaaaggccgatggtttttgcagcaatggcgtaggcatcgcgggagttgttgaacatcagcacattgttggtgtactccacgtcccacatatcagcccagcttgtaggcggctcgtccaccatcgtggtgttgtagataaggccggtggtgccccacatatagggcacgctgtaggcgttgtcagggtcaaagctgcggcccagatattcctcgccgataccggcaaagttcgggatattgtccatatccagctcggacagcatcccctcggaaatcatcttgccgaccatatagtcggagggaaaaatcacatcgtaggaaacaccgccggatttcagcttggcgtacaggctctcattggaatcgtaggtggtgtagttgaccttgatgccggtcagttcctcaaaggcagtgagtacgttcacgctgtcatccgaaccgtcagaaatgtacaggccgttgttgtagacgttcagcgtgatgcggtcattggcaaaacgcgtccagtcatagtcgccggagacggtgatatcctcattgatttgaatatcctccgcggcatacaccggtgcggcgctcagcatggttacggtcagcgccgccagtgctgcggcagaaagctgtttgaatttcatcctcaatgccccccttcgtccagcatggccttgcggatggccttctgattgcggcggtaggcgcgggagtctgcagcgttggaaatcaggataatggccagaatgacgcagaagataaccgccgacagagcgttgatctccgggctgaccttcttacgggtcatcgagtagatggcgatgggcagcgtctgcattgtgccggagttgaaatacgaaatcataaaatcgtcaatcgagtaggtcaggcaaatcaggaacgccgacagaatggccggggaaagctgcggcatgatgaccttcatgaacgcctgcttcggcgtgcagccgaggtcaagcgctgcattgtacaggctggggtccagctgacgcagtttgggtcctacattaaagataacgtacggcacgttgaaggtgatgtgcgccaccagcagcgttgtccagccaaagatgccgccctcgccgccgatgccgaaattctgcgccataacaaagagcagcatcagcgaaacgccggtgatgatttcggggttgacaacgggcacatagctgatgttgttgatgataagctggctgcggcgggacatggagttgatgccgatggtggccagtgtgcccagcaccgtggcgataatactggaaaccagtgccagcacaaggctgagccccagcgcagacagaatcatctcattgtggaacaggctcttgtaccagccaagggtgaagcctgtgaagttggaacgggacttgctctcgttgaagctgaacgcaatcatgactgcgatgggcagatacatgaagcagaacaccataatgacgtaggtgcgcatgagcagcgcggaatgtctctttgccatctcacatcactccttccatctcggactcgtcaaagctcgaagtgaagctcatgcagagcaggacaataatcatcagcaccaggctcatggcggagccaaggttcaggttgtaggagttaccgaggaactgcagctcaatcaaatcaccgatcagcaggttggagccgccgcccagcatacggctgataataaaggtggagacagccggcacaaacacctgcgtgatgccggtggcaatgccggggccactcagcggaaccagcacccggaacagaatctgccatacgttgcaaccgaggtcctgcgcggcctccacaacggaatcatcaatcttggtcatggccgtgtagatgggcagaatcataaacggcagatagttatataccatgcccagcaccaccgcgccggaggtgttaatcatattgaaggggccgaggccgaacaaaccgaagaacttgttgataaggccgtttttctccagcagtgtcatccaggcgtaggtgcgcagcaggaagttcatccacatgggcagcataatgagcatcagcataatgtgctgcttgttggcgcgcaggcgggagagaaaatacccgaccgggaacgccatgaccaggcagactaccgtggaaatggcggccaaaatcaggctgcgggcaaacacgctggaataccgcccgatctgggtgaggttgtcaaaggtgaactggccgcccgcgttcgtcatggcgtaccagatgacgatgaaaagcggtacgactgtgaaaatggccatccagaccagatacggcccggccagccagcgggaggatttggatttgagcatggatcacacctccgaacgcttcatgatatgaatttcgtccgggccgatgttcatgccgataagctcaccgggctggctggcctgcgtggagtggatgatccactcatagccttctacatcgacatgcatttcaaagtgaacgcccttgaagatgacctcgcgcacaaggccggtcagcataccgacagagggcggcacgatctgcacatcctcggggcggatgacgacctgcacaggctcgttcggcttgaagccgcggtccacacaggtgaaatcatacccgccgaagttgacaagaaagtccttgagcatgacgccgtccacgatgtttgaatcgccgataaagcgcgcgacaaaagcgtttttaggctcgttgtaaatgtcctgcggggaaccgatctgctgaattttgccgccggacatgaccacaacggtgtccgacatggtaagggcctcctcctgatcgtgggtgacatagacaaaggtgatgttcatctcacgctgcaggcgcttcaattccagctgcatctccttgcgcagctttaggtcaagtgcgcccaaaggctcgtccagcaaaaggacgcgcggctggttgaccagactgcgggcaatggcaacacgctgctgctgaccgccggacagctgatggatgctgcggcgctcaaaccctttcaggccgacgatctcgagcatttccagcaccttggggcggatttcctcctcggtcatctttttcaggcgcaggccgaaagcgacattctcaaacacattcaggtgcgggaagagcgcgtacttctggaacaccgtgtttaccggccgcttgtagggcggcatgttggcgatgtccttgccatcaaaaaagacattgcccgatttcggggtgacaaaaccggcaatcacacgcagggtcgtcgtcttgccgcagccggaggggccgaggaaggtgacaaattccttgtcgtggatgtccagcgagagtccgtccaggaccttttgcccatcgaaatcgacaacaatgtctttcagagatacgatcagattttcattcatttttattgcatccccctttgcggaatttcccggcacaggaccttttcatcgcgccgtttcttccttaggccggcacaaagtccttgacgagtcagcgtcaattatgccgccccgcaaaggtttgttacacggccccacgcgcagggggccgctgcagcagcacatacaacgccaatgtgtcagggtatatcagatttaccctatagatgcacacacaacttacattatacggcataggggatgtttgtcaatacggattttcacaatttcgtaaaggcttcgcaaagtattgttcatgcttttataaaaaacagctcctccgcaaaagcggaggagcaagcagtatcagatatgatcctcaatccatgtcagcacatagtcaaaaacctcgtcacggttggtctcgttgtgcagttcatgtcggccgccctcaaaaatctggcaggtcagatccttgacaccggcatcgcccagcatcgcccagaccctgcggacgcccttaccgtaatcgcccacgggatcgccgtcaccggcaatcagcagaacgggcagatccttgttgaccgactcggcccatgccctgctgctgacatggttcagtgtggccagcatctcccggtaggtggaggcagtaaactggaaggtacacagaccgtccgcatcataggctttgacaacagtctcgtcacgggtcagccagtcattggcagacttcgcgttcttgatccttttgcagtagctgccgaaattcagcttgaccatcagaggtgagacataacgcggacccttgacccgtgcaatcagcccggccagcctttgcccgatgacattcataaagctgggacctgctgtaccggaaatgatgacggcggcaatgctttcgggccatttttcagcgtaccagcgggcgtaaaagctgcccatgctgtggccgtacagaatgatcggcgtagcgggaaagcgctcatgcagcagtgtgttcatcgtgtggaggtcattcaacaggtgaaaacggccgtccggctcaccgtaatggccatgctcgcctgccttggccgtatcaccgtggcccagatggtcattgcccgcaagggcaataccgtgggcggcataaaattctgccataggggcataacggcgcacatactcgcacatgccgtggctaagctgcagtaccgcacgcacgggcttgccgggcatggtgtacagcacagcggaggaggtatggcggccgtccgcggacgggaaggtaatggtttcgcagtggagttcgggcatggtcacagctctcctttgatttttttccagtattgtgcaaaggcctgctcattcttgttgtcaccgggctgataatagcgccgatccttgatggcatccggcagatattgctgctcgacccagtggttggggtaatcgtgcgggtagatatagtgctggcccttaaccttggcgtccgcgccgtcatagtgtttgttctgcagctgccgcgggataggcccggtgcgccccgactgaatatcggcaatggctgcattgatgccatcgtgggcagagttcgatttgggggcggtggccaccagcaccacagcatccgccagcggcaagcgggcctccggcaggccgacagcattggcaatatcgaccgcagcctttacgatggggatgatctgcggccacgccagaccaacatcctcacaggcgcagaccatcaggcggcggcaggcgctgggcaggtcccctgcctcaagcaggcggcccagatagtgcagtgcagcgtccgggtcagagccgcgcatggatttctgataggcggaaacgatgtcatagtggtcatcgcccagcttgtcataccgcatggcggtgcgggcggccacctgctggatcatgtcaagcgtgatggtgcggcagccgttttcgatgggggctgctgtgacggcaaattccagattgccgattgccttgcgcatatcgccgccagcactctgggccagatagtcaagggcgtcctccggaatgaaaaccggagattgatcctcagcgcccagccgtgcggcagcgctgcgcagaccggcacgaatatcgtctgcggtcagcgacttgaattcaaacaccgtgcagcgggacagcagggcgttatatacataaaagtaggggttttccgtggtggaggcaatgagggtgacagtgccctgctcaacacattccagcaggctctgctgctgacgcttgttaaaatactggatctcgtccagatacagcagaatgccgcccgccgcccccagtgtgccgatatctgccagcacggacttaatatcgctggttgaggccgtggtaccgttgagcttgtgcagctgcataccgctgcccgccgcaatgatgctggcaacggtggttttgccgacaccggatgggccgtagaagatcatattgggaatcctgccgctttcgaccgtgcggcgaaaaacctgatttttgccgagtagatgctgctgcccgcagacctcatccagcgtgcgcgggcgcaggcgttgtgccaatggctccattgtgatttccttttatattataaatatgatgctctgattgtgcaccaaaagcggtgcttctatagacaattatacggaataacggcggcagaatcaagagtaaccgtgcaagattacaaaatgtgctgccgggggtaatcagtgcagggagaaaaaataagcagcaccgtgtcgcggtgctgcttagtatgttgaaaagcgcgtctttcatcgcagagcatgcaggggcgaacagtgttcgcccgaaagtctcatgcagcaacgcttttagtgggattatttggggagggtacctttgtagtcaggataatctttagctactaactctgcataagcagcgtaggcttcctcaagggtttgatattttgtgccgctggtataatttgtgaaattggaaatg

SEQ ID NO: 14197 - DNA, 1885 bp, Unknown
  gut microbiota DNA sequence
tgctcggaggaaaccttcaaaagggtaaaatccatctatacatcatttcgctaaaggcggatttagcgaaatatagggagggcgctacggcgtttaacaaggctgcggtttgattgtgttacttgcatttcttaacgtaattttgcaagacttaatgcaagagtttgcttttactttgcaaacttggctaaaagtgttttataataatgtgtcattgtttcctattagggacaaaagcccatggtgttctcctccgtgtattcctgccttaacgaccggcaaaacagtctgtcgagccggaagctgtcagcttttccgcctgcgcacttttggtgccgttgcctgataactcatatcgagcagcattttgattttgttatccggtgcgctgccgtccaaggcaacggtgatccagttatccttgctcatgtgatatgccggtaagaatccgggttcttctcgcagggaaccaatgaggatcgggtcgcatttgagattgaccacatccaatagtccttctccctgtaatcccagcttgtttttgggtacatccataatgagggcgaaccacttccgattgctgcaatgccggaacaccgcatggttcggagatttacgccatggataatccgcctctgcattgtatgcttccatgatgaatgcttctaactcattgcgcctcatggctttatctccccacaattcgccttacctttttgcagcttatcaagattgccgcgcaggatggtttccaatgggacatccaatgcggttgcagcctctgcaagataccacgccacatcaccctactattttttaggcatatctgtaatatagccctattatacgataaattgcggcaaaaaggaatgctgtaccctcccaattcggaagatacagcattgcttttatatgtaatggcgttatagccttgtttgttgtctggccttgaccgagcgactgctctggcatggtctaaggcgcagtgggtaatcatgggatgcttcccagttgtgtttcttgattacaagtttattatagcggggacttgtgtgcagagtttaaaagggttttgaacgaacttgaaacttcttttgaagaatctgtgaatctcttgccatagcggctgcggctaccatcataaaaaatccggcgttcaaaacgccggattcaaagcggagttattttccaagcacaatggatagcttaatttctttttccgtttcgctcaggtcgaaatcgccgccatcggcaacggtcacgcgcagctcatagagtacgccgtccgtcagctccgtcacagccgcgccggtttcgtccgtgatcgaccacagctcggaggcaacctttaccagcttgccgtctgcaccataggcgtagagcgtcagatcggaggcgctgccggacagattgttcatgcggaaggccaccgtggtattggggtgcacattgcggatggctgcggtgttgcgccagcttgcgactgtaccttcgccgccgtcctgtgcaaactggtcctgtgtaagaacatttcttgccgcctgatcgagatcgacctcgcggtacggaagctcgggcaggtagacaaagcggtcctgcaggcgaagcagctcaagataaccggtcgggcagtagagtgcatttccgctgttgccggtgtacatgccaatggccatattattgtagccgtacttgttggatacatccatcgtaaagacagtctcgccggtttcaaagtcgagaatgatgtactgccacatacccgtggtcagatcctgcacatagccgtagatatagcccgttgcggtggagagcttcatgatcgcggtgtcgctcagatcatttcgggtccagatgctcttcatctcgtagccgctgtcggttt

SEQ ID NO: 14198 - DNA, 4496 bp, Unknown
  gut microbiota DNA sequence
caatgaggccgagatgccgaaattggtctggacgatgctgaccaacaaagcggtcggcgaataaccgctgtataagcaatgcgcacacgactctctacgagaattgtgtgcgcattgctttttgcatttctacatcaataatcacaacaaaaaagccgtatgtcggcaattccggcatacggcaatgggatactatatggattttacttcttgatcttgatcagctgagcgttgatgctgttcaggaacttatcgcccaaggaggaatcgggcatcatctcgcacatgaccttggggctcatcttcttgagcatatcccacatgccgacacccggctcgatggagaagttggtggtcagcttgacggccttggtaacgatggcaaaggcttcctcattgcgggaaaggtcatcgagactgtcgttgacattgtagcagccctcggggaattccatcggcgcatccagatccagactgcctacctgctggaaccagttggcaacgccctcgacatgctcggtgaattcgggcagaacatagctggcgggctccttttccaccttttccagcgtgatgcagtcgcgggcatcctcggtgatggccatcagggtgttgaagccgggctgcagggcaacctcaaagcggaagatgcggtgagcctgctgcttgccgatctccttgccgttcaggaacagcgtgacctcgtcctgattggagtaaaccttgacctcgatggtctcgccggcgcgctgggcatagcggcggcccacgatgtgaaccatcggctcctgagaccagtacgcctgatagaggtagaagctctccttgcgggtcttacggtcgatggtaaccagacccttgttgttgcggccgccaacgccgccctcgttacgggctgcgcagccgaagtcgaacatattccagacatgggtggcccagacccaaggacgctcctcaaagacctgcgccatatgctcatggtagagggtctggtactcctcgctgtaatccttgcgctgcgggttgctgctgtgccagttcacaatgccctcacagccgtactcggacacgccaaggcagatgtcggggtgctcggcatggaatttatccagccacgggccgttgtcctcaatcttgccgccgtaccagccaaagtagtggttgtagctttccacatcggtgatgtggtgcatggggccctcggtcggggtgtgggaaacatgggcgatggtagtcaggcgggtcgggtcaagctccttgaccagcttctgcaggtcgtggtgacgatcgaccagctcctgactgatgccgccaatgaggatctcgttggagatgccccagaacatgatggaggggtggttgtagttctgaatgaccagctccttcatctcctgacggcaatgctcatgggcggcatcaccgggcttgaatacgctgatgaagggaatctcagcccagacggcgaagcccagctggtcacaggcatcgtagaagtcctgactgtgctgatagtgggccagacgaatcgtgttggcacccagatccttgatgatctgcgcgtcctcataatgatcctcagcggtcagggcattgcccttgtacagccggtcctgatggcgggaaacgccgcgcagcggggtagccacaccgttgatggagaagccgccgtcaggggtgaccgcaaagctgcgtacaccggcgttgaggatgatctcgtcataggtctcattgcggcggttcagacgggcggtgacggtgtagaggttcggctcgtccatgctccacagcacggcctcggggacatgcagagtgacagccgtgttgtcagaggggcgcacggcaccggcaatctcccaaccgtaggggtcctcaaggatgtactggacggtaaagtcgtcaccggcgttggtgacaaaggcctgcacggtgaagtctgcgccgccgtcctcggtcggcttgggggtgaccatgatgccggggccgccgtaatagtccagatcaaagtgggtctcggggacgctgatcaggttgacaccgcggtacaggccgccgtagaaggtaaagtcagcggaggcggggtacatcgtgggggtatcctcgttgctgacctcaatgctgatctcgttgtcaccggcaacgcagaggtcggtgatgtccgcgcggaagcaggagtagccgccctcatgggtcacggcgtccttgccgttgatgcgcacggtagctttcagggctgcggcgggaatctcaacatacagacggccgccggccagcggctgggtgggtgccttgaaggtgcgggtgtagactgcagtggtgcgcagatagctgccgttgccgtccataccgtctacggcgttccatgtatggggcaggttgacggtctcggtttcacgctcacccttggggaagctgagggtccagccctggttgagggaatacaggtttctcatgaaaaaatctcctttcggtgtttgccttaggggctttgttcttgtctcattctgtaaccagtgtaccatgaaagcagcagggcagggtagaacatttttaagacggaatcgtatttttttgctgtgatttctcacattttcctatgtgcaaggtgcagatcaatggcccagcattgcttttttctcgcgtcggtattgggtcggcgtagtgccgagctgttttttgaagatcttggtaaagtagttcacatccagaataccgactgcagcagccacggcggcaatgctgcggtcggttgtggccaacagcacggctgcacggtcaacacgctgggagttgatataatccacaatggtggtgccggtgtcctgcttaaagagactggacaggtacgacgggctgataaagcacatggcggcaaggcttttcagcgacatctgctcggccagattcaggttgatatggttgatgaccttttgcacaagcggcgtgtaattcttgaccgagtaacgctgcacataggcgcagtactggcgcaccatgtcccagaccatcgaggtatcgttcagatctgtgatggcctcgatctgcgcggcatagcgggcggatatcttgtcgatataatacgggtgtaccttgccgcgctcgattgccttgcgcatcagggtgttcataatggtcatcttggtcttgatctggtacagtgtgccgcgaaaccgcccgttgtaggtataccgccccatctggtggcagacattgagggctgcatctacatcgccgcggcttacggcgtcgaacagcctgttttctgcggcgtagcgctcctccagcatggactgcggcagctcctgctcaaagctcggctcccgaaagcatcgtgtgtcgagcgcaatgttcaagggcaggaattctctcttttcgaccacgcggtattcatcggcaggcatcatcaggcccacgatcgtactgatggtagagacaaagtgttcgctctgcaccacgcgcacactgctgtaatagctctgcacgacctcgcaggcttcctccccgatatacttgcgtatccagtcgctggtttcctttgtgcgggtgccgttggtccaaggatccatcacgaatacagcctccggctcatcgggaatgcggaacatcgcgtaatgcagttcaaatatatcctctgaaatggtcagcacatgctcagcagaattttcaatcagcagcttgccgaatgcctcccaatcaaactgggggtccaatgccttgcgcagaccatagtcaaagtcctccagcccggtaaagggggcagcgacccgcagacatttgatatcataaccggtggccagtcttttcagcacaagcaatgggtccaactgcataaaagacacctcacatcataaatttctgctttcattatagcggataccgccgtgccttgcaaggcataccaaacaaccgaccgcagcgcaatttttgcatgcagcggtcggttgttacaggcatagttattttttgcggttgcggtgttctgccacatagcgcatgatgggcggcatgacaaccgccagcaaaatcagcacggccagcacccagccgctcggggtctcatggttggggttgaacagcagttgcataatatccatagtaagcagcctttcttttttcaagaggtcacagctcgatcataccgttttcatccggtggcatcggaatgaccgttatggcatcaatgatggtcatggcaatggaaatacccgtccagcaggtgagcagatagaatatgccggtcacccattgtttggcatagaagcggtgtgcgccaaagatacccaagatgcacagacgcagataggttttacggctcaccttttgccgcacacggttggcgcgcacattgaaaaacgcatcaatggcgtgccagatcgggccgtgcctgccggtgtccgcaataccgttttcctcccgcagagagttgagctgatcctgcgcaatggcaatatcaacagcagtcggcttttcgttcttctcggatgtccggttctgatcgt

SEQ ID NO: 14199 - DNA, 13672 bp, Unknown
  gut microbiota DNA sequence
ccgccgaggcgggcggcttcctgtgtgagctgctttaagtatactatagggaggactgctgtgtcaattaagcctgctcgctcatagctgcagccttaatcttgacgatctggtcctgaatctcagccatcttttccttgctcagggggtagaacttcatggcgatcaggttgcagatcaggccaagggagatcataccgaaggcgaggaaaacaatgccggcgcgcagctgcggggtgacaacgtcgcccaagctggggttgtggtcaacaaagccgcaggcggcaaagacgataccggcgatcataggggcgaaagaagaaaccagcttgtcaacaaagctgaacagggtgcccatcagaccgggaacataacgaccggaacgatagacttcgtagtcggcgcagtcagcggtcatggggatgacgatattgccggaaataccctggcagccggccagcagaacagacagaccaatgtgggcgattgtgaagaagccccagttcagagcaccggtggcagggtcggtggtcatggtggtaggatcgccgaagaaccacaggcagcccagcaggatgttaatgatcaggccgccgatggagccgatgaccatagcttttttctggcccagacgggtagccagcagagaaacggagaggaaggtcaggataacgccgggaaccatggtcagggcggtaacagtaccctgcagcttgatagagccggccatgcaggcgaacatggcaacgccaacggcactggacttggcttgtgcgccgagcttgtcagtagaggcagacagaatcagcatctgaatggcgcggttgttcttgagggtatcccagtagtctttgagaccaatcttgacagccttgccggtgccgaagaactcgggacgatccttgggggtgatggaaatgacagcaatgatggtgaaaaacagagacataaaggcagacagcatccagaactcgtggaagaactcaacagaggtgtagttgccaacgtcggcgtacttgtcggcgatgttggaaacgatgatggcgagcgcagtaaacagaacggtgttgaacacgccgtcgaaggaggcaaacatggggcgctgcttcgggtcgttggtcaagcagctctgggcgctcttggtgacaacgcactggcaggtgtagccaaggtagaacaggcagcacataacgaggaagaaagcaaagcggacgggaccctcgggcagcttgtgggtgacgtggaacataatgtagctggtcacgaacaggacagcctggccgatgacgataaacggacggttcttgccgaacttgccgttggtcttgtcaaccataaagccgacgaacgggtcggtgacgccgtcccacagacgcatcatcatcaggaagctggaggcgattaccatgctgacgccgacaaagcccagcaggtagaaggtgcagtagttcatgaacatcaggtagacattcgtggcggtgttgttcatggcgaagcccgcaatacgccaaagcggaacgcggtgaatgccgttgctttcgtagtccttgtcgtaatacttgtcaggcaaggttctcattgtagccatagttaattactccttctttttcgtgttgcgcccggcagcctgcggcgcggtgggcgcatcgggggcagagaccgatgcgccttgctgcaggcagggctggcaactttgtgtctatattataaatacatttttacaaaagcgttagtaatatctttaggttttagagtaaaaaacgcttgtttttccccgcgcgtataaaacttttgtatattgttcacaaaagcatgcttgtgcattatataatgtagctgcttgtatgatttcagccgttactgtaaaattgtacggttttgccgcaaaatcctactcacgccagaagatacggctgtggcataatgaagatgacaatagcagtgcagctgcggctgccgggcagaactgcgccaagtatcatttttacgaggagaaaataccatgcaagacaaatctttgctgtacccctgtgaatccagcgcccgccgtgtagtcagcctcgacggcatgtggcgtttcgccttcgacccgcagggtcagggtgtggacaagggctggactatggccctgcccgagagcatcaccatgccggtgcctgcatcgttctgcgatttctttaccgataaggactcccgcgagtattgcggtgatttctggtatgagaccgacttctttgtccccggcgagtgggagggcaaggacattgccgttcgcttcggctcggtgacccaccatgcccgcatctttgtaaacggcgtcgaggtcacagcgcatgagggcggcttcctgccctttgacgctgccgtcaccgacatcgtgcgctataaccagcataaccatctggccgttctggcaaacaatgagctgaacgagaccatgctgcccgccggacgcacgaccaccctgtccaacggcaaaaaaatggccatgccttactttgacttttacaactatgccggcatccaccgccctgtcaagctgatggcgctgcccaaggagcgcgtactggacttcagcgtagtacacagcatcagcggcaccgacgccgatgttgcctacaccgttacaacgaacggtgaccatgccgtctgcgtggatgtgtatgacggtgcagaaaaggtcgcacatgccgatggcaagagcggcacgctgcatatcgagaatgtcaggctgtggaatgtccacgctgcctacctgtacagctttgtcatccgcatcaccgacggcgagaccgttgtggacgaataccatgagaagatcggcatccgcacctttgagatcaaggacggcaacttccttttgaacggcaaggccgtctatctgcgcggcttcggcaagcatgaggacgccgacatccgcggccgcggtctggatctggccaccgtcaagcgcgattatgagctgatgaagtggatcggtgccaactgcttccgcaccagccactacccttacgctgaggagctgtaccagatggccgatgaggagggtttccttgtcatcgacgaggttcctgccgttggctttatggaaagcacgatgaacttcctgtccgccagtcagggcaacggcaagaaggtcggctggtttgagaaggagaccaccccgcagctgctggagaaccacaaggctgcgctgatcgacatgatcaaccgcgacaagaaccacgccagcgtcattgcgtggagcatcctgaatgagccccagtgtacgagcgagggcaccgaagcctacttcaaaacgctgtttgatctggcacatgagatcgacccccagaagcgtccgcgcacctatgccatcgtaatgatgagcctgcccaacaacagcaagggccagcagtttgccgactttatcagcctgaaccgctactatggctggtatgtcatgggcggcatgaacattgtggatgccgaggctgccttccgcagagagatggacggctggagcatggtcctgcacggccgcccgatgatctttaccgagtacggcgccgacacgatgcccagcgagcataagctgcccagcgtcatgtggagtcaggaataccagaacgaatatctggacatgaaccatgctgtgtttgacagctatgattttgtcaagggcgagctggtctggaactttgcagacttccagacgaccgagggcatcatgcgcgtcaacggcaacaagaagggtatctttacccgccagcgccagcccaaggacgccgcgttccacttccgcgcccgctggacgagcctgccgatggactacaaggcagacaaataaaccgtaaaccacctagcgggtaccgccttttgcgcgtacccgccttttgcatttggaaaggagcctcaacatgcccaaggcatcaacgcgaatcaaaacctatcgcaacgcaaatggccccgttgtctccacggtcgatcgccgtgtttttgagcaggacggtctgaccttcaaggatattgacggcagcggtacactctccgctgtaaacgactggcgcaacacccctgccgagcgcgccgccgcctatgtaaaggtgctgagcgtcaaggaaaagatcgcccagctgttcatttccgactggcggatggccaaataccccatgaccggcccgatggccgccatgtacaaggacatggagcgcaaaaccgatgcgtacggcatccttgacgagggcgagttccgcggcaagacgatcttcggcgagcagcacctgcccagcaccaccaccctattgaaggagtggttcaaccgtcatgtgatcctgcgcgcaaatgccacccccgccgacatggccgactggatgaacgaggcccacgctgtctgtgagcagtgcgagcattttatccctgtggcagctgcatccaactcccgcaatgagaacggcgagctggtctttggcatgaacgatgccggcggcgtgctggccacatggccgggaacgctgggcattgccgctgcagtcaagggctgccgcatcgaccttgtggacaagtttgccgccacggtgcgcagggaatggaacgcctgcggcctgcgcaagggctacatgtacatggccgacacgatgaccgacccccgctggcagcgcacctacggcacctttggtgaggaccctgcacttatcagcgagatcatgacccatatcattcccgggattcagggcagtgcgcagggcgtgaccgctgacggcgtggccgtaaccaccaagcatttcccgggcggcggtgcccgcgaaaacggctttgacccccattatgctgcagggcagtggaatgtatacgccacaccgggcagtctggaaacctatcatctgccgccttttgccgcagcggtcaaggcggggactgcctccgtcatgccgtactactcaaagccggctgccgcaaaaagcgaaccgcagcacgacctgcagggcaatgtcatcgagatggagccctacggcttcgcctacaaccgctattttatcgacacgatgctgcgcggtcagatgggctttaccggctacatcaactccgacaccggcatcgcccacaatatggcatggggcgtggaaatgctcgatgtgcctgagcgcatcggctttgccgtcaaccacgccggcgtggacatcatcagcggcctgtttgacaatgacgccgggcagcaggcctacgaccgcgcccataccgactactacgacacccacccgatcccgcagggctttaccaaagaccagcttgtgctgaccgatgaggcactggatcgcgctgtgacccgcaccctgaccgagctgtttgccctcggcatgtttgaggaccccttccgcgacccggagggagccgagcgtgtggttgctgatcccgccgaccgcgccgccgcagccgaggcccatcgccgcagcgtagtgcttttgaaaaatgacggcacactgccgctttcctccgacaggaggatctatgccgaggcgttcctgaagaatcccgagcaggcaaaggccgccacgcaggcgctgcgtgctgagcttgcggactgcacactggtcgatgaccctgccgaggccgatgcggcgctgctctttgtctcgccgtcctccggtgagtatttcaacgctacgccgggctatctggagctggacatctgcgaaaacaagacggttcataatgtggataccgagggccgccccaccgccgagacccacaccgagacgaccctgtccggtgcaggacggttggcagagattgctgccgcagtacatgcccacggcggcaaggtgatctccaacatcaacttcacgatggcctggcaggtaggcaatgtggagcgcctcagcgatgtgctgctggccggctttgacacttatcgtgatgccacgctcgatgtcatcttcggccgctttgttcccacaggcaagctgcccattacgctgccgcgcggtgatgaagtgctggccgtcaatgaggcaggcatctgcgtaagccccaacgatgttccgggctttgccaaggaccgctatatgccggatgccctcaaggatgaaaacggcaaggcctacgcctaccgcgatgcagccgggcattattacgaatacggcttcggcttgtaatgattgcccatatagagtaaaataaagatatttatggcggcatcgcagccaatgcgcggtgccgcctttttgaaggagtgttgtaagtgactgccgcaaaaaccagagatatgggcacaggcagcgtacccaagctgctgctgcagcttgcgctgcccgccgttgtggcgcaggtggtaaatctgctgtataacattgtggaccgcatttacatcggccacatggctgatgtaggtgccgccgcgctgaccggcgtgggcctgttcacaccaattctgatgctgatcaccgcctttgcgatgctgtgcggctccggcggtgcgccgcgcgctgccattgccatggggcgcggggacaataaagctgcagaaaagatcatggccaactgctttacgctgctgctgattctggctgttgttctgaccgctgtgttttatctggcggcccccagcctgttggtgctgtttggtgccagcgccaatactctgccctttgcgctggattatgcccgcatctatgtcttgggcagtgtgtttgtgctgatcgtgctgggcatgaacccctttgttaccacacagggctttgccgccttcagtatgctgaccaccgtgatcggcgctgtatgcaacatcattcttgatccgatctttatcttcgtgctgaatatgggcgtgaagggcgctgcgaccgccaccatcatcagtcaggccgtgggtgcgctgtgggtgctgaaatttctgactggaaagcgcacaaaattaaagctccgtaccaaggatatgccgctgcaggggcggatcatcctgccctgccttgcactgggcgtgtccacctttgtaatgattgccaccgagagcattctgtccatcagcttcaactcgagtcttgcgcgctacggcggggatctggccgtaggcgccatgaccatcatcaccagcgtatcccagcttctgtccatgccgctgcagggcatctgtcagggcggccagccgctgatgagctttaactacggcgccggcaagaccgaccgcgtgaagcaggccttccggctgcagttcggcttctgcgtggcgctggcggccctgttctgggtcgtcagcatgctggccccgcaggttttggcgggcatcttcaccaccgacccggagcttgtcagctacacggcgtgggccatgcgcatttatatggcgggtatcttctcctgcggctttcagggctcctgccagcaaagctttgtggcgctggggcaggccaagatcagcctgtttatggcctgcctgcgcaagctgatcctgctgatcccgctgatttttattctgccgcactgtatgcccgacaaggttttcgccgtctttctggccgagccggtcagcgacattatcgccgccgccgtgacgagcatcgccttcttcacccggttcaataagatcctcgcgggcgcgccgaaaagtaatacgcagccgatgtaatggtacttagggcatcaatgcgctgccagcagtaaaatacacggcctattttaccaattccatcctgtttcagaatgcgggcggccgctataatggtagcaacatcagcaagataacctgctgatgcggatgttaccgcggccgctgtccggcggccggcgttctgaaggaggaacaaatctatggctatcatcattgctgcagccgtggcagcggctctcatcgtattctgctttctctgctataagaaagccccgcccacacaggcgatcgttgtgaccggtctcggtctggcccgtcctaaggtcgtatgcggccgcggcgtttttgtcctgcccgttgtgcagcgcgccgaccggctgaacatgcgccttttgaaaattgatgtcaagacgccggaaacgggcgtcaaaaccaaggagggcgtttccctctggctggacagcgtagtcactgtgcaggtctacagcgaaaactcgaccgtctcggatgatgaagttcgcgcagccgggtatgatgacatcaaaaagtacatcaactcccgccagcagtctgcgatctcgaactttctcggaatggacgaggcgcatatcaatgaaaagatcaacgatgtgctgcagggcaacctgcgtgagatcgtcagtgagatgacggtcgatcagatcctgaccaaccgcaagcagatggcggtcagcgtggtcgaaaacgcccgccctgaccttgccaagatgggtctggaggttgtgaccttcaatgtgcaggatgtcaaggacgctgtggatgcgatggggcataaccatggtgtcatcgaggctatcggtgtggagcaggaggagcttgtgaaaaagcgtgcctccattgccaaggccgaggctgagcgcgatgtatcctgcgccaaggctgccgccgctatggccgccaacgaaaaggagatagaagcccagactgccattgccaagcgcaacaatgagttgcagctggcgaagtccaagctgaaggccgaggccgacaaggctgctgccgatgcacaggccgccggtatgatccagaccaacctgcgtgcccgtgaggtcaaggagtccgaggcagacgccgagatcgccaagcagaaaaagatggtcgatctggccgcgcaggaggcagaggtccagcagcggaagctggatgccgaggttcgcaagcaggccgatgccgaactttaccgccgccagaaggaggccgaagcgcaaaagtatgaggctgagcgcgccgccgaggctgcaaagtttgccaagcagcaggaggccgagggcattgcactggtcggccgcgccgaggccgaggccatccgccaaaagggactggctgaggccgaagccatgaagcagaaggcggaggcctacaagcagtacaacgatgccgccgttgccgaaatgatgatcaaggtgctgcccgacattgcaaagagtgttgcccagcccctgtccgccatcgacaaggtgtccatcatcggcggtgacgccggcggtgtgtctggcatttccggcaatgttccggtgctgatggcccagaccattgaggccatgaaggaggccaccggcatcgacatgaaggagatcgtccgcgccaacagcatccaggccaagaccgaccgcaacatcaatgtaacgggattggacagtctcaagcccgagagccccgagaacccagagatcaaagaaacccaaaccaccgaagtgacggctgaataagctgcgagcctgcccggatttgaaccgggcaggttctttttgtttgcgttgggggggatacctctctcatgcgcagactgcacaaatgcgcaggctgttttcttgtggaaggcgacgaaacttttttccgttcatgccagaaaacatgcattttgtgcaaaatgtgtgccaatcgcaagaaagcgtggtatgctacactcacatcaaagagaggacgaccccggcagggatgctgtctgagcctgccaaagaaggaggaacccaaatgttggagatcacccgcctgaccgtggagcatctgacccaaggctgtgtgactgactgcccggcgccgcgcatcggctttgcggtacaaagcgaccgcaacgatgccgaattaacggatgccattctgcaggtcggcgattggaacgcccatctgccccaagatggccagaccggcaccgcttacaaggggccggcgctgctgccctttacgacctacggtgtccggctgacggtcaccgatgataccggcgcagccgccgaggcagaaaccgcctttgaaaccggccgcatggagaccccttggcgcggtcagtggatcagtgacccggcctttacctttaccgaggccaaggtcagccccgtgcctatggtctttcgcaaaacgattgaaacagcaaagcccattgcccgcgcgcggctttatgcaaccgccatgggcatctatgaggtagaactgaacggccaaaaactggggcggcagtattttgcccccggctttacaagctacaaaagctatctgcagtaccagacctacgatgtaacggcacttctgaccggccatgatacgctgaccgccacagtggcaggcggctgggccgttggcagcttcgtctttacccgcaaaaaccgcgtcacggccgaccggcaggcactgcttgccgagctgcgcatcgagtacgctgacggcagtgtggaggtcatcggaaccgacagcagctgggaggtcaccgagaacggccccgtccgtatggccgacctgtatgacggcgagacctacgatgccacccatgagacagatggctggcacgccgccgcccccgaggccctgaaggtcacccccgccatcacggcagagtacggtgcgccggtcacggcccatgaggtgttcaagccggtggccgtcactaccgcgccggacggcgagacgatctacgacttcggccagaactttgcgggcgttatccgcatatcgctgcagggcaaagccggtcaggtcattacggtgcgccacgccgagatcttgaaccctgacggcacactgaatacgaccttcctgcgcagtgccaaggccaccgcaatctacacctgccgggacggcaagcagacctacagcccgcgtttcacctatatgggcttccgctatgcgggaatcaagggtgtaaagccggaggatatcgaggtggaggcagttgccctttactccgatgtggcacacaccggagccttccactgctcgaatgagctgctcaaccagttgcagtccaacattacatggagtgcaaagtccaattttgttgatattccgactgactgcccccagcgcgatgaacggatgggctggaccggagacatcaatgtctttgcaccgactgcgctttacaactttgagctgagccgttttcttgaaaaatggctgcgcgatgtcaaggccgagcagcggccgggcggcggtattcccaacaccgtgccggtgcagggctacggattcccggccacgatgcccgagatggcggtggactggtggggcgatgcctgtgtgaatgtgccgtgggcgctctacgaggcgaccggcagcattgacattctgcgaacgatgtaccccacgatgcagaaatatgtcaaggcctgccgcttctgggcagggttcggcatcggcaagcaccgctatatctggcacacgccgtccgtcctgcactttggcgactgggtcgcgcccgatgtgcccaagatgagccagtggcaggcgcgcagcaagtacaccgccacggccagccttttccacaccagcagccggttggctgcaatcgcacgcatcctcggcaaagatcaggacgccgcccactacacggatctgagccgcaaggtggcagatgcctactgcagcgtatttacggacggcagcggcagggtaaaggacgagttccagaccgcctatgtgctgccgctgtacctgaacatcttccccgagaatgtccgcgccaaggctgccgaaaaccttgtgcagctcgttgaaaagaacgattacaagatcggcaccggctttcccggcacaccgtacatcctgttcgcactggcagacagcggacatgccgacacagccttcaagatgctgctgaacacccaatgccccggctggctgtatgaagtcagggtcggcgccacaacagtgtgggagcgctgggacggcctcgatgaggatggcgagtgtcccatcagcaatgacggcactgaccagatgatctcctacaaccattacgccagcggtgcggtgggcgctttcctttaccgccgcgtgctgggcgttgagccgctggaggccgggtataagcgttttcgctttgcaccgctcatcggcggcggcctgaccgaagccgatggcaccgttgatacgccttacggcaagattcatgcagcgtggcagcttgcagacggtgtgatcaccgcccgcgtgacagtgccgatgggcacggtctgcagcgtcctgctgcccggggcaggggagcttaccctcggcagcggcacacacgaagtgcgcggcagcctttgagcagccctgaccacaacttatcagataaagaaggagtgacccctctcttatggctacatccaaatccaatttctggtcatccccgctgacgcggtcccgcattacgagcgatgatgtaaaaatgccggaaatgctgctcggctattttatcggcccgttcggcgcactgctttcctccggtatcttcacaagcatcctgcagaattatttcaccgatgtcctcaagctggatctcggctttctgaccacgctgcagctgatttcgaccgtcttaatcgtagcggccaacctcgtggtaggccagctgattgagcgaacccgcgcgctggccggcaaggcccgcccgtggatcctgctctcggcgctgacgctttcggttgcgagcgtgctgatgttcgttgtcccctttgagggcgcggccaagatggtctggatcgcggttgcatataacctttactacgccgtggcctatcccatctacaacaccgccaactctacgatgatcccggtttcgacccgtgacagcaagcagcgcggcgcgctggcctccttcacgaacattgcgggtctgggcgttatgggctgcggctcgatggtgttcccgatgctcgtttccttcgcactgaaggaggatcagcacctttggttcgttgccatgctggcagtggctattttcagcgcaatcacgatttatctgcagttccttttcacccgggagcgtgttaccgaggagggccgcggcgaggatgccgccccgaagaaggcggcctcgctgggtgagcagctcaaggctgtgaccggcgaccgtatgtggtggatcgtcatggcattctacatgctgttccagtggagcggcgcaatgaagaacggctcgatgagctactactgcaagtgggtgctggacaacaccttcttcggcaatgctgacgcatggggtgcctcgcagagcctgctcagcatcatgggtgcgatcccgatggctgtggctgccgtgtttgtcgtgccgctggccaacaaattcggcaagcggatggtctgcggcgtgtttatggcgctgggtgctgtgggcggtgttatcgccggccttggcggcggtcatatcattcccgttgccatcggcgtagcactcaagtgccttggctcgtccccggcctgctacctgatcctcgcaatgattgccgatgttatcgaccatatcgaataccgcaccggcatccgtacggacggcctgacgatgagcatctacagctcgctgatggtcgcagccacacctatctgcaactcgatcttcagcgccatgctcaacagcagcggctacaatcaggccgctgatgtcgcgctgggcaccgcagcccagaccgccggtgtgcaggcggccatctcggtcagctatatctgggtcgaaacgatctgctacatcgttggcgctgtgatcctaatcctgttctggaccgttgaaaaggacctgccccgtgagcaggccgagatcgcaaaacggaataagaagtaatgcgccctctacag

SEQ ID NO: 14200 - DNA, 2949 bp, Unknown
  gut microbiota DNA sequence
aaataccccgtgcgcgacatgggcaacggcaaggtgcgcgccgtgggcatgggcatggcgatgcagggctccggcattacgagtgtggatgtgggcagcgccagcctgaagatcaacgatgatgggttctacaccctctcgatcggtgcggcagatatgggcaccggctgcgacacgattctggcgcagatcgccgccgaggtgctggagtgcccgcttgacaatgtgacggtcctcggtgcggacaccgattcctcgccctacgattccggctcctacgcatccagcacgacctatgtcaccggcaaggcggttgagcagtgcgccgagcagctcaagcagaagctctgtcaggtcggcgcggggctgctgggccttgatgagcgcgcggtcgtctttgcgggcgatgccgtgacgagcgaggacggcacgcagcgcgccacgctggcgcagatcgccgcagcctcccagtgcggcagcaatacggcgctggaggcagtcgtgacccacagctcggagatctcgcccccgccgttcatggtgggcgcggccgaggtcgaggtcgatctggagaccggcgaggcgcaggtcatccgctatgaggcggccgttgactgcggcacaccggtcaacccgaaccttgcgcgggtgcaggccgagggcggcatcctgcagggcatcggcatggcgctgaccgagaatgtcacctacgatgaccgcggcatgccgcaggaaaactcgctgatgcagtacaagatcccggcgcgcaacgacatcgggcatatccatgtcgtatttgagagcagctacgagggcaccggccccttcggtgccaagagcatcggcgaggtggtcatcaacaccccgctgcccgccgtggccgatgcgatctaccacgccacccacaagcggttctatgagctgcccatcacccgcgagcagatcgcgctggccgggcagtaaagggcaaggcgagaaaataaaaaattgcaagccggcagattgccggcttgcaattttttttggaggaagggcattcgtcaaagcagcttgctgcccagcgcctgactggtgcgggagagcgagaggttggcaagctcctgattgtcaagggtgtagcgcaggaccagcacatttgcaacaaagagcatcgccagcttggcggggatgctgcccgagtcgagcgggttctcctgcgcgccgcagagcagcacgacatcggccagcgccgcgccgggggcgtcatcgtagtgggtgatcaggatgaccttggcaccgttctccttggcgaggcgcagcgtgtccatcatgtcgcgggtcgagccggagtaggagacgaagagcagcacatcctcggggcccatcaggctggccgtgatggcctgcatgtggctgtcgcccgctgtgcggaatttggtcgaggtcatcgagaagcgcgcccagatgtcccctgccagcacctgactgccgccctgaccaaggcaatatacctgacgcgcgcgctgcagcagcgtggcggcgcggtcgatggcatcggggtccagcacactgcgggtgccgttcagcgcttccacggcggtgttgtaggcgtgggtgaccagcgtctgggtgtctacgcccggctccagcttgagcgcgaccggcattgcggtcgcggtagccttcgccaatgcgattttcatttcgttgtagccatcaaagcccagcgagcggcagaaccggaaaatcgttgcctcggccacgccgcaggcatttgccagcgaggaaatggaaagatactgggcgtcctcggcgtgctggacaagataatcggccacgatgccgcctgattttgtcaggctgtcgcgcttggtgcgcagcatctcccaaaagctctgttctaccatggttcggggtcctttctcaagcaaataatgcggtcaatgggcggcgggggcgctgcgggtcagcagatcgtacagcccctgcgccagcgcccggtgggcttcccttgtcatgtgcatgccgtccaccggcgagcataccgcgccgggcagggtgttggcgtccagaaagcgcacaccgggcaggccctgcagcatcggcgcaaggcgggcggcaatgccggcgcagcgctcgtggcagccggggcccatctcctcgcggaagatcagcctgtcatagtccggtgtaatgaccggcggcacaatgaccagcacatcggggtgggcgttgtcgcgccagcactcggtctgcagtgcctttttggtcagccgcgcaatgccctgcgcgatctggtaggaatcacaggcgaaacgcgccttgcagtcgtttgtgcccagcatgatcgtcacggtgtcaagcggcgcatggctcatcaggatcgggttgatcaggcgcaggccgttcatcccctcagtgatggggtcatcaaacacggcggtgcggccgggcaggccctcctccgcaacggcccagccgggacccagcagagactgcagcaccatcgggtagcgttcatcggggccgtagcggccgtcacgcacggggtcgtagccgtaggtgttggaatcaccgaagcagaggacctgacgcgctgtgatattttcataggtcatggcaaaggctccttttgtcagcaaaaatgaaaagatatttcttttctcttattataacgattctaaaatggactgacaataggcaaaagcgctatttccaaccacccctttttgtacaacattgccctttcaaaggaaaaaactgcctgccgactgcggacagcgcgcggcgtgtgcaagggtttttctataaggaaaaatccgtttcacagcggtctgtgatggcaaaaaaccggcaaaaacagactttgtctggaaattgttttctttttgtaaccattgcggtggtgcggccaaaggggacttttcaccgctgcaggcggacatttcttgcacaaaacgctgcgttttg

SEQ ID NO: 14201 - DNA, 3666 bp, Unknown
  gut microbiota DNA sequence
attcttggtgatttcacatctggacaaaatgaaaaagattttctaaaatagagtcatcacaaggggcgcggacgcagcgaccccttacaaatgccgaaaggcaaaagaaggagaaccactatgaagaagcaagtatccgctatcctggctgccggtatggctgccagcctgctggttggctgcggcggcgctgcctccagtgcagcgtcctctaccgctgaaagcacctctactgccgcttccagcgaggctgccgccaccatggaggccggtcaggctgctgacatcaccctgtggacctaccccatcggcaagtggggcgattccgagtctgttgacactctgctggcggacttcaacgccaagtaccccgacatccatgtgactgttgagtatctggactacaccaacggtgacgatcaggtcaacaccgccatcgagggcggctctgcccctgacctcgttatggaaggtcccgagcgtctggttgccaactggggcgccaagggtctgatggtcgatctgagcgacctgtggaccgatgaccagaaggctgacatcagcgccagcgtggaggccgcctgcaaggattcctccggtgcttactacgagttccccctctgcatgaccgcccactgcatggccatcaacaagactgtgtttgaggctgccggcgcgatgcagtatgtcgatgccgagaaccacacatggaccaccgagaacttcctgaaggctgttcaggccgtctacgactccggcaagaccgatgtgggcgctatctactgcagtggtcagggcggcgatcagggcacccgtgctctcgtcaacaacctctacggcggcacctttaccgacgatgcgcacagcaagtacaccgcagactctgccgagaatgtcaaggcccttgaggccctgaaggcacaggacggcatcaacttcgacgcctccatcaacggcggcgaggagatcaccctcttccgcaacggcaccctgcagatggctttctgctggaacattgcccagcagaagaatgaggacaacggccctgccggtaccaccaacagcggcgatgagatcctgttcatgggcttcccctctgagagcggcaagcctgcgttgcagggcggcatctggggcttcggcatcttcaacaacggcgatgaaaacaagatcgctgccgccaagaccttcatcaactttatggccaactctgaggagactgccaaggccgtcaagacctccagctacttctccgtcaagagctctctgtctgacctgtatgccgacgacgagatcatgaacgagtaccagaagctgatgccttacctgggcgactactatcaggttacccccggctgggccgaggctcgtaccgcttggtggaacatgctgcagcaggtcggcgctgacgaggatgtcaccaccgccgtcaacgaattctgcaccactgccaacgcagccgccagtgcatcctgaaccaaactgtaaatcgtaagatctgcaaccaacctacggcgtccgacctctgacatgaaacgcagcggtgggacgccgctttttatgaaaaacggaaaggagagatcctcttggcattttctgcagctgccaaaaagagcgagcccaagatgagccgtgcgcttgtccggcaggagaccatcgccggttatctgttcctgctgcccagcctgatcttcttcgtcggcttcgtcatctaccccatgttcatgtgcgtgttcaccagcttcttcgactcgacgatgaaccgtgctgatgtctttgtcggtctggctaactatgtggagcttttccacgacaaggtgtttctgggcgcattgcgcaacaccctcatcattgttatcgtgtcggtgcccatcacctgcatcttctcgctgtgggtggcctccgccatcgtcaacatgcccccgtgggcaacctcgctgttccgcgtgatcttctacctgcccgttgtcaccggctccgttgccgtcacggtcgtgtggaagtggatgttcaacaactactacggcatctttaactatctgggcaagtcgatgggcctcctcgaccagaacatcaactggctgggtgatccccgctatgcgctgggctgcattatcctgatcctgctcacgacctcggtcggccagcccatcgtgctgtatgtctcggcccttggcaatgtggaccagtcccttgtggaggctgcggaggttgacggcgccaccaagctgcaggccttctggaagatcaagtggccgcaggtcatgcccactacgctgtacattctggtcatcaccacgatcaactccttccagtgcttcgcactgatccagctgttgacctccggcggcccgaagcatgccaccgacaccatcatgtactacatctactacaccgccttcaagctgtaccgctacggctacggcaacgcgatgggcgttatcctcgccattatgatcgccgtgctgtccgctgtgcagttcaaggtcacacagtctaacgagtaaggagggaaatcgaaatggaagcaacgaaaaccgctgcccctgctgcagccgagcagaccaaaaagaaaaagaagaagatttccccctacatggtgttcagcaccgtggtcatcgttgtgctggccatcgcgtttgcgttcccgctgtactggatcatcaccggctccttcaagacgcaggtgtccatcaacgccaccacgcccgagtggattcccagtgagtgggtcggcaccaactatgccaagctgttcagccgccagaaggcccccctgtgggagtttgccgtgccgttcagcagccacttcagcgccgacggcaaggatgtcatctggtgggcaggcccgcaggtgcccgccgctatccgctggctggtcaacacggtctttatggccgttgcctcgatgattttgacctgcgttacctccgccatggcgggctatgcgctggccaaaaagcgcttcatcggccgcggcgtgctgtttacgctgatcgtctgcgccatggccctgcccaagcaggtcatcctgatccccctgctgcgtgagatgagcagcctgcagctgtacaacacgatctgggcggtcatcttcccgatcgtgggctggccgttcggcatcttcctgatgaagcagttcagcgagggtatccccggcgagatgctcgaggctgcccgcattgacggcgccagcgagcttacgacctttacccgcatcgcgctgcccatcatcaagccgggcatcggtgcgctggcaatcttcaccttcatcaactcatggaacgactacttcatgcagctgatcatgctgtccagcaccagcaagctgacgatctctctgggcattgccaagctgcaggccgagaactcgaccgactacggtctgatcatggccggcgccgcgctggctgccgtgcctatcatcatcgtgtttctggcgttccagaagtatttcacaaagggcatcacaatgggtgctgtcaagggttaaaaaagccttcccccttggggggaaggtgtctgtggccccgaccacagacggatgaggggcagcctgctggggattgcccgcaaacgggccgtgtcagcaggctccgccctcatcagtcaccttcggtgacagcttccccctcgggggaagcctttatataaaataaaagtaaa

SEQ ID NO: 14202 - DNA, 3326 bp, Unknown
  gut microbiota DNA sequence
cattttaaaatccataccaagttacgaacagggagtgtttgtatatgaaagacatcaataagtaccgcggcattatccccgcattttatgcctgctatgcaccggacggctcgatctcgatcgagggcgtcaaggcgctgacccgccacctgatcgccaagggcgtcaagggcgtctatgtcggcggctcctccggcgagtgcatctaccagcaccccgatgagcgcaaagccgttctcgaggccgtcatgagcgaggcgaagggcaagatcaccgtcattgcgcatgtcgcctgcaacaacacggcggactcggtcgagctggccgcccacgccgagaagtgcggcgtagatgcgatcgccgccatcccgccgatctacttccatctgccgaactacgccattgccgactactggaacgcgatgagcgccgccgcccccaacaccgagttcgtcatctacaacatcccgcagctggccggtaccgccctgacgatgccgctgctgcaggagatgctgaagaaccccaacgtcattgccgtcaagaactcctcgatgcccacgcaggatatccagctgttcaaggacgccggcatcgccgcccgcggcgaggatggctttgccgtctttaacggccccgatgagcagtttgtctcgggccgcgccatgggtgccgacggcggcatcggcggcacctacgccgtcatgccggagctgttcatccggatgaacgagctggtcgagcagggcgatctgcccgcggcccgcgccatccagtacaaggctgaccgcatcatctacaagatgtgcgaggcccacggcaatctgtacgccgtgcagaaggagatcctgcgccgcatgtacggtctggagctgggcggcgtgcgcgccccgctgccgaacctgatccccgaggacgaggccgttgtggccgaggcgcagcgtatgatcgaggctgccgttgcagagctgtaaaggagtgcgggatgctcgtagattcgtttgattatattgcgtgctacaaggggctgcaccccaatctggacacagccatcgactggctgaacagccacacgctggatgcgctggagaacggccgcacgatcattgacggcgagaaggtctttgtcaatgtgatggacgccgacctgcgcgatgcagacggcgctgcgttcgagtaccaccgccgctacgctgatctgcagatcgacctttccggcggcgagcattggggctgggcatccgagggcaggcccgagggcgagttcagcaccgagagcgatgtgggctttgcgtccggcccggagcatgcgggcggcgagctgggagaggggcggtttgtcatcttcttccccggcgagctgcacaagcccagctgcaaaagcgaagactgcgaccatgtgagaaaagccgtggtcaaaattttgatgaaatagaaagtaatgcattgtggttctgtagggagcggtcttgaccgctccgcgggacattgcaccggccactgcgctcccgggtggcatgtatgccacccctacaagtaggggacgcatatatgcgtcccgggagctttgcggttgccgcgaacgggcacggaggggtcaagacccctccctacaatgcttacataagaaggagttaccaccatgacccacgaacaaattttcaaccaaatcaagggcggtcttatcgtgtcctgtcaggcgctggagcatgagccgctgtacacgaaggagggcggcattatgccgctgatggcaaaggccgccgcccagtccggtgcggtgggcatccgcgccaacacggtgcgtgacatcacccagatcaaggcggtcgttgacctgccggtcatcggcatcatcaaaaaggattaccccggcacgccgatgtacatcaccgttacgatgaaggaggtcgacgagctggttgcctgcggcgtggatattctggccgtgcagggcaccggtgcattgcgcccggacgggcagacgagcgcggactttatccgcgctatcaagaaaaaataccccggccagcttatcatggccgactgcgacaacattgagaacgccatggcgtgcgcggcggccggtgcggatttcatcggcacgacgatgcgcggctacacccctgagacgaagggcattgatgatgtggacttcggcttcattgcgcagctggcgcgcgaatgcccggccagaatcatcgccgaggggcatatccacacgccggagcaggccgtgcaggcgctctacgccggtgcgtttgcgctggtcgtgggcggtgcgatcacccgcccggccgagatcacggcccgctacaccgccgccatcaaaaaccacaaataagcaggtgcgctatgagtacaatctatctgggcgttgacatcggcggcacggcggtcaagctgggccttgtcgatgagaccggcggcgtgctgcgccgcgccgagcgcagtgtcagctttgacggctataagacgccgatccttgacacggtgcagcgtgcgatccgtgattttctggccgaggacgcaccgaagcttgcgggcatcggcgtgtccgccaccgggcagatcgacagccgccgcggcgtggtcgcggggacctgcggcaatttcccggggtggatcggcgttgacataaagggcacgctggagcgtgccttcggcctgccggtgacggtggccaacgatgccaactgtatgctgctgggcgaggtatgggccggtgcggccagaggctgcaccgatgttgtcggtgtgacgctgggcacgggtgtcggcgggggaatcctgaccggcggccgtttgctggagggtgcgcggggccttggcggtgagctggggcatttccggctgcacgcgctggacggcgtggcctgcacctgcggcgccatcggctgctatgagcggtacgccgccacgaccgcgctggtgcgcgatgcgcagcggatggggctggacgccccggacggccgcaccatctttgaggcggctgccgccggtgacgcccgcacacaggccgtgctgaatcactggatcaacgagatcgcacaggggcttgccgggctggtgcatatcttcaacccgcagctgattttgatcggcggcggtgtcagcgcacagcaggcgctgctgatcgacccactggctgaaaaggtgcgcaccagcgtcatgcctgcttttgccgaggggctggaggtcaaggccgctaccctgcacaatgacgccggtctggtcggcgcggtgtattatttccgggagatgcacgaaagataaaaagagagccttccccctagggggaagcccaggctgtcgataaacctaac

SEQ ID NO: 14203 - DNA, 7618 bp, Unknown
  gut microbiota DNA sequence
tattgctgaaaaaaccggctttatgacgaccgcgcatttccgccgcgtgttcaaggatgccacggggctttccccgcagcagtaccggcagtattataagagagcgaataagtaagaacagggaagcgctccgcaaggggcgctttttctttagggcaataccgcataattctaagtgccgcagccgccggaacggtgcttaagccgtaaggcgggaattatgcggtgttgccttaggcttccccatcgggggaagctgtccgcgcagcggactgatgagggcaaaccttgccgccgcagcccgtacacgggtaatagcggtacagtctcgcctcatccggcctcgggcggagcctcggccaccttcccctccggggaaggctctctatcatacaacccctcatcacccaatagaagggcaggggagtatagttttcaaaataaaggctgccccgtaccccttgaatgtggtacggggcagccgtgtgcctgaagaaattattcagcgctgcggggcggcatcagcccttgacagcaccggcagagataccatcaatgaaggcatcctgcgcgcagaagaaaacgaccagctgcgggatgatggagataagggagagagccagaatgcggttccagttgaagccgctgtcagcgtccatggacagcttgacgaagatggacatcgggtatttgctgggggtctggacataaagcaggggacccatgtagtcgttgcagctccacatgaactggaacagaccgcaggctaccagagaggggctcagcatcggggcaatgatcttgtacaggatcttgaccgggccgcagccgtcgatggcagccgcctcgtccagatcgtgggggatgctgcgcatgaactgcaccagctggtagacgaagtaggtctcggtggcaaacagggtcggcacccacaggggcaggtagaaggggctgttgatccagccgaaggagttgtacatcaggtactggggcacattcagaacgacctgcggcaggaacagggtggagatcatgatgccgaacatcaggtcgcggcccttgaacttaaagcggctgaagccgtaagcggcaatgacagagctgatgacggtaaagatgaccttggggataacgaagctgtaggtgttgatgaaggcgcgccagatgctgatgtcgccgccgtagttctggctgacggcgtcaatgtagccctgcagcgtggggttggcagtcaggaagccgatgccggagaagatctcggcgttggacttgaaggtggcgcccaccatccagaccagcgggtagatcatgataacgccgacaaggatcagcacaaagtactggaagaaacggccgattttatgggcggtagaaagtttcatttttcaatcctccttaatcagcgtagtagacccagtgcttctggctggtgaaagcgatcacagtcagcagagcaacggcaatgaacatgacccaggccagcgcacacgccatacccatctcattagacttgaaggcgtagttgtaaaccagcagggaaacaagcgtagtggcattgcgcgggccgccctgcgtgatgatgtaggggccgttgaattcctgaaacgcctgtgcaatctgggtgacaaggttatagaagataacgggggtgatcatcggcacggtgatcgagaagaactgcttggtcttggaggcgccgtcgatggtggcggcctcatacagatcggcgggaacacccttcagggcagctaggaacagcaccatggcggagccgaactgccacacacgcagcaggcagatgacgaacagtgcccaggtcttgtcagccagccagtcgggaccctgcacgccgaagaagccgaggatcgtgttgacaacgccggtgtccttgaacagggcgcgccacagaacggcgatggccacagagccgcccagaatagacggaatgtagtagaccgtgcggaacaggttgacgaacttgatcttgaagttcaggatgtaggcgatgaacagggcgaacaccagcttgagaggcacggtgatgaaggcgtacttcacggtggtcagcaaaacggagaccgtcttgcggctggtgaagatctccacatagttcataatgccgtactgactgatgcccttaaagaagttcaggtcggtaaagctgtagaacagagagcttgcaaacggataagccttgaagatcagaaagccgagaatccaaggaatgaggaagaacaggccggtgttttcgtcacaccagcgcttaaagggtgtgcgctgggtcgttttgggtgctgcagagctcatccaaaaacctcctatcactaattgctgtatagcgtttcaacataaagagccggtccccgccatgcctgagagcggggctgggaccggctggtattacctaaaagattttgccgttgctaagggatcaggcgttggcgctcagcacaccggaaacgccgtccagcaggatctcggcagcctcctcagcgtcgtagtcgccgtagctgaagccgtcgaacacatcggtgtagatgccgtcggtggtgtccttcaacttgctggactcgaagtacgggtcgagcggcatgtcaacgaaggccagaaccttggtgttggcctcgagaaccagaggcttcacagcgtcagcagcctgagcggcagccagaccggcggtggaggcggggatgccgcactcggagcccatgatggcagcgccctcgccgttccacaggaagtcgatcagggcagcagcctcaacgggatgctggcaggaggaggtgatggccatgcccatggagaccttggagaagccgccgttggccttgtcgccgaacttgatctcctcaccgacggtgaagccggagttgtcagccagagcagactggtacttgttggcggaagaatcccactcgaagatgccggcgtacttgccgtcgatccactcctgagacttatcaatagagtcgaagccggcagcgatcatggtcggacgggtggggatgacatggttgtcctcgagggacttgatgaagttcagaccgtcaacgacctcttcctcggtgtactggcactcgttgttctcgacccaggccttgccgtacttggactcaaggtagaaggtcatcaggatcatgcggtcatactgaccgatggccagaggatagtaatcattgcccagcttctcctgaaaggccttgccggcggcgatcagatcatcataagaggcgggaacctcctcaatgccggcctgcttgaaggtgttcatgttccagtagaagatacggccggtcatcgagatgggcacagcctgcaggctgtcggcaacgatgcaggcgttcttggcggcatcgctccactggctcaggtcgatgatgtcgctgtactcgcgcagatcgacgaacttctcacccgtggggctgtactggtacagccagttccagttgacctgcatgacatcagagccctgatccgcagccagcgcggtggactgcttctcttcccagccggaccatgcgccgtaggtgggggagacggtgatgttggggtacttctcgtggaaagcctccagagccttctggtaagcctcgtggcgggagtcgccgccccaccagctgatggtcagctcaatgggatcggtggtgttgatctcgtgggcctcggaagcggtaacctcagagctggcagcagtgctgtctgccgtgctggcggcctcgctggtagcagcgggggcgctgctggcggccgtgccgcagccggccagcagggtagctgccatggcggcggcaacaccgagagaaattgccttcttcatgtttttgtcctcctaatattgctgtgcgatgtattgacgcaggctgctgtgtgcgggaaccgcaccacaacatctgcctttcgcttgtctatatgataacaaaatgttcacgcaaaataaacagtcaaattggtgtgttcgcaaagaaaccgaacaaatcttgctttgttgcctgtaaccaatttgacaccaccgtcaaaatcaacgaatatcaacaacaccgtttgtgcagattgctacaagaagccgcgcggcttgctttgccttcctgccgcaagcgcgctttttcttacctgtcgaaatgcgcgggaaatcgcaaaaaatgcaggttttctgcaagaaaagtgcgaaattgcaaataatattgcatctaaatacgcgcggtgcaatatagttgcgcttttggcatccgcggcgctgcgcaggcaggctggcgtgatgggaccgcaatttttgtaccgctgtataacacaccgattttgcagtgcagatgactgtaaaacaagcgcataaaaaatcccgccgtgtgcagcggcgggacaaaatctgtgcggaatatcttatttgtgggggtgccgcgccagaaaagcacggtactcgcggtaccagcactgggggcaaaggctctgatactcgacattatccaccgtgtcgatggcgacctgcgcgccctcaaagacgaactcgccgttgaccttgcggccgttgcagatggccttgcgcccgcaggcacagatggttttcagctcctcgatcgtatgggcaatctccagcagccgggtcgagccgggaaagccgcgcatcatgaaatcagcccgcaggccgtagcagatgaccggaatgcccagatcgaccgtgacgagaaacagctggtcggcctgctcgggcgtgaaaaactggctctcatcacaaagcacgcaggcaattttgccgtgggcagcctcatcggcccggaccagctccgtaatgtccacctcgggggtgacgagctgatccaccttgcagcagatacccagccgggagacgatcgagtcctgcccctttgtgtcgatggcaggcttgaggatcagcacccgcataccgcgctctttatagttgtgggcgacctgcatcagggcagtggtcttgccgctgttcattgcgccgtaccgaaaatatagctttgccatgttggctccttatcggtttattgataaccgtaggggccgggcatgcccggccctcaaccttcccgcaatcgcgcgtcaaccagtaggctgagggccgcacatgtgcggcccctacaaggcggtctttttatagaaatatcacttttcctgatttctcagtctgtaccccaagctcatcaggctgtcgcccagatggacattctccaccgtgacatcgggatactcaacggacaggtcgtagtggctgaaattccagaagcccttgatgccctgctccaccagctcaccggcgagatccatagcactctggcgcggcacacagagaactgccacctcggggtgatgctctgcgcagaatttgtccagatcactcagaggcaggatgggaacgccgcacatctccttgccgatgaggtcggggttgacatcaaagacgccgagcagccggtagccgttggtgtcgcggctgatgaagcttgaaaccgccgagccgaggcgtccggcaccgaccagaatggtgggcagtctttcgccgtcaccaaagagcagcttaccgatctctgcgcgcagcacatccaccttgtagccgatgccctgctggccgaagccgccgaagcagttgaagtcctgccgcacctgactggcggtggtgcccatcatgtgggccagttcactggaggagatcttgtccttcccgtcagcggacaggttggtcagataacgataatatttgggcagccgcttgatcaccggaagcgacaccttattttggacagccatgatcgaatacctcttatctgtatttatcttataacttattataaaatgcgccgcgtcagttgtcaattttttgtctaagttttttgcgggatttctaaaatcttatagggatatacaaaacccatacaaagctttttggcggcatcgacaaacacgacttgcctattctgcaaaaccgtgcatattttgcctgccgggcggacagactttttctgtgtgcagctgtgcaaaaaaggagaatgaagatggaaacaaacgcagaaaagccaaaaagcaagcctcaaatcacaggaaacccaaccgaggaggccgctttaaagcggttagagcatgatttgatcaaggaggacggtattgtgcccgccacaaagggccgtcatgccatccactgcctgacggtgatcggtacgatcgagggacacagcatcgcaccggatgcgcaaaagacgacaaaatatgagcatgtcatcccacagcttgtcgatattgaggaggaccccgaggtcgagggactgctggtgatcttaaacacggtcggcggcgatgtcgaggccggccttgcattggccgagctgatcgcaggggtcagcaagcccagcgccacgctggtgctgggcgggggccactccatcggcatcccgctggccgtggccgcccgccgcagctttattgtacccactgcaacaatgacggtccacccggtgcgccattccggcatggtgctgggggtgccgcagaccctgcgctattttgaacagatgcaggagcggatcgtcggctttgtcgcgcatcactcgggcatcacggcccggcggttcacccagctgatgcacaacacaggggagctggtcatggatatgggcactgtgctggacggtcatcaggctgtggaggagggactgatcgaccagctgggcgggctggaggatgcactggcctatttatataaggaaatagagcagtgaaggcggaatcgtaggggcgcattctatatgcgcccggggagcttgcggcaagataaacatccacgggcggatatggaatccgcccctacataattttgttgcggcagcctattgcaatctacaatattatatgctatataatatataaccctatacaccatacacccggaaagggggcaccctatggccatcaacaccacggcggggctgctggatgccattgtgctggctgtcgtcgggcgggaggaaacgggcacctacggctataagatcacgcaggaggtccgcacggtactggacctgtcggaatccacgctgtacccggtgctgcgccgcctgcaaaaggacggctgcttgaccgtccatgacgaagccttcaatggccgcaaccgccgctactatcaaatcacgcccgcaggccgcgcacggctggcagagtttaccgccgagtgggaagcctacaccacaaagatcaacaagctctttaagggggagcagcaatgaaaaaatacgagtacttatccgagctggaaaagcggctgtctgccctgcctgctgatgcgcgccgcgacgcactgaattattatgaggaatacttcgacgccgcaggccccgacaacgaggacgctaccgccgccgagctgggcgaccctgccgaggccgcccgcaagattctggaaggggaggggctgacgccggaggccgaccctgccgcacccgagagcgcatgcggcggtgctgtgccgcccgccgccccggagccgcccgccgccgacccacagcccgcccggccccaaaagcacggtcccggggcaaaaaccatgtggatgattttcgccgttgtcattgttgcggcgcttctcattcagctgggcgtccttgtgctg

SEQ ID NO: 14204 - DNA, 1160 bp, Unknown
  gut microbiota DNA sequence
caggatgatgccggagatgatgatggctgcaaagccgatgaagtaagcagaggtggcgacccagctgctgccgccgaacagagcacctgcaatcaggccgatgatgggcatcttagcgccgcagggaatgaagcaggtggtcatgatcgtcatacggcggtcacgctcgttctcgatggtacgggaagccataacaccgggaacgccgcagccggtaccaaccagcatggggatgaagctcttgccggaaaggccgaacttgcggaagatacggtccataatgaaggcaacgcgggccatatagccgacatcctccagaatggagagcaggaagaacagaacgagcatctggggaacgaagcccagaaccgcgccgacaccggcaacgatgccgtccatgataaggccgtatagccagccagcaacaccgatgctctccagcaggccgccgagggcgttggggacgatctcgccgaacaggacgtcgttcgtccagtcggtggcaaaggtgccgatgccgatgccgccgtccgcaacggaggtacccatcgagatggcgtacatcagccacatgatggctgcgaagatcggcagggccagaatacggttcgtgacaatctggtcgatcttatcggaggcggtcaggttctcggtgcggggcttcttcttgacggccttgtcaacaacaccgttgatgtaagcatagcgctggttggtgatgatgctctcggcgtcatcatccatttccttctcgcagtcagcgatgtgggcatcaatgtggtcaagcagttccttgctgaggttcagctcggcctgcaccttgtcatcacgctcaaagagcttgacggcgtaccaacgcaggaaacggtcatcgaccttgccctgaatggactcctcaatgtgggcgatggcatgttcaacgctgccggtaaagacatggggcagctcgcccgccttgcccttcttggcggcggcaacggccagctcggcggccttgtcgctgccctcgttcttcagggcggagatttccacggcctcgcagcccagctcggcggagagcttcttcaggtcgatcttgtcgccgttcttgcggacgaggtcgatcatgttgacggccatgaccacagggatgcccagctcaatcagctgagtggtcaggt

SEQ ID NO: 14205 - DNA, 3390 bp, Unknown
  gut microbiota DNA sequence
tgttgaggatggcatcaggcttctcattaacgaggtagccgcgggcaacgacctcctccagcgtgtagggagacagcgagtagataccgggcaggtcctggatcacgacatcgttgtgacccttgagcttgccctccttcttctcaacggtaacgccgggccagttgccgacatattggttagaaccggtcaggctgttgaacagggtggttttaccgcagttcgggttgcctgccagagcaattttaattgccatgttggttatacccctttcttaaaaatgcaatcactcaacctcgatcatctcggcgtctgccttgcggacgctgagctcatagttgcggaccgtcagctccatcgggtcgcccagaggggccaccttgcggacatagacgctggtgcccttggtcaggcccatgtccatgatacggcgcttgacaggaccctcgccgtgcagcttggcaacggtgacagtctggccgacctgtgcatctttcagagtcttcatacttcgttcctcctcttatggtacaataaatcaaacagcctgcggctgagattcctgaatggggcggcaccgcacaattctaagcgctgacacggctgggattgtgcggtgtgtctttgttacgcaacgatgacacgcatggccagcgtcttgtccagcgcgatgcgggcctctttgacctgaatgatcaggttgccgctgatttcgctgacgatggtaacggtctcgcccacgacaaagccgagctcggccagatgctggcggacctcatccttgccggtgatcttctggatggtgacggtatcgcctgctttggacattgttaaaggcattccacacactcctcttttggcaatctgcaacatattagcgcacgctaacacatagggaaaaaacttgcggttagagcgctctaaccgcttacgaggatagtttagcaccgctaactgcggatgtcaagccgcaaagttagtgtagggtaacattttgtaagaatagatagttattgctaaccaaaatcgtgcaattttgcatagtttttaatgcgcggcgcactttactgcttgacagtcgtgcgcaggggcaggtagccagcatcgcggatcgcctgacgaatggcggcctcatcgggggcttccttggtcaggatgctcacctgctgtgcggccagatcggcggcagcccatgtgccgggcatcgcgttgagggcgttttcaacacggcgctggcagttctggcatgtcatgccgtccacacccagcaccagccggtgggggtagtggctgcggtcacggtcggccacccgcacttttttggcggcagcctcatgctccccgcagcagcccccgccgcagcgcaggtgatgtacaaagttgtagatgccgtagccgactgccgccgctaagagcagaacgataataacatttgccatagtgtaaaacctccaagttagttttttctaatttggcttagagtatactgacttatctccgctttgtcaagcaggcactttttgggtaccgcgcaaaaagaggaggggcagcactgcccctcccgtttatggatggataggtaatgtcgtaaaaaatcaggcgttggccagtgccgtacccaaggctgcgcaggcggcctcggcatcgccatcgggggagccgttggccatgaccggctcaacgaccatgcgggcaccagcagcctcggcatcctcggcccaggtgcggagccactcgccatcgccccagccgtaggagccgaacagcccaacgggcttgccgctcagcgagccgcgcagctcctgatacatcggctcaaactcgctctcctccagctgctcggcacccatggcggggcagcccagtgcaaagccggtgtaatcaccggcggaggcagtgttgaactcggacgcggtgaacttatcaacggaagcgccggcggcagccgctgcgctggcaaccagatctgccatggcctcggtgttgccggtgccgctccaataaataactgcaattttgctcatgataaaggactccttttcagataatatgtggcgcatcgtcaggcggctacggtcagccgactgatcgggatgccgttgtaatagcagcgggcgtagatacgctcgcactttttgtagcggtcaaactccgcctgtgcagcggtcgggtcggtgtagaccttccagtagccgcacgcggtaaagtttttgccgcggttctggataaacccgatgacatccgccagcggatagcccagaaaaacgccgatctcatgtggaaaatcctgctcacagcagagccgctcggccagctgtgccagcagctcgcccgctgtgccgggggtgtagccctcccctgccagaaatgccagcgtgcggtcatcggccaacagctttgccacctgcgcagggcggtagacatagacaaggacggcccctgtgcgcggacactgcttgagcacctgcacagtgaccccgcggggggacagctccgtatgccatgcagccgccatagcggcggcatcctgcccgggggcgggctggtaacgaaagagactggcgggcttgagccctgccagtgtgggggcgcacagcgtggcaagatcacaggcgaagctgcgcggacttggggtagcgtaggtgcgttcctgcatgagatggctccttaccgttatgatagttagcatttactaaccatgcgccccataaaaccgcccggcacggggagagaaccgcgcagggcgggctatgaggcaaattgaaaatttgcaaggttagcaataactaacatagacaatatagcatgaagaacgcgacctgtcaagggtaattttcatgggactgtcatgtttataaaaatataacctgtcatcgccgagaacagaagtgcggggagcgagcgctgtgcgcccctgcagagcatttttcggcaggctcacgcaggcttaataattgctgcttttcagctcaaaatagctctgcggatgtgagcacaccgggcacttgaccggcgcgtgctggccgatatatacgaacccgcagttgtggcactgccagacctgctcggtctcgcgcgcaaagaccttaccggcctcaatgttggcggcgagagccttgtagcgttcctcgtgctccttctcaatcgcggcaaccatggtgaacagcgctgcaatctggttgaagccctcttcctttgcttcggcggccatgcggggatacatcgaggtatgctcctcgttttcaccggccgcagccatcttcaggcaggtcagcgtgtcggggatttcaccgttctccatcaacagcttaaaccagatcttggcgtgctccttctcgttgttggcggtctcggtgaagatggcgctgatctgctcatagccctccttct

SEQ ID NO: 14206 - DNA, 5669 bp, Unknown
  gut microbiota DNA sequence
gaaggcttttcaacgaaaaggagtctacaattctatgtctaaaaaacctgttatgctctgcatcatggacggcttcggctggacaccggatgagacctatggcaacgccgtggccgccgccaacaaaccgaatctggacaagatctttgccaactaccccatgaccaccatcgaggcctccggcatggctgtcggcctgcctgacggtcagatgggcaactctgaggtcggccacaccaacatgggcgcaggccgcatcgtctaccagcagctgaccctcatcaccaagtccatcaaggacggcgagatgctcaagaaccccgtgctggtcaagaacatgaaggcggccattgacgccggcaaggccatccacctgatgggtctggtcggcaccggcggtgtccacagccatgctgaccactggttcggcgtgctggagatggccaagcagatgggcgcaaaggatgttttcctgcactgcattatggacggccgcgacaccgacccccacagcggcaagggcttcctggctgacctgcaggccaagctggacgagctgggcatcggcaagattgccagtgtctccggccgttattacgccatggaccgcgacaacaactgggaccgcgaggagaaggcctacgccgccttcgtctacggcgagggcaaccacgccgccagcgctgccgaggccatcgaggccagctacgcggccgatgtgaccgatgagtttgtcattcccgttgtcacctgcgagggtggccgcgttgaggatggcgacaccgtcatcttcatgaacttccgccctgaccgtgcccgccagatgacccgcatcttctgcgatgacgccttcaccggctttgagcgccgcggcggccgcaagcaggtccactatgtctgcatggcggagtatgacgccaccatgcccaactgcgaggtcgcttacccgccggttgagctgaagaacacgctgggcgagtatctggccgccaacggcaagacccagctgcgcattgccgagaccgagaagtatgcccatgtgaccttcttcttcaacggcggtgttgagcagccctgcgagggcgaggaccgcaaggtcatccccagcccgaaggttgccacctacgacctcaagcccgagatgagcgcctatgaggttgctgacgagtgcaaggcccgcatcgagagcggcaagtacgatgtcatcatcctgaactttgccaactgcgatatggtcggccacaccggcgtctttgatgctgctgtcaaggctgtcgaggccgttgacaagtgcgtgggcgaggtcaccgatgccgtgctgaacgccggcggtgtggtgttcctgaccgccgatcacggcaacgccgagaagatgaagaaccccgatggctctcccttcaccgcgcacaccaccaatgtcgtgcccttcgccgtcatcggcgcaggcgatgtgaagctgcgcgagggcgggtgcctcgcggacatcgcccccaccatgctgccctacatcggcctgcccgtcccggcagaaatgaccggcaagagcatcatcgagtaattttacacccaataccccgcggcaggcttttggcctgccgcttttttgtgggaaatgtgagggacggtatttaccgcaaacaacgcagtaggggcggggctctgctccgcccgcggaagctgcccggcagcacccgcctatgggaaagcctgcgggccaatgcccaagcacaacagccggtacccgccctctccgcttttatcttgctattttccggcaaatgcggtatagtagtcttacggaaaacctcttttcaagagaagcattccaccaagctgtaaattgaatctgtctgcaaaactgactgcattatcaaataaggagtattcttatgcgttactgcaaaaaatgtacgatgcccgacacccgccccggtattacctttgatgccgagggcgtctgcagcgcctgccgccactatgaatcccgcaaaaatgtggactgggacgcccgctttaaggagtttgaggcctactgcaacaagtaccgcggcatgaatggccccggcggctatgactgcgctgtggcagcctccggcggcaaggacagccactttcaggtctggatgctcaaggaagtcatgcacatgaaccccatcctcttcacggtcgaggataacttccccatgacgcaggccggcatccataacctgaaaaatatcagtgaggaattcggctgcaccatcatctcctgcaagcccaacatccgggcgcagaaggcgctgatgcgcaaattctttgagaaatacggcaagccgacatggtatgttgaccgcctgatctacaccttcccgctgcacatggcggccaaattcaacacccctatgctttgctacggcgagaatgtcagctttgagtacggcggcaacgccgacaaggagacctactccgccatgggccagatcgagaacggcgtggccgtgggcatgccgatggaggagctgctgggtgacggcgtgaccgaaaacgacctgagcctgacgctggcccccagcgccgaggagcgcgccaagctggacccgttctacatgagctattttgtgccgtggaacagctacaaaaactaccagatcgccaaggcgcacggcttccacgacctgacccatgagtgggaccgcacccaccatgctgagaatttcgaccagattgattcccgcgcctatctggtacacagctggctgaagtacccgaagttcggccacgctgctgcaaccgactacaccgcccgctatatccgttacggcatgatgacccgcgaggaggccatccccgtcatcaaggagcgcgacggcaagctggacccgctgtgcgtgcgtgatttctgcgacttctgcggctataccgagagcgagttctgggccatcatggacaagttctacaaccgcgacctgttcgagaagaatgactgcggcgagtggcagctcaagcatcccatctgggaggagaataaataaatggtacgacatgttattctttggaagctgaaggagatgcccgacaccgagaaggccgccgtcaaggccggcatcaaggcagggcttgaggggctggcaggccagatccccggcctgctggaggtccatgtctacaccgaggcgctgcccagctccgcgaatgcggacctgatgctggacacgaccttcaccgatgccgaggcgctgaagggctactcgacccacccggcgcatgtcgctgtggcggacggcaaggtaagaccgtacaccgcggtaaggatgtgcttggattttaacgtgtaagtaagcagaaaataaactgtaggggcggattccatatccgcccgtggatgcttccgcagccgcggactctgcgggcgcatatagaatgcgcccctacggtataacggaggaataaccatgaccaccctcatccgcggcggcctcatccatgatgccgtacaccgcgatgcgtataaggcggatattctgctggccgacggcaagatcgccgctgtcggcagcggcctgacggtcccggcggacgccgctgtgtttgacgccgacggccttgatgtattccccggctttgtcgatgcccacacccacatcggccttgacggctatgggatcgggtacgagggctgcgactacaacgagatgaacgacatctggacgccgcagctgcgcgcgattgacggcatcaacccgcgcgacccctcgctggcggacgcgcggcgggccggtgtgacctgcgtctgtaccggtccgggcagcgccaatgtgctgggcggcacctttctggccatgaaaaccgtgggcgatcgcgtggacaaaatggtcgtgcgcgacccggttgccatgaaatgcgccttcggcgagaaccccaagcgttgctaccgcgacaagtgcgattccacccgcatgtccacggcggcgttcctgcgcggcgcgctgatgcaggcgcgggactacggtgcccgcaagcaggcggcgaacggcgatataaccaaaatgcccgcctacaaccaaaagctcgaggccctgctgccggtgctggcgcgtgagatccccctgaaagcccacgcccatcaggccaacgacatctttacggcgctgcgcatcgcgcgggagttcaacctgcgcctgacgctggagcatgtaaccgagggtcacctgattgtggacgaactggcaggggagaaggatgtgccgatggcggtcggccccagcctgacctttgccagcaagtttgagctgcagaacaaatcgtgggcaactcccggcgtgctggccaaggcgggctgccatgtctccatcatcaccgacagctcagtcattccgcagcagtatctgccgctctgcgcgggcatggccgtcaaggcgggcatggacccgttcgatgcgctgaaggccatcaccctcaacccggcggagcatatcggcgtagccgaccgcgtcggctcgctggaggtgggcaaggatgctgacctcgtcatcaccgcaggcagcccctttgaggtgctgaccgaggtaaaggcagtctttattgacggggcgcgtatcgcggagtaattgcgtacagtgtggcatctttaagcaagccgtaccaactctgcagaaacctccccggcgttggctattaaatagcggcacatctccgtccgccatcgcccaaaggccagcaattcctcatccccggtctgtaaatactgtttgtacccataagtgctgctcaaaagctggtctaaatacagatacggcatataccgcaggtcgtccatgctcacttcggcgtacctgcggtattcgtttgtgtaggcggccagtcgtgccgcattgaacgtgcagtccatgtagctgtatgaccgtatcagttcccacgcaatcggtacttctccggcgttgacaaaatccagcacggccttgatctctgacccgtcatacagcagctgcattacgctgtaatcgccgtgagagcgtttgagggtcagggcgtttgtgttcacaaatgcacccgcatcggacacacgggcaatcattacaaggcggtcctgcaagtcgcggcagatctctgctccgtgtacggcatcggcgtgggctgctgccatcaagtccgcgcaggcggctttggcctgcagcagccgcgctgcgctgccgtatctggaaatctcacagggtaacagatcatcgtaggggtagtgctctaaggcatttacaatttgcgccaacagtctggcggagtcgagcagcccccttttggaacagcagcccttttcccgtgtttgcccgggaataaatgcctgcagaatggcgatgcggccgttctgcataaagtagaagtctccgtttcggcagggaatgtactcgggcacagaaatcccgttctggcgcagaaaatctgtgacatgtacctcccgcaaaatgctgtccgcgcggaacttgggttgaaacacctttaaaatgaaggctgcctcgctgccgtacagcttaaaaagcgctgcactgcctcggtcaatgcgctccactgcccgcacggcaaggccgtagtgctgccggacggcggcacaaatttcagggtcggtcatgaaggacacctcgctttctgtaaatggacggtggaaggctcagcccgataccctgcaaaggcgggggggg

SEQ ID NO: 14207 - DNA, 10757 bp, Unknown
  gut microbiota DNA sequence
ctgtgctataatacccacatacggcaaaggcgccgtctgatagcattgctatcggacggtgccttttttattttgtacagagccgattggagtgtaaagaatatggaaaagattccccgtcatgtggacattgattacagtaaatacgcccccgacatcccggaggataagctcgaggcttattacggcttgcccagacatgtgcagttctgcaaagagtgcgtgatgagcaaccagaagccgaactcctgctatgagtttgagcatacgatcaaatccatcaagaaaacgatggtcatacaggaggatggcgtctgcgatgcctgccacgcctgccacaacaaggccaacggtcatattgactgggcgctgcgcgaaaaggagctgcgcgagctgtgcgaccaataccgcaaaaacgatggcagctatgactgtctggtgcccggctcaggcggtaaggacagtttttacgccgcccacctgctgaaatacaagtacggcatgcacccgctgacggtgacttgggcgccgcacatctacaccccgtgggggtgggacaatatgcaggcgtggattcatgccggctttgacaactacctgtgtacccccaacggcatgacccaccgcctgctgacccgtctggccacggagaacctgttccatccgttccagccgttcatcctcgggcaaaagcagcttgcaccgaagatggccgcgaaattcggtattccgctggtgttctacggtgagaacgaggcagagtttggcaaccccatcgccgacaacaactccgcgctccgcgatgagcatttctttgccgtgaacgactacgaccacatttatctgggcggcgtcagtctgcgccagctggaggaggactacaaggtggataaggccgaccttgccatctatctgccgagtgagacctccaaccttgagaaaaaccacattcaggtgcggtatctgggttactacgaaaagtggcatccgcagggcgcctactattacagcgtcgagcacggcggcttccgccctgcaccggagcgcacgcagggcacctactccaagtacaactccattgatgacaagatcgacgatttcttctactacacgacctacatcaagtacggcatcggccgcaccacctacgatgccgcgcaggagatccgcaacgaggagatcacgctggacgagggcaaggcgctctgcaagaagtttgacggcgagtaccccgaccgctttgaaaaagaaatctttaagtatctgtcgctggatcgccagcatttcccgtgggccagccagctgtttgagcagcccaagatggaccgcgattactttatggatctggccgaccggttccgctctccccacatctggaagtgggaagacaacatgtggaagctgcgctacaccccctacgagggcgacagcgaggtgctgtggggcgacccgagaggcacgcaccacgaaatgtgagacaaggcttcccctgcgggggaagctgtccgcgaagcggactgatgaggggtggactttccgcggcagcttgtttgcgggcaatcgcggcacacgcgcccctcatccgacctcgcttcgctcggtcgccttttccctcgggagaaggctttaacgaggttcatttatgcaaaaaaaaatacgactgatcgcccgtcttgatgtcaaagacaccaaccttgtcaagggcatccagctggaggggctgcgcaagctgggcgacccgaacagctttgcgaaagcatactatgagcagggcattgacgagctgctctacatagacattgtggcaagcctgtacaaccgcaataatctgagtgatattgtgcgaaaaacggtcgatgatgtgtacattcctgtctgcgtgggcggcggcctgcgcagcgttgaggatgtgcgccacatcctgtcgatgggggcggacaaggttgcgatcaacacagcggccatcaagcggcctgcgctcatcaccgaggtggccgaggcattcggcagccagtgcatggtgctgtccattcaggccaagcgcagccgtacatggcctggcaagtgggaggcctactacgacaacggccgcgcacactccggctacgatgtggtcgagtgggccaagcgcggtgtggcgctgggcgcgggcgagatcctgctgaccagcgtggactgcgaggggctgcagcagggcatggatctggagcttatcaaggccgtgaccagcgctgtgaatgtgccggtcatctgcggcggcggtgtgggctgcggcgatgacattgtagatgctgcgcaggccggtgcggacgccgtggcctgtgctgcggtgctgcattaccaaaaagagaccgtgcaggagctgaaggatgacatccgcgcgggcggtgtggaggtgcgtaaggtatgaaggtgacgatcattgattacggcctgtccaacctgctcagcgtgcagcatgcctttgcacgcttcggggcacaaacgctgctgacgagtgacccggcggaggtgctgcgcgccgatgcgctggtgctgccgggggtcggggcgttccgggacggcatggccgggctggaaaagctgggcctgatcgagccgatccggcagaaggccgctgccggtacgccgctgctgggtatctgcctcggtatgcagatgctgtttgacgagtcggaggaatttggcctgcacaaggggctggggctgatccccggccgggtagtcaaaatccccgacactgatgcggacggcagcccccagcgggtgccgcacatcagctgggagccgctctatcccggcgggggccgcgctgattttgccggtaccgcgctggcgcagctgcgcgcaggggaggagtgctatttcatccacagctatgaggcaaagcccctgcagggcgcggactgtctggcctacacgacctacggcgggcggcagatctgcgccgccgccacccacggcagcgtcctcggctgccagttccacccggaaaagtccggggaggtgggactgaaaattattggggagtttttgaagtcggccgaacggtaggggccgggcatgcccggcccgcggctttcccgtaaaagcccttttgccgtaccgtggagggccggacatgtccggcccctacagagcaatcatctgcaacgccctgcgcgattctgcgcagggcgttgctttttccgctgcgatacgctataatgtattttgtataaatgtgcaaaggggaatgaaccatgtccgttgatctgctcgtcggctccacagggttcgtggggggcaatctggcggcaaagcatacatttgccgcagcctgccacagcagcgatattgccgcgcagtacggcacccggccggaactttgtgtctacgccggggtgcccgccgccatgtttctggccaacgctgacccggaggctgaccttgccgtcatgcgcgccgcgcgggaaaacctgcgcaggatcgcgccgaaggagctggtgttgatctcctccatcgccgtctggccggacagccgcggcaaatatgaggacgatacccccctgcctgacgggctgcccgcctacggcaaaaaccgcctgcagctggaaaactgggtgcgcgaggatttccccgaggccctcatcgtccgtctgccggcgctctacggtgcggggctgaagaaaaacttcctctttgacctgcacaccatcaccccggccatgctgcgaccggataaatatgacgaactggcgttgaaatccgaccttgtcaagacggcgtacacgctggcggacaacggcttttacaagctgaacggcacggccgaccgcgccgcgctcaggcagttctttgcacacaacgactttaacgcgctggcgttcaccgattcccgcagccgctaccagttctacgatctggggcgactctggtctgacatcggcagggcccgcgccgcaggtataaaaatgctgcacctctgcacgccgccggtttcggctgccgaggtctacaccgccgtcaccgggcaaaccgactggcacaatgaactggccaagccgccgtttgactacgacctgcgcagccgctatgcacagctgctgggcggcagcggggcgtatctctgcaccaaacaagaggaactggacgatattacgcgctttctgcgcgactggagggattgacccatgccgaactatcagctttccatctccaacattgcatggcataaggaggatgacgaggcggtctacacagccatgcagcaggcaggctttaccggtctggagctggccccgacccgcattttctccgaaacaccgtatgagaacctgacgagcgcgctcttgttcggcggttacctcaagaaccgctggggcttctcggtgcccagcctgcaaagcatctggtacgggcagcagggcaatatcttcaacgccgccgacactgagccgctgcttgactacacggcgcaggcgttccagtttgcccacagcctgaactgcccctcgctggtgttcggctgcccaaagaaccgtatgcgcccgctgggcggcagcgatgccacggccgaggccttttttgtgcaggccggcaaccttgcggcgcggtatggggtgcatctggcgctggaggccaaccccccgatgtatacaaactatctgaacaacacggcggacgcctttgcgctggtcaagcggcttgacaaccccggcctgtccgtaaacctcgacctgtccaccgtgctggcgcagggcgaaaagctgcagagctttattgacgacatgcagtatgtcagccatgtacatatcagtgagccgggtctggcccccattgagcgccgccccgagcataaggagctggcactgctgctgggtgcggtgggctacagcggctttgtctcgatcgagatggcccgcaccgaccttgacacggttcgccgcacgatggactatatcgcggaggtgttcgcatgatcgaatatgagcgcagggagctgaacggcgtgccggattttaccgccgccgagtttgagggccgccgcagcgattactgcctgctgatccccgttatcaacgagggcgcccgcatcctgaccgagctgggccgcgcccagacagcgggcatcgaccgcgtgtgcgacattgttatctgcgacggcggctcgaccgacggcagcatgaagcacgacacgctgcagctttaccatgtgaacacgctgctgaccaagaccggccccggcaagcagggcgcacagctgcgcatgggcatctattttgcgctggatcgcggctacaagggcatcctgaccatcgacggcaacaacaaggactcgatcgaggatgtgccggagtttatcgccaagctgcaggcaggctatgaccttgtgcagggcagccgctttatccgcggcggtcatgcaatcaacacgccgccggtgcgctatgccgccgtgcggctggtccatgcgccgcttgtcagccttggcgcgcaccagtggtttaccgacacgaccaacgcctaccgcgcctacagccgcgagtatctgacccaccccgatgtccgcccgctgcgcgatgtctttgtcgggtatgagctgctggcgtacttaagcatccgcgccacccagctggggctgaaggcctgcgaggtccccgtgacccgcgcctacccggccaccggcaagacccccaccaagatcaccggcttcaagggcaacagcgacctgatgaagatcctcctcaacgcccttgcagggaagtataatccgtaaatgaaaaaggggaacgctctatgacctacgacaaaatcatcctcggcgcgggactgtatggcttgtatgcggcgcagaaatgcggcgcggcgggccagcgggtgctggtgctggagcgcgaccccgccccctttatgcgggcaacctacatcaatcaggcccgcgttcacatggggtatcactatccgcgcagctactccacggccatcaagtccgcccattattttgagcggttctgccgcgattacggcttctgcctgcatacggaatttgatcaggtgtacgccacaagcgcccatttttcctggacgaacgcggcggagttccgccggttctgcgcagcggcagagatacgctgtgacgatgtaccgccggaaaagtactttaaccccggcctgtgcgatggcgccttcctgacgaccgagtacacctacgatgcgcaggtgctcaagcgctggtttctggaacagctggcggcgctgcccaatgtcgagatcctctacagccgcaggccggaccgcatcgagcaggccggcagcgtgtggcgggtcacggcaggggagtacacggccgaggcgccctacctgctcaacgcgacctacgcgggcgtcaacgacatccatgccatgctgggactgccgcccttcggcattaagtacgaaaaatgcgagatcattttgtgtactgttgacgaaaaacttcggaacaccggcatcacggtcatggacggaccgtttttcagcctgatgcccttcggccagaccggtctgcacagcctgaccagtgtgacctttacgccgcatgagacaagctatgacagcgtggcagccttcccctgccagaaggagagcggcggccgctgcacccccggcagcctgtacaactgcaacgagtgcccggccaagccggccagcgcatggccctacatgagccagcttgcccgcaaatatctgaaggaagaatacggctttgcctaccacagcagccttttcagcatgaagcccatcctcaaggccagcgagatcgacgactcgcgcccgacggtggtccgcgtgatgaacgaggcccccaagctggtcagtgtgctgagcggcaagatcaataccgtatatgatttggacgaggtgctggaagtatgaatgcaaaagagaaaaattttatttcggcggtcgtctatctgcataatgacggcgaccgcgcggtcgcgttctgccgcgcggtcgcgtccgagctggacgcccactttgcccagtatgagctggtggtcgtggacgatgcctgtaccgatgacaccgtggcccgcctgcgggaatggggccgcgagcagaccgccccgctgacgatcctgcacatgagcctttttcatgggcttgaggacgccatgaatgcgggtctggacgccgccatcggtgattatgtgtatgaatttgactccaccgagctttgctacccggcgtcgctgatctttgaggcgtaccgcacggcgctgaccggcagcgacatcgtttccgtctgcccgcgcaccgtgcgcggcggcagcagcctgttttataagctgttcaacgccaactcccaaagcgcctatcagctgcgcaccgatgcgttccgcctcgtcacccggcgggccatcaaccgggtccatgcctccagtgcgcacctgccctaccgcaaggcggcctacgcggccagcggcctgaagatgaccgatcttgaatttgacggccagctgaccgtcaagggcagcggccgcttcaatctggccgtggacagtctggcgctgtacaccgatttcggcttcaaggccagcatgacgatcaccctatgtatgctggcgctggcgctggcagagctggtctacaccctcatcatctttgccacaggccacccggttgccggctggaccacaacgatgtttgtcatcactgtgggctttgcagggctgtttgccgtgctgaccatcgtggtcaagtacctctgcctgctgctgaacctcaacttccgccagcagaagtatctggtggagagcattgaaaagctgcagaaataacgcaggaggaattttgcgatgaaatgtaaccgtccgcggccgtcccgccgcacattctgggtgctttgcgccctgctggtctgcctgcgcctgacgctgacgggctttcagcaggcgtacatctgggtgggcggcgcaccgctggacgatgagctgatgttccgcgccgccaacagcattacggccgggcaatggctgggggcatatgattatctgaccctctccaaggcgatgttcttcccggtgtggctggcactgctgcatgcgctgcacctgccgtatttgatcagcggcgcggcgctctggtgcggtgcggcgctgacggcggcgttcgcgttttcgccgctgtggcgcaaaaaagaccccgatcagggccgcgtgctgacgctggcgctctttgcggtgctggcattcctgccgtccagctgggcgtcctacacgctgcgggtctaccgggacaatatctttccggcgctctgcctgtacttttttgcgggtatggcgggcatggccctgcgcgccgtgcaggaaaagcccgtgccgctctggccgtggctggctgcggcgggcgcgggccttgcctgcggctaccttgaccgcgaggatgcggggctgtttttgctgccctttgctgcggctgccacggtgatcgtggcggtcgtgctggcgggcaagcgccgctggaaagcgctggccgcgcagctgataccgtatctgatgcttggcgcgggggtgctgaccttctgcaccctcaactacacgcactacggcgtttttgcgctgtcggatttctccgagggctcgttcgctgccgcgatgggcgcgatgatgcgggtcgatacggacagcgacaagccgtatttgtcggtgcccgccgatgcgcgcgagaaaatctacgcagccgtgccggagttggagccgctggcctactggctggaggaggacgaccagctgcaaaatgacttccgcgacccgggtctggacgattaccgcgcgggcagcttttactgggccatccgccgcgccgcgcagcttgagggcatttataccgacgcccagacggcggctgactattggcagaccgtggcagacaaaatcaacgccgcctgtgacgcgggcaccctgcccagccgcaccggcaagcgcaccgcgaccagccagcccatcaaggcggaatatgttcccgccaccctttccgagacatggcacggcctctgccatgcggcagggctgcgcggctgtgcgccctatgaggcactgcgctcgatcggcacggaggaggactttgccgcatggtccggctacctgcactgcggctttaacagcgctgccgaggccggcaaggatacgccctattacagcctctggcaaaaggcagtctttgccgttatgcaggggtgggcgtgggtgtacagcatcctgctcacggtgggggcggtgtgcgcactgttcttccacctgacggaacttttgccatggatacgcaaaaaatgcacggcgcaaacggtcgtgccgtggctgctgctgtttggcattttcggcatggcgctgctgcgctgtgccatgatcgcctttgtcgaggtgtccagcttcggcatcggcaccagcacgatgtaccttgccacggtacacccgctgctggttttgtacgcatttgtcgggctgtttttgtacggcaggccgctgaaaagaaaggaaactgcatgacggatctactggtcatcggcggcggtgctgcgggcttgatggcggcgggcgctgcctgtgcccgcggccttaccgtgaccgtgctggaacacaaccccaaggggccggggcagaagctgctcatcaccggcaaggggcgctgcaacctcacaagcgacagcgatgtacgggagtttttaccctatgtgcgacgcaacgggcggttcctctattccagcctttacgcattcccgccgtctgcggcgatggagctgtttgaaactctcggcgtaccgcttaaaaccgagcgcgggcggcgggtctttccgcagtcggatcgcgccgccgatgtgctggcggcactgcgcgactatgcccgggacgctcagcttgtgcgcggcagcgccaaaaagctgctgattgaggacggcgtctgcaagggtgctgtcaccgaccggggggagacataccgcgcagcgcatacgctgatcgccaccggcggcatcagctacccggtcacgggcagcgatggcagcggctacaagctggcgcggcaggcggggcacaccattgtgccgccccagcccagtctgtgcagccttgtcagcccggacccggcctgccgccgcatgatggggctggcgctgcgcaatgtgacgctcacgctgctctgcgatggcaaaccattgtttaccgagcagggcgaggcgctgttcacccactttggcctgtcggggccgctggtgctgtcggccagcacctacattgaggatataacgaagcatcgctatatctgcgagtttgacctcaaaccggcgcttgacgaaaagacgctctatgaccggctgacccgcgactttgccgagcagggcagccacagtgcgcagggcgcactggcaaagcttttgcccaactcaatgcgccccgtggccgtggaaaagtggggcgttgaccccgccaccaaggccgcccagatcacgcgcgagcagaagatggcgcttgtgaacctctgcaagcactggcaggtgccggtgaacgcgctgggggacaaggaacacgcggtcatcacggcgggcggcgtggatgtgcgcgaggtcgatcccaagacgatggcaagcaagctctgcgaggggctgtactttgccggtgaggtccttgatgtggacgcccgcaccggcggctataacctgcagattgcttgggcaactgcgcaggcggcggtgcgggcgctgtaaccccaagccttcccccgacgggacagactcc

SEQ ID NO: 14208 - DNA, 3420 bp, Unknown
  gut microbiota DNA sequence
tgttgtggataacaaagagggctatcagggggacaccagccatcggacgcagggcaacggcttgggccttgccatggcacaaaaaatagccgccctgcacggcggtgctgtcactgtagacagccgccccggcagcggcagctgctttacggtagctttgaaataaatatggtataaggtcggttcagatcagcccatgggctgtgcagtattgccagataccatcctccgccacgcttgggcatactgcatcggccagcgccttgagctcgggggaggcattcgccatcgccacgccggtgccgaccgcgtccagcatttccaggtcattgttgccatcaccgaaggcaagcgcctgacttttgtcaagaccatagtaggccagcacctttttgataccgatgcccttgccgccatcggccgggatgacatccaccgcacggtcccaccaggctgcgatcttagccccgcccaccccctgcagaatagcagggtagtccttggcgcggcagcccagcataagctggtaaaccgactggcggcataccgcatcaaagtcagcggtcaggtcaggcttttcgttcgcaatggcaaaatagtctgccaaatcagtgtcggtgccgttcgcagctatgcggtcccgggtggccgccgccaccggacggcccagtgatgccgcattctggatcaggcgctgcagatcagcgccgttgatcgggcggctgtagatcgtatcagcccccgcatagcataaagagccgttgaaggtcagataggcgtcaaactccaccccaccgaaatccggcagcgttaccggcgcgcgccctgtggcaatgcacaggcggataccgttggcccgcaggcggtggagtgcttccaccgtgcggggggagatgtgcttggactgcatgtcgatcagtgtgccgtctatatcaaaaaagatgatcttgatttgctgcatacgggcttttcctttctgtgccggttgtgttttttccagtataccataaaagctgcacacaggccatcaaatttcccgcaggatcacagcacaatcccgccaaaaaagcgccgccccttgccaaaaggggcggcgcacggtctgggccttacagcagcccaacatatttattatatcattttctgcccggagcggcaagattgaaactgcacaaatctttcgctgcatcgttggcatatctgcgaatagacgaatcccaagggctgtggtatagtatagtcacagaaagaaaacagccggagataaggagcagacaactccaagagacgctgattttccaaggagaaattccataggaaatctccaaagaaaacaagacgccggcggtatttcgtagggaaggaggctcaagtccaatggcaaactttaaagatcctattcatcaccggcgggcctgggcctgctgaatgaaaaagcgccgcatccgaagccgcaggtcataacctgaacaaaacatattgaacgagatgtcaggcagcttacttttaaacagcagactcaggggccgtcaacaaagacccccatgcaacatatagatcaggatgaaagaaggctggttatcatgactggttccacgccacccaacagaggttatctgaaatccacctgatccataaggagaaactccaatgtactaagtgtcagaggttgatcctcaatctcaaagcctgaaattctgcaaagggaatgattccccatgaaaataggaaccaactccgaaaaataatgaataaaggttatgaggctatgactccaatcatttaggtactgccggggcgaacgaaaagttcgccccggttttgtttgtgccacaatctccggttcatgtacagcgttcatgtacagcaaactcaagcgcacagacttgcattttcttccggattttgttactattgctataagtatgattattaacaggattaaaggagataaatctgcatgagcgtaaaaacggtttcatcgcaggctgatgctgccaacccgcttggttatgaaaaggagggcaagctgcttgtcggctttgccattccctgcattatctcgatgctggtgacggcactgtacaacattgttgaccagatctttatcgggcagggtgtgggcctgctgggcaatgctgccaccaacattgcgtttccgctctcgattgcctgcacagccattgcgctgctgctcggcatcggcagtgcgacaaatttcagcctccagctgggtgccggcaatgaaaagcgctctgctgaatatgcaggcaacggcctgtgcctgatggcgctgtttggcaccgtgctgatggcggtcacgctgctttttctgacgccgatgctgaaatttttcggcgctacgccggatgttttgccctatgcagaggcctacacccgcatcacagcgctggggtttccgttcctcattatgaacaccggcatgagcaagctgattctggcagacggcagcccgcgctattctatgatgtcgatgctcatcggcgcgctcatcaatacggtccttgacccgctgttcatttttgggttttctatgggcatgaccggcgctgcgcttgccacgatccttgggcagattgcatcgttctgcatcagcatgcggtatctcttccattttaaatccgtacccttctcacggagctgctttacgattgacggtgacagaacgcgcaagatcttcagctacggtacctctgcctgcttcaaccagatcgctatggctgttgtacagatcgttttgaacaacacccttgcacactacggtgctctgtcgatctacggcagcgatattcctctggcctgcgcgggcattatctcaaaggtcaatatgatctttatgtccttcgtcatcggcatttcgcagggcgtgcagccgatcatcggcttcaattacggtgctgcgctctaccgccgcgtcaaaaagagctatctgctggcgctggctgtggctaccgggctttctctggcagcgtttgcctgcttccagctttttccgcggcagatcatcagcattttcggcaccggcagcgagatgtactaccagttttcggagcggtacttccgcatttatatgttcctgacgctgatcaacggcatccagccggtcacctccaacttcttcaactcgatcggcaaggcgcgcctcggtgtattcatgtccctgacacgccagattttgttcctgctgccactcattgtcatcttcccgctttttatgggcattgacggcgtcatgtacgcaggccccattgcggacggtgccgccgccatcgtctgcggctttttcaccgtgcgtgagctgcgggagctgacccgcctgcagcaaaaaacgaactaagttaccagcaaagcgcccccgcatcaccgtgcgggggtgctttgctgtcccgagacattttt

SEQ ID NO: 14209 - DNA, 2932 bp, Unknown
  gut microbiota DNA sequence
tgggcgatatgacgaaaaaagctgcgcctgattggcaaaaaggtagaaagtacaggaaaccgcttgaattgtaccggtttccgcactacaatggaaaccagaaagataaatcgggtttccgcaggaggcaagtgatggacgaacacaacgagctgcgcacaaggctgtgcacagtcggaatggagctgttccgcagggatgggctgcgctttacgatgcagcaggccgctgcgatgatgcacatcagcaaaaagacgatctacgcagtctacccctccaaggaggcgctgctgctggatatggtggacgatgcgtttacaaggattcacgcccgcaagcaacgcattcttgacggcccaggcaccctgacagaaaagctgcgggcggtcattatcgccctgccggaggagtacaccgcgctggatctgcagcagatggatcttttggatgaaaaatatcccactgtcgcagcgcgcgtgcgggagcatctggaaaccggctgggagcctaccttggcgctgttggagcaggcaatgaaagagggcgttatccgccgggtatccctgccggttctgcagcggatgatctccgcttccattgaggattttcttgcagaccgtgcgctcgatgcgcagggcatatcctacacggatgctctggatgagatgatttccattttactggaggggttgttggtacgatgagatacagtctttgcaatcactgggaatttacagagcaatggagcgatgccttctgccggggtgaacctgttgactgccgtccggtgcgcctgccccatacctgccgggagctgccgctccactacgcagacccctctgactatgagatggtctgcggttaccgccgcgcactgaccgttcccgatgcgccccgggtattcctgcgctttgacggtgccgcccatcaggcggagatctacctgaacggccagctggtggggcagcatcagggcggctacaccggcttcaccatagaaattaccgaccatgtgcgccgcggcacagaaaatctgctggccgtgcggctggacacgcgcgaggaccccagcctgccgcccttcggctttgtcattgactacctgacctacggcggtctataccgggaggtttggctcgaaacctcaccgcagagccgtgtgagcgatcttttcgtgcatacaccgactctgaccgaggctgccgtacagctgactgttgaagcaccggagctggccgctgcgctgcgcgtccggctctgcagcggtgcaggcgaaacgctggtgagccgccagctgcccccggcagaatcggcggaatttcgtcttacgctgcctgacgccgcgccgtgggacactgagcatccgaatctctaccgctgcatagcagagctgctcgatgccgaagggcaggtgctgcacagccgggaaaccaccttcggcttccggacggctgtgttccgggcggacggcttttacctgaacgggaaaaagacctttctgcgcgggctgaaccgccaccaaagctacccctatattggctacgccgcgcccgaaagcctgcagcggcaggatgcccgcatcctgaaaaacgagctgcactgcaacgccgtgcgcacaagccattacccgcaaagccagtactttcttgatgaatgcgaccgtctggggctgcttgtatttaccgagctgcccggctggcagcatatcggcgatgcggcatggaaggaccgcgcctgtgccatgctgcaggagatgctgctgcaaaaccgcaatcaccccagcatcattctgtggggcgtgcgcatcaatgagagtgtggacgatgacgaattctatgcgcgcacaaaccagattgcccacgcactggacccgagccgggcgacctcgggcgtacggtatctggaaaaaagccatctcctggaggatgtttacgcctacaacgatttctcccacaatggctcaaacgccggtgccaagcggaaaaaggatgtaacgcctgatttgagcaaggcactgctgatctccgaatgcaacggtcacatgtaccccaccaagccctatgacgatgccccgcaccggcaggagcatgccctgcgccatgcgcgtgtgctggacgctgcctacgcagatggagagcacgctggctgctttggctggtgtatgtttgattatgccacccacaaggatttcggctccggggaccgcatctgctatcatggcgtactggacagcttccgcaatcccaagctggcggcatctgtctacgcatcgcagggcggggaggagccggtgctgacggtcagctccacgatggatatcggtgactatcccgccgggcagatcggcacggtctatgtgtttaccaacgccgagcaggtggacctttacaaaaacgatgtgtttgtgacgaccctgcacaaaagcggctggacggcgctgccgcacccgccgctggccgtggatgacacgatcggtgccctgcttgaaacgcaggagcattttgacaaggccaaggccgacacgctgcgcgactgcctgcttgccgccggacgctacggtttggccgggctgccgctgcgctacaagctgaagctggcgtggtgcatggtgcgctataagatgagctttgcggacggtgtggcgctgtatggcaagtatgtcggcaactggggcggtgcggctacgcgttggcggttcgatgccaaaaacggtgataccgtggtaaagagcgtcacgctctgccccagccaccggctgcatcttgaggtaacgccctctgccaccgtcctgcaggagggtgacacctacgatatggccggggtccgggtgcggatccttgatgaaaacggcagccccgctgtctatgcacaactgccgctgacctttaccgtgaccggtgccgccgtgctggtcggccctgcgatggcaact

SEQ ID NO: 14210 - DNA, 603 bp, Unknown
  gut microbiota DNA sequence
caggctgctgctccggaattgcagtcggcggagcggtcgtttcgcctgtggcattcgccatctgctcctgaacgacctgccgggtcgcactgccctgcttcgatttggaccggatcgtctgatcgccgcaggcgcagagggaaaccagataaagcgcgatggcgagaataaacaaagcctgtttcatctacggatacctcccaaacgggatattcccgataaaaacagaaatgcaaaaatgtccacggccacaatggtcgagccgaccggcgttccggctaggatggagatcagaatgcccagtgcggcgcagcagacggaaaggacggccgcacaaatcgtcaccgcacggaagtttttgcagacccgcatggcagacagcgccgggaaaacaacaagggcggatatgagcagtgagccgacaaggttcattgccagcacgatcacaacggcgatcgttacggcaatcagtaagttatacaaatcggcctttgtccccacagcctttgcaaagttttcatcaaaggtcacagcgaaaattttgttgtagcaaagaacaaataccgccacgaccgccaccgacagcaccgcgcacagccagac

SEQ ID NO: 14211 - DNA, 1447 bp, Unknown
  gut microbiota DNA sequence
accctctaccttataatacccgctctgtaggggccgggcatgcccggccctcaaccttgccatagccgcgcggccccgggtcagccgtaggggagggattcatccctcccgggcactttccgccgccgcaaacggccacggcggccagagggctggccgccctacggccccatttgaaaatccgtgtgtagggcggggtgccctcaccccgccgaaaaacctgccgccaaatcccttttacggttcaatccgtaggggagggatttatccctcccgcagaaaagcctcccttgtcaaagggaggtggacgccgaaggcggccggagggattctgtcgggccttgccctgcacgccgtcacccccacgcagccgggcaagaatccctccgcctcgctgcgctcggcacctccctttgacaagggaggtctttcgacaatccgcccctacaacctccgaaaggtggtcaccatgccccagacaccaaagctttctccacaacaaaaggtggcccttgtggaaaaaatcatctccggcgagatcagccgtcaggccgccgcgcaaagcgtcggcgtcagcaacaccaccgtgcgccagtggctgcgcatctatgaggccgaaggccccggcgggctgaccccgcgcgaaaaatcccgccacctcaccgccgaggaaaagcaggccgccgttgcggactatctggcgggcaagggctcgctgtttgaaatctgcaaaaggtacggcatccgcagcccccagaaccttgaaaaaatggtggagaccgccaaacagggcggtgcgctgcggggttaccacggtgcgtcccgccacaggggcgatgcctacaccaccgccgccgaccgcgtgcagatcgtgcaggactgccttgccaacggctgcgattacggcgcaacagcgctgaaatacaatgtggattacaaggcgctggtcaactgggtggggcggtaccgcgcccacggcccggcggccctgcacgacagccgccacagcagcgagggaacgcgccgcgccaagggccgtgtgcgcgccgtggcgccgatgcagcgccttgtcattgtgctggactgtctggaaaaccggaaaaactacggcgctatagcgcagaaatacgccgttgcgtaccatcaggtctaccggtgggtgcagcgctatctgcaggacggctggctgggcatgaacgaccgccgcggccccgccgatgaccccggcccggagggggagtgggcgcgcgtggcccccgccgatgaggacgccgcagaaaaatgggtggcccggtgcgcgggcgtgccggacgccctgcccgccctgctgcgccgcgccgggtacagctggtgcgtgattgcaaaaattttgtttgatctggcgaggatgtgaaaactcaaagccttcccccccatgggggaaggtggccccgcagggccggatgag

SEQ ID NO: 14212 - DNA, 1962 bp, Unknown
  gut microbiota DNA sequence
atcttgacaaactcgaccccgagggaaccggctaccgcacaaaaacacgctttgctcgttttttcaatctgccagaacttatggcaatgttcaaagaatgcgctgacattcaaacagcagatatgctgaaactgcctgtccctgctcttgtgggcggcaagccgaccaacattcagctaaagccctccgaaatacaaaagcagatggtgacagaattgggcgaacgggccgacaaaatccgcaataaaatggtaaagccctatgaggacaatatgcttaaaatcactaacgacggacgcaagttggcgctggatcaacgcttgatcgaccccgacttgcccgacgatcctgacagcaaggtcaatatctgtgtgggcaaaatttttgagatatgggagcagaccatgcctcaacgcagtgcgcagcttgttttctgcgatttgtctacgcccaaggcgggcgttttcaatgtctacgatgacatgaaagcaaagctgatcgaacgcggaatccccgaaacagaaattgccttcatccatgaagcgaacaccgatgcccgcaagacggaacttttcggaaaagttcgcagcggtgcagttcgcgtgctgatgggcagcacggccaaaatgggagcgggcaccaatgtgcaacagcgtcttgtggcgctgcaccatctggatgtaccgtggcggccatctgatattgagcagcgtgagggcagaatattacgacagggcaatgaaaataaggaggtctatgttttccgttatgtaacggagggaacatttgatgcctactcatggcagcttatcgaaaataagcagaaattcatcgggcagatcatgacctcaaaatctccggctcgcagctgcgatgatatggacgaggccgcgctgtcctatgccgaggtcaaggcattggcggcaggcaatccgcttatcaaggaaaagatggacttggacgtgcagttgacccgtcttaaaacactgaaagctgcccatgacagccagcgttatgagctggagaacaaaattgccatcggtttcccggctgaaatccgaaaatgcaaagaacagattgaaaatgccacagtagacgccgccaccgtaaaggaacactccgcagtggatgcggacggcaaagatgttttctgtatccagttggaagagaaagtttactacgaaaaagaacctgcggggaaagccctgttaggtctgctgggcttggcactgaatagcgaaaagcccgtacctatcgggtatttcaagggtatggaactgcaaatccaacatcttccttttggcaacgagtaccatgcaagattggctggctctggtacatatagcactcagctgggagctgatgtgctaggcaatctgacacgcctttccaatttggcaaatggtattgaaccgagcattgaaaagacccgcaatatgcaaatccagttggaacagcaacttgccagcgccgaggaagaagtcaagcggccatttccacaggcaacggaactgactgaaaagagtaagcgtcttgcggtgctggagggactgctgaacatgaacgacaaagacattgtgaccgacaccgagccggaacaacagtgtcagaccaacaatcgacagcgtggacaggaggaacgataaattttatgattaaaggcagaaagaccaatcgtatacgcgaccaccccaaggatgaaaggagtagtttttatgaaaaaatctattgttgcattgggcatggtattggcgctgtccgggtgtgcagcggcagcggatgaaactcttgcggttgaaccggctgcactggtggaaatctcaccggccaccgaagaaactgcgcagtcggtggaagctgctgcaactgccgaacctgcgcagacagcaacccctgcgccgacacccgaaccgacacaggcccccacgcccgcgccgacagcagagcctacggcagtcccca

SEQ ID NO: 14213 - DNA, 984 bp, Unknown
  gut microbiota DNA sequence
aactgtatgtcagatacgccccctcttccccgttggggtagatcagctgaccgctgccgaaggtttcagcttgtgcatcgccatccatgaccggctcggtgtctgggttttcaccgtgcagcaccgtcatctggtacgggttgtaaagatagatggtgtcgctttgcgcatcatacagcgtaaggtcatcgccgctttcggcaagcggcgtgatgctgccggtaaagccttccggcagctgccattgcagcatatcgtccgtcagctcaatgtcctctgcaatggcgtattgcgcgtccaaggcgtaggtgatttccgcgccgttttcatcggtcacggcaagcccgcttgcatcggtaagcgtttgcccgctgccgatttcggctaactggtcataagtataaatcaggatttttccgtcctgataaagagatttggctgattcatccgtgttctcagatgaagattcagcaagctcggaatcgattgtctcgtccgaggtggaaatctgatcggtatcagattccggctgactctctactgagccatttgacgaggcatcttcaggcaattcggaagaggccgaagaatccccaatcaaaggctcagaagaagccgcatcattgcttgaagaatcgaccgatgtattttccggaggtcgctccgggatgtaacctgcatcactgtctacaggtacactttcagagtcggcgctggaaacggctatactgctttcagctaagatagtatcatccgttgcaaaagcgactggtgttgtgcattgaaagaacatcagcgccgccatcgcagcagatgcccatctcataaaagagtgatggcgcatgggaatttcctttaccccctaaaggctacttgcgtaaattcgtattacggttcgcctacgaatttactaggttttattgcgaaaagtatctgccattatttgaatagcggataccaagaaaacaatatctttgattgctt

SEQ ID NO: 14214 - DNA, 944 bp, Unknown
  gut microbiota DNA sequence
ggatggccgccactatgagatccccgccggaaagacggtggcgctggtataagcggattcgcgatttgaaaaggagagagcaatggcaaacctgatttttgacaaggcccaaattgaggctaccatcgacaaaatcgtggaccgcacgatgcggatggacatgacatgggactggccctgcggcgtggcctactacggcatctgcgaggcgtatgaggtcaccaaaaacgagcgctacctgcagctggtcaaggaccgcgtggacgagtatatcgagctgggcctgccgagctggacggtcaacacctgctcaatggggcactgcctgatcaccctgtatgagcataccggcgatgaaaagtatctggaaatcgccaaaagcaaggtcgagtatctggaaaaggaggcgctgcgctttggcgatcatgttttgcagcacaccgtctcggtcaacaatgacttccccgagcaggcgtgggcagacacgctctttatggcgggcttcttcctgctgcggatgggcgtgcttttgaaggacgaggctctgatcgatgatgcgctgaaccagtattactggcacatcaagtacctgcaggaccccgagagcggactgtactaccacggctacaataatattacaggcgaccacatgtcaggcatcaagtggggccgcgccaatgcatgggcggcctacacgatgtcgcaggtcggcgtgcggctgccgcagtgctacctttaccccaagttcttggatgtggtcggcagcctgaacgaccagctggccgcactcaagctctgccagaccgagaacggcctgtggcgcacgattgtggacgatgcctcctcctatgaggaggtcagcgcgagcgccggcatcgccgccgccatgatcaccaagggcaaccccctgcacatcaagtacatcaacaaggccatccccggta

SEQ ID NO: 14215 - DNA, 1807 bp, Unknown
  gut microbiota DNA sequence
gcatcgatattggcgtactggcccagaggataggagtagatgccgttggggccgtcgttctggattgcctcggggctcatgatggactcgataaccttggtggaggtaccgccgaaagccgtgcgaatcatgcactcctccagcgtgatttcgtccatcagcatatcccagcgctgatcgttgaagtcggaaacgcccttcagatcggccagcgtcaggccgttgtcagcaccgaaggtaaccgtggaggggtcgccgttagcgttgatttcgtagatgtcgttgtcgaggacgtcaatcatctcgtcggtggcggtcaggtcggtgtaggtcttagggaaggtgccctcccagtcagagcgggtcagataggtagcggtgccgggcatccagtagtttacatccatgtcggccagctggttctccacagcagtgccgttcttggtggttgcaaaggtggtggtgtcctgcgcgctcagattccagctcatggccttgtctgcgctgccgccgacatcctgaccctcagcggccagaacgttctgcacagcctcgtgtgcgccgttgccgatggtgaagtagtagtcaccggcatccagaatgtagcagcccttggtgcctgcggcgttgtcagccgtggaatcccagctggccatattctgcatgtcggcggtgatggtcacggtttcggaggcgccgggggcgagctcagcggtcttgccgtagtccagcagctggacagcggccttctcaacgccgtgttccttgtcgtagtcggtgtagggcaggctgacatacaactgcacaacatccttgccggccacgctgccggtgttcttgacggtcactttcgcggtgacggtctcgttttcaaggtcaacattcaggttatcgagggtctgctcaaaggtggtgtagctcagaccatagccgaacggataggtaacctcattgtcatagctccagccgctgtctgtggaagaaccgactgcagaatcggcattgccctgacccatgacggtgtcaaaatagcgggtttcgtagtacttgtagccaatgtagatgttctcagcctcgacaatcgcatcattcatctgaatgtcggggttggcgttcgtccactgcaggtcaccgaagttctgggcagcgggagagttcgcgttcttgactgcgtaggtgtcggtcagatggccggaggggttgacctcaccggagaggatgtcggccacgccgtagaagccgtagccgcccggcagacccacctgcaggatagcgtcaacgcctgcattatcctgaatctcctgtacttccatcgcgctggcgttgttcagcagcacgatgaccttgccgccgttggaggctttggcgtcaacggctgcctgaatcaggtcgcgctcatcgtcggacaggcccagagggtcggtctggttcaggttctgggtcgggtccacaccggcggtgctgggctgataggtaccgttctcggaggcggaacgcgcaatcgtgacaatcatcacgttgttgtcattcatgctgtccttccatgcggcgttctggccgtccagcgcagcctgactcggctccttgctggagaatacgcccgtcgtggagggcgctgtgatatggttgtactccttgacgccgccccagctctggacctcagacttgaaggtgggatgcagggccttgtacatatcggccacagtctggttcaggccaaagcccttggctttgaaagccgcgaccatgtccacggtgtcggcatcggtgccggtgttctcactcaggctggaacccatatcgccgc

SEQ ID NO: 14216 - DNA, 5038 bp, Unknown
  gut microbiota DNA sequence
ggtatttattatttaaaaaggatgatatatcatggtttctatcgcaatcgacggcccgtccggggccggaaaatccagtctggccaaggcgctggccaaggatctcggctatgtctatgtggataccggcgccatgtaccgctccattgggctgtacgcggtgcgcgcaggggtggacccccacgatgctgacgctgtggcggcgctgctgcccggcatcaagcttgacatccgcctgctggacggcacccagcatgtctatctgaacggtgaggatgtcagcacggcaatccgtgcggaaaatatcggcatggcggcctccgctgtggcggcacacccggccgtccgcaccttcctgctggacacccagcgcggacttgccgaaagccagaacatcctgatggacggccgcgacatcggcaccgtggtgctgcccaacgccacggtcaagattttcctgacggcaactgccgaggcccgcgccgagcgccgtgccaaggagctggcggagaaaggccagcccgccgaccttgccaccgtgctggcggacatccggcagcgcgactatcaggacagccaccgcgccgttgcgcccctgaagcaggcggaggatgccattttggttgacaccagcgacatcggcctgcaggagagctttgacctgctgaaacgcacaattcttgcgcatatctgagggggctgcttatgcttttgtattggattttgctgcccatcgtctgggtgctggcgcatatcctctggcggtttgaggtcatcggccgcgagaatctgaggaccgtccgcgatgggcgcgcctatgtcatcgcacccaaccacatcgccaatctggaccctgtttttatcgctattacggtgtttgattggaaacggctgcgtattctggccaaggaggagctgtttaagaatccgctggcaggctggttcctgcgctgcatgggcgcggttgccatcgagcgcggccgcggtgacaccaccacggtggagcagctgaccaacgagtgcaagaacggtacgggcatcatgatcttccccgaggggacccgcaccaagaccggcaagcttggcatgatcaagagcggtgcctttgtcattgccgccgcagccggtgcggatatgctgcctgtgcgcatcatctacggcagcaaggacggtaaaatgcaccttttctgcaaaatccgcatcgtgttcggcacccccatcccggccgaggagctgcagatcaaggaccagagccacaagatggccgagctgcgccgcatgaagaaccgcctgcgcgatgagctggagcagttgttggccgacaatgcgtttgccgcgcccgccgtggaggctgcaccggagccggagcagctgcctgaaaaaagtgaacagccgtaagctgtaggggggcgtcctcggcgcccctgcatcaaaaaaaggagccaatctatggagatcattcgtgccaaaacggccgggttctgcttcggcgtggaccgcgccgtcaagctgacctatgatttattggcggagggacgcaaggttgcgactctcggcccgctgatccacaatgcccaggtcgtggccgaccttgaggctaagggggcggtgacctgcccggatattgacgccgtacctgacgggtatgaggtcgtcatacgcagccacggcgtacccagaacggtctatgatagaataagcacacgccgcctggcgtatcatgatgccacctgcccgtttgtagcaaaaatccataaaattgcaatggaagcggacaaaatcggtgcgcttttgctggttgcaggggatgctgaccaccccgaagtacaggggattgtcggccatacaaaaggccccgtgcgggtttttgccaatttggaggagctgcaaaatttgctccctgcgcttttgcaacaagaatccatttatgtggttgcccaaacgacatttcgcgtggaaagttgggaaaactgcaaggtttttttaaaaaaagagtgtacaaaagccaaaatttttgatacaatatgtaatgcaacgtgggcgaggcaacaggaagcggaagacctcagccaaaaatgcgaccggatggtcgtcattggtggtcatcattcttccaatacccaaaagctgttacaggtcgccgcgcggcataccagagctatcaatgtcgagactgctgatgaactcgaccccgcatggctcgccggtgctgcgcgtgtgggcgtgacggccggggcttcaacgccttcgtctataattgaggaggtacttaacagtatgagtgaagagatccgtgacgacatgagctttgaggagatgctcaacgcatccgaggcaaagcccctgtacgcaggcaagattgtaaaagccaaggtcatcagcgtttccccgacggagtgtaccgtcggtattgatggttccaagcacaccggcattgtgcccctgcgcgagatgagccatgatcccaacgccaagatggaagaccttgttaaagagggcgacgatctggatctggtggttgtcaagaccaacgatcaggagggtgttgacaccctgtcccgcgtccgttttgaggcccagaagggcatgaaggatgtctccgaggctgccgagaacggcaccgttatggaaggcgatgtcatggaagccaacaagggcggcgttgttgtcaacgtcaagggcgttcgcgtcttcgtgccccgttctcaggccaccatgcgccgtgatgaggactacaccaagctcgtcggccagcatgttcagctggtcatcaccgagtgcgccggccgcaagatcgtcggctccatcaacaaggtcactgccgaggccaacaaggccaagcgcgaggagttctgggccaatgttgaggttggcaagcagtataagggcgttgtcaagagcctgacctcctacggcgcctttgtcgatgtgggcggcgttgacggcctgtgccacatcagcgagctgagctggaacaacatcaagcatccctctgaggtcgtcaaggtcggcgacgagatcgaggtctatgtcaagagctacgatcccgagaaccagaaggtctccctgggctacaagaaggaagaggacaacccttgggtcaagctggagaacgaggttcccgttggcactgagttcaccgctcccgttgtctccatcaccaagttcggtgcctttgtccgcatcatgccgggcattgacggtctggtccacatcagcgagatcagcaacgagcgcgtgaacaaggtctccgatgttctgaaggtcggcgatgaggtccgcgttaagctgactgctgttgacttcgaccgcaagcgcatcagcctgtccatgaaggcctgcctcgacgaggagaacggcgaggatgctgaataatccttagtcactgagcaaccgtaaggggcctgcctgttctaacaggcaggcccctttttgcttgaaaaacggcgtgcagctctgtaggggcggatgcttgcatcgacccctgcaaagctgccgctatgatagggaaaacccatgcaaaaactcaaagacttcatcaaaaaatattacgagggtctggcctacctcttcttcggcggcgtggcaacgcttttgaatctggtggtgttcgcggtctttcaggcggcgttcggcaccgattttgcgaccggcctcggcaatgtgctggacaatatcctctgtatcctctttgcttattggacaaaccggactttcgtgttcaaaagcgccaacaagggcaaggcggcccttgcggagttcggccagttcgtctcctgccgcattgccaccatggtcatggatcagctcatcatctggctgggcgtcagcgtgctggggccggcagtccgctttgcagcagccgatcccaagctgtgggccatgggcgtaaagcttttcagtcaggtcgttgtgatcctctccaattatattttcagcaaattgtttatctttaaaaagaagtgacgcatattccgaaaggagccgaccatgcttgtttttaaggtagcaaaattcgctctcaggcatccgatgctgacgcacagcgccagccggctgctgcacaaaaaacttcgtcccaaaaaggaggcatcccccatgaaacagaaagttcgtggccacgcattccgtctggtaggtctgatcctcggcatcatcggtgccacggtcagcgtcacctccatcgtatttgcggcattgggcctgcatcaggcacgcctgtgcaagcattgtgagaaaggggaaaatttccgatgaaatacacgaaggaagagatgctgagcaaggtggaccacaccctgctcaagccggaggccacctggccccagatccagaccctgtgtgacgaggccattgccaatcactgcgcctccgtctgcatcaacacctgctatgtcaagcaggcggtcgagtatatggcaggccgcgtaccggtctgctgcgtggttggtttccctctgggtgccatggatactgccagcaaggcatttgaggccagaaccgctgttgagaacggcgcgtccgaggttgatatggtcatcaacatcggctggctgaagaacaaacagtatgacgatgtccgcaatgacatcgccgccgtcaaggctgccgtgggcgataagatcctcaaggtcatcatcgaaacctgcctgctgaccgaggaggagaagatcaagatgtgcgacatcgtgcccgaggccggtgccgacttcattaagacctccaccggtttctccaccggcggtgcgaccttccatgacattgcgctgtttgccgagcatgtccgggggcgctgcaaaatcaaggctgcaggcggtatctccaccgtggaggatatcgagaagttcctcgaccttggcgcggaccgtctgggcacctcccgtgcggtcaagctgctcacctccggcgaggccggcagcggatactaagagggcacggtgttccttctttgcaaagaaggaaccgaagaaattccaataaaacaacacaaaaggcgctgctgtcggtgagtgacagcagcgccttttgatgtggaact

SEQ ID NO: 14217 - DNA, 5410 bp, Unknown
  gut microbiota DNA sequence
gttggtggctatacaagcccgaattcggcccgcaaacgcgccagcatcgcgcgctgggcatcagcctcggcagagcgatccacgctgccaaaggcccgcgcaggggcgctgccggggcctgtggaaccgtattcgccgaagcgtgcggtcttttcgttctcggggtcatgccagttgtcccagccgccggcgcagacctcctcgctcagggagcagtccagccagtagcaggccgcgtcagcgcgccacgggcggcccagatagacgctgccgggggcgcagttgcccgccacggtgcagtccacaaagaggtagccgggcttgcctgcgggggtgcagggggctgtgatatagcaggtgccggtcttgtggtgccacggctcaatgcggcagctgtcaaacacagcattggccccgccaaagataaaatcaatgttgccgcggatcgtgcagcggcggtaatactgggtcgtatccaaccggggggcgttctcacgcgggccgcggaagccgttcttctcacgctcctgcaggggcaggggagcggtaaaaagggtgtcctgattgccgtagaggtttacgtcctccatcagcacacggctggcatcggcataaacggcaagcgcctgaccggcatttgcgccgtcaccggcgttgttctggatggtcaggttgcgcacgaccaccctgccgccgcccagaaacagcgtttcgctgcgaaaggtgccggttttggcctcgcccggccatgggtcacgcccgccgacagaggcggtgataatggtggcgttgcggtactcgccctcaatgatatagtcggccagctcgataaagggccgctcctcatagatgccgtggcggatgaaaaagcgcaccggcatctccggcgtttcggcgcaggccgctgcggcctccgtcagggtgcggtaatcgccgtggccgctctcgtccacgaccagtgtttttctttcgggttcagccatcagaaaaatcctttcataaaagcgatgtcgctggccgcacgggccggtacagcctcctcgcgcagcaccggcagagcgggctggggcagctggcgcagcatggcaaacgccccggcatagtcggtgcggctctcctctaagctggtgtgcagcaggctgccgtccggcgcaaacgcctgccctttgaaatggacagccacgatctgatcccccagcagtgtgcccatatcgtaccagatgcggtcctgctcggctacattttcggcggatacaaggttgctcatgtcaaagatgaccttcagattcgggctgcgcatcgtgtccagaatgtggcgcgtggctgcggcggagttcatgctgtgataaattacaggctcgatgcctacggtaacgccgagcgcctcggcggcgggcaaaatctctgccagactgcggcagagcagctcctgcgcctgcgcacgggtcgtcccggcaggctgcttggacatggcggtggtctcggtgccgatgcacccggcccccagtgccttgcatacagccagctggctcttgaaatcggctacattgcaaaggcggctctcgtcatttatagccagctcgacataggtgcccagcacggcgacctgaatatggtgtgccttttcggcggcaaccgtctcggccaccagcgcatccgtcacatcggcgtagctctttacagtggggacgcattttttgtatgcaagctgcacggctgcaaagccatcggcagcaacctgcccgaacagctcatccggcgtgcccttgccatagtcgtgcagacgggcacctacaataaaattcggcatggtgcagcctccttacttcttgcgcgcggcgaggatctcggtataggccagcagcaggggaccgacacccttggcgtcgttctcaacgaccggctcgctgaaatagtaggcaaggctgccgtcacggcgggtagcgccgccaagcccggctaccagacagatgccgccaagctgcagcgcgccgtcagcgcccacgccgagatgtcggtcgcaggtgccgtagaaggctttctcgccgtaggcggcgtaccgcttgggcaggtagccaaggcgcacgccctttagcacggcgtaggcaaacagcgcgctgccggaggtctccagatagttgccctccacaccggccttgtcgatgacctgccagaacatgccgctctcggcatcttggaacgcgatcattgcgtccacggcgtccttgagcatcgacatgattgcgcggtactcatagtagagcatatcgtccatgcgctcgagcacatcgaccatcgcaacaaggaaccagcccatggcacgcagccagaagttggcgctgcagccggtcacggggtcggcccagtacatctcgcggctctcgtcatagccgtggtagtacaggccggtcttggggtccttcatgtgcttctggatattcatgaactgcttgtagctgtcaatgcagccgtgcatcccgttgcagcgggtctcgtactccatgtagaagggctgggccatgtaggtgccgtccagccagacctgattcgggtagatctttttgtgccagaagttgccctccttggtgcggggctgagtttccagctggctgcggatcgtctcgatggcatcgcggtagcgctgctcgccggtcaggtcatagagggtgaacaggttcttgccctgattcacattgtcaaggttgtactcctgcgggtcataggtctcaatgacgccgtgatccttgacaaaataatcgagaaaattgcgggagaaggtcagaaacttctcgtccccggtcgtctggtagaggctcaggcaggcggtgatcatgcagccgtcgatgtaattccatttgttcggcttgccgctgcgcaccttttcaatgttccagagcggggcctcggcggtggagccggcaatcaggtaatctacatagcggcccagtgtggtcagaatctcgtcatgggtcatggttcagtcctcctcatagcggtcaacatgggtcagctgcaggcgctcgccctcgtaaccggtaatttctacattgtgcagtgcgattttgcgcacattctcggcgtggatgcctaccttgcagctggcgcctgcgccgcacatcatggctgcctgcccggggcgtgcttcgggtgcaaagctgatcttcacatcccgcatcgtcacgccctcgatgggctgctccggcagaccgctgaaccagcagcctgcatactgggcatccgtggccacgatatgctccatctccagcttgccgagggtcggggtcgtatcgtccacgggctgaggctcatgcgtctgtacatagtcggtgtggccgtccgggtcgcagaaatagaacatgttgatgacaaagggcgtcagaacgccgtccattacgacattgcggaaagccagcccgtcaatgaccgcgtacttgccgcggccgcggcgggtcttgacgcgtaagccccggtcggtgtggtccatcaggcactgggtcaccgtgacatttttgatgccgccgctcatctcgctgccgatgaccagaccgccgtgaccgcggctcaggcagcagttgcggatgataacattctcgcaggggacatgcagcttcatgccaaggaacagcttgctcgacttgagtgcaatgcagtcatcaccgacatggacatggttgccgatgatgttgacattcttgcagctctcggggtcgatgccgtccgtgttggggctctgggagctgttgcggatgcggatgttcagaatgtctacattctcggagtaggtcgggtgaatcgtccaagagtagctgttgcaggccagcacgccgtgcagcacaacatttttggcgccgctcgtaaagaaaaggcggggccgccatgcgatcttcttctgcttcgggttctggtaccagtcgccgttctgggcgttgcagtccagcgttccctcgccggtgatcgtcacattctccgcgttgatcacattgatgagcgcggcaaagctgtcgagggggttgccctcccacagggccagatactgctcgtccttctcgttatggcaggggagaacgcccggcaggatcgggtagtcacggcggtctgtgccgccgagcagcgtgcagcccttttcaagatacagggtcgtattgctctgcaaaaagaggctctgggtgcggtaggtgcctgcggtcagatagaccgtaccgccggccgggcaggtggaaagcgccgcctgcagcttggcggtgttgtcagtcacgccgtctgccacaaggccgtaacggctggcatcgacaaaaaagctctcctctgcggtggtgaaggtgagcgtgtcggtcacgccgtccagcgtcacagcaagggtataggtatgggcaggctcaagagaatagagcgaaaatacgttcgtatccccgctgcaaacggcggcaccgtccagcgtgacggtgtagggcgccggggcgcgatagcagctgtcattgaccagctcaaacaccgcgctgcgtgacatagaacgaacaagcgtgattttcatgagtgaacccccaaatgattgaaaatttgtataaaaatagtttgaaaaacagcaaaaattgtgctatccttagaaatagaacaagaatcaaacgccgggtgcagcacgccgcggcagtcaggagcagcagtatggttttggaatatgtctactcgccccatgtggactttttcatcgaccgagtcgaccgtgataccggctacgagatggccagcttccatatccaccataagtatgagatctactatgagatcgagggcagccgccgctattttatcgaggatgccgcctacatcgtcaatgcgggcagtgtggtgctgatcggtgaaaatcagatccataagaccgccgcgctgggggatggtgcgtccagccgcatcgtggtcaacttcagccgcgagtttctcgataaaattaccgatttgttcccggatgtggacttcttctcttttttgagtgaggagcataaccacctgctctcggtcatcacggtcaagcagcagaaccatatccaaggcatactgcagcagcttcttaccctgcaggaggaaacctcgcccgaggccgatgccatgcgcaggatgctgctggcaacgctgctgcttgagctgaaggagctctgccgccagcagcaggagaagggcggcgacagcggccgcgtaagcaaccacatcgttgaccagattcaggcctatatcgctgagcattatgcggagaagctgaccctgaccggcattgccaaccaattttatatcagcccctactatctcagccgcctttttaaaaagtccatcaacctcagcctgatcgagtacatcaacggtgtgcgcatcaaggctgcgcaaaatctgattgaaaaatccaatgagagcatctctg

SEQ ID NO: 14218 - DNA, 1992 bp, Unknown
  gut microbiota DNA sequence
ccttggcgtaaaccttccggccaccctgtaggggccgggcatgcccggcccgcagccttgcgtcagctcccggtttcgctttgttcccccctgtatgttacatcgtagggagggggcttgacccctccgctaccttccgttaaactgccgtcaacggtcaatccgtaggggagggattcatccctcccggccaccctcaccccaaaatcaccttttccagtgcggcggcgtcctcggcaaggtattcagccccggcggcggtcagttcctcccgggtgcggaagccccacagcacgccgcagcagggcaggccggcgttgtgcgcagtgtcggcatcgacattgctgtcaccgacatacagtacgctgccgtccggcgttacgccaaggcttgccatcagcgcgcgggtgccctcgggtgcgggcttggtcggtacatcgggcagcgcgccgcgcacgatctcaaacagctcggcgtcaaagtagcgggccaccacggcgcgggcaaactcgtccgccttgttggaaaataccgccatcttcaccccggcggccttcaggtgcgccagcagctccggtatgccggggtagggggctgtcttgtcgtgcatgtgcgcgccgtatacctggtcaaactcggccagtgtggcggccagctgcgcggggctgcggcagtccgcagggctgaaacgctccaccagcttggggatgccgttgcccacaaaatagcggtactgcgcggtatcgtgctggggccagccgtgggcggcgcagacgcggttggcggagtccgccagatcgtcgatcgtgttcagcagggttccgtcaagatcaaatagtacggttttatacattcctcaaaacctctttgcacaagaaatcactcttattatagtgtcatttgacgaaaacggcaagacgcccgcgccgtttgccgtgaaaaaaatgtaaattcttaaaaaactgttcccatttttccgaaatatggtatgatataaggtagcattgtaaggagggtctgttgaatggaattgttttttgacatgctgcgctcgatcgtctacggcgtgatcgagggcgttaccgaatggctgcccatctccagcaccggccacatgatcctggccgagcaggtgctgaaattcagcctgagcgccgagtttatgaagatgttccgcgttgtcatccagctgggtgcgatcctcgcggtcgtggtgctttacttcaaaaagctgtggcccttctgcggcgataacggccgcgactccggtctggccaagcacatccgctggccggtcatgcggctgtggggcaagatcattgtggcctgcctgcccgccgccgtgctgggcctgctgctggatgactggatggacgcacacctctacaacagcgtggtcgttgcgatcatgctgatcgtctacggcgttgcgttcattctgatcgagcgccgcccccgcgtacccaccaccaccaagctgagccgcattacctacaagcaggcaatcatcgtgggcgcatggcaggtgctggcgctgatccccggcacctcccgcagcggcgcgaccatcatcggcggcctgctctgcggcatgagccgcgcctgtgcgtcccagttcaccttctttttggccatcccggtcatggcgggcgcttccggcctaaagctggtcaaattccttgccaagggcggcgtctttacgctcggtgaggtcggcacgctgctggtgggctgcatcgtggcgtttgtcgtctcgatcctcgcaatccgcttcctgatggattatgtcaaaaagcacaccttcacagtgttcggctggtaccgcatcgcgctcggcatccttgtgctgggcatctgggcgctgcagagcttcgtgctggcgtaaaatacacaatagaaaatccgctgcttcctccatgccgggggagcagcggattttttgtttggtgcgtgatttgtaggggccgggcatgcccggcccctaccgcgtta

SEQ ID NO: 14219 - DNA, 2135 bp, Unknown
  gut microbiota DNA sequence
aggtcacccgtatggtcgtcccggtgccgacctgactctgcaggtcgatgcgcgcatcgtgcaaaagtgcgatgtgcttgacgatcgcaaggcccagaccggtgccgccggtcgccttggagcggctcttgtccacgcggtagaaccgctcaaacacgcgggtctggctgtcctgcgggatgccgatgccgttgtcctcgacctcaaagtagggacagccgtcactgcccacgccgcagcgcagctccacatggccgcccgggcggttgtagcgtatggcgttgtcgcacaggttttgggtcagctcgctcagctggtcgcggcagccctgcacggtggcgggccgggcgtcatactgcagcgtcacataggcgcggcgggcgttgaccgtcatgttctgggcggtctccttgacaagggcggccagatccaccggcacggcctcggccgccgcctcgcggctgtggctggcctgattgctgtccagctcgctcagctgcagaatgtcgctgacaagcgcaatcatccgctgtgcctccttgtggatgcgggcggcaaaggtcgggatgtcctcaggcttggccatgccggtctcaatcagctccgcatagccggagatgctcgtcagcggggtctttagctcgtggctgacattggcggtgaactcgcggcgcatcgtctcgttgtcctcgcgcagcttgcggtcggtctggatcgtccgtgccagcgggatcagctcctcataggggacatcggcctcaatcgtgttgagatgctcagccagatggttgatgggctgcaccatgcggcgggtcagccaccagctgaacagcgtggccgccagcaggatcagcacgaccgccgcgcagagcagcggcagcgtgtcagcgctcaggccccagatgtttgcaatgtcctcgcccacgcgcagcacctgcgtcccctccggtgtgtcgatgcgccgcgcgtagtagtgggtctcggtctgcatcgtctcgctctctcgggttacgctggcgctgcccttctccatcgcttgacggaactccggccggtcggcgtggttgggcagggtggagtccatgacggcacggagcgtatgggtgccatcgtagacaagcgccgaggctttgctgtcaaaaagcacggtgccgtccgcatcaatcagcgtaaagcgcagggtgcgggcgctctcctccggcagcatggtcacaaaggacgcagcatcgtgggtgccctgcgccttgtaggcggcggcgtatccgtcgcagatctgggcaatgtagctgtccacccgctccacatagctgcgctggaacagcaccgtggcggcggccagcatcgccagcacgcagagcacgccggtcaggatcaggccgcggcggtagcggcgggtcatgctcagcggctgcttttggatgttttcgtcagtcatcgctgccctccgtgctgagcttgtagcccaccttgcgcacggtgcggatcgcctcacccgctgcgcccagcttctggcgcagggtgcgcacatgcatgtcgatcgtgcgagactccagcagatcatcggtgtcccagacatccttcatgatccgttcgcgggccagcacctcctcgggatgctccaaaaacagatgcagcagcgagtattccttgtaggtcagctcaacgggtgtgccgcccacacggaccgtgcgggccacatcgtccagcacgatctcaccgaaatgcagggtggacgcagccggcgcgggggcggctgccgcagcgcggcgcagcacggcccgcacgcgggagatgaactccatgatgccgaacggcttgcagaggtagtcgtccgcgccgtggtccagacccttgacgacatcaatttcgctggtcttggcggtgaccataatgaccggcaggtgtgcgcaggcggggtcggcgcgcagcttgttcaggatctggtagccgtcctcatcgggcagcatcacatccagaatgaccagctcgggccgggcctcgcgcacagctgcccagaagctggcggcgtcctcgcagccgcgggcgtcatagccgttggattgtaaagcgtattgttccagctcacggatgctggaatcgtcttcgacgatgaagatcatagtaatacctcatgt

SEQ ID NO: 14220 - DNA, 1573 bp, Unknown
  gut microbiota DNA sequence
cgttacggcaactaagctgacagaggataccaccgtaggcagcgcaggcggctttgtaggttatgccagcggcgcacagatctcctactcggatgtaactaagctgaaacatacaatcgttacgcctccggataatctggaagatacatccgcgcctacctactatgacaatacaaaaagcacctatgccgtcacaggcggccgctatgcaggcggttatgtaggcgacatggatattggcagtgcagcctctgtgggcggcggtttgaatattctgggcaatagtattgaagttaccggtattctcgacgccctctctgtggtcgtaactaccattgaacattccgatgttaccggcggacccggtgggtatgccgttctggcaaccggtgatttggataacagcaaaggcaaagtaggtatggctggcggctacgctggcggcatatacggcggtcacattcaggacagccaggcggtcaacttctcgtacattatcggcgagatagccgcaggcggctatgttggtgaaatgcagcccggcgatgttgccaaactgctggacaatgccagcgttttgagcaaggtgctgaacattgacacagtgcttgcctctgtcttacaaagcttcgttccgtccatccgcaacagttccaccaactgtgtgccctgcggcggcgcagtacgcgccaatgctgcttcggatactactgtgcagcgcggcatggctggtggctatgtgggccacaacatgggcggcaccatccacggctttgacacctcccgttggaaagacgaatatgccgagaatgatatcgacaagacctacaacggtcctatgagcctgtgcaaagccgagcgtatccgttcggtatacgggcatgagtacgcgggcggttatacaggtcttatggaacccgcagacaccgcaaaagtcggcggcttaaaggtgctgggtagcctgataaccgtagacaatattctcggcgcattgggcgtcatctacccggtacaaaccaacacagcagtgtatggccccttggctggtctggatgtggacacttggaacagctgggtgcaatacgtgggcaaatatggcggctacggctatgaactggcaaaggccggaaccgtaacctcgcaggaagaactggaaaccaaacttgccgattatatctacggctacaatgttgtagcaggacgcgggcagttcgacagccaactttacggcggcgatgcaggcggctatgtgggctgcatgaacagcggcacattaaccaactgcatggcttacgatgccaagcagatcagtgctatgcatagtgcgggcggctttgccgggcagatgaaaaccggcggcgcagtagaactcggcacggtcaacattcttggattgaaactcaatgcaggacaactgctgaacattgcgcagttgtttgtccccgcagttcgcaattcctcggtgcagggctaccagtcaggtcttacggtacaggctaccggctcaccggataaccattgcggctattcgggcggctatgtaggcagtgcctacggcgcacagattcagctg

SEQ ID NO: 14221 - DNA, 897 bp, Unknown
  gut microbiota DNA sequence
gtccaagatggcgggatcgacgccgggcagagaggtgggaacctcaaagtcgaagtgcgggatcttcttggtgggagcctagttgatagcgccgctcaggatcgcgtcgatgatgccgcgggtatccttgatggagatgcgcttgccggtgccgttccagccggtgttgaccagataagccttggcgccagacttctgcatcttcttgaccagctcctcagcgtacttggtgggatgcagctcgaggaaggcctggccgaagcaggcggagaaggtcggggtgggctcggtgatgccgcgctcggtgccggccagcttggcggtgaagccggacaggaagtagtactgggtctgctccggggtcaggatgctgaccgggggcagaacgccgaacgcatcagcagacaggaagatgacgttcttggcagcgggggcagaagaaatcgggcgaacgatgttctggatatgattgatggggtaagaaacgcgggtgttctcggtgacagacttgtcagcgaagtcgatcttgccctcggcatccagcgtgacgttctccagcagagcgttgcgcttgatggcattgtagatgtcaggctcggagtccttgtcaaggttgatgaccttggcgtagcagccgccctcgaagttgaagacgccgttatcgtcccagccgtgctcgtcgtcgccgatcagcaggcgcttcgggtcggtggagagggtggtcttgccggtgccggacaggccgaagaagatggcagtgttcttgccctccttatcggtgttggcagagcagtgcatggaggccatgcccttcagcggcaggaagtagttcatcatggagaacatacccttcttcatctcgccgccgtaccaggtgttgatgatgacctgctcctt

SEQ ID NO: 14222 - DNA, 1979 bp, Unknown
  gut microbiota DNA sequence
gtgcgctccaaaccatattctgtcactacctgttcaacagcgccagcgtccagtcgcataccatcaaagcgctgtgcaagcgctgcgtcaatctcgtcccgacacctttcattcaagtggcaagacgcatggtactgctgcaattcgccgtgttcgcgggcataagtgacggactgtcgatatactttgggtgggttctgctgctgttcctttttcagcaagtcatctgcgcggtcttccacgcactgagccacaatgctcatataatcggtttccagcttggaaaaatccttatacacatccgccagcggcgcgggagatttcagcagcgcccgcacccgtgcaagggggaggttcatttcttccgttgccagaataatgtcctcacggacgctgtactcgtaggcgtgatgtagaatttcttctggcggctgtgcggtcagccataggcaataggcgctctgctccacccgcattttttcgcagagctgctcctgcggggtcattcggcatcctcaaaaacaagagaattgctttcaagaatatattcccaaaagaagcgtttaccgttcatatccgcagcatcatagcagaatgtgataagcgccgggaacatggctgccgctgcatcttcggaaacattcagcttcttccccgtggctgtgcagtggttcagatattccaccagttcgcccagcgtggccgcaccgctttctttcaaaatcggtgtgcactcttctggccactcctgtttgtccagcggcaacgccagcattttctcgctgattggggcactgacttcaatttctgtgtctgtgcgctggctgaaaccgtccagaacttcaagacagcctacggtgtctgctttttcgagcagcgcagcggccaaaacttcaataatatcatcgtaagacataacgtcctcctaaaaagaaaagcgcccacaaaagtgagcgcccagataaaatattcggttatgagaacatcggcaaactgccgtttgctgcatctgttttcagaatggtgatccagttgcttttgccgtagagaaaccgcacgatatgcacggtttgcgtggcatcgtccaccgtatagaatgcaaggtagttcataacgatggtgaagcggattccccatagggaaagcagtttgtcggaaacgacttcaaatttgtgcgggaagtcagccagcgcaccgattttctcatcggccacatccaacagcttgtcggcggcagttggatttttcagcacgaggtcgatatagtcgtaggcgttcgccatatcgcgctcggcggcttgggtgacataaatgttgtatttcatctgcgctccctgcggtggcgcaaatcagccataacatcggcaaaggggcgcgtgttcccggcttccacgtcggcaaggccctcttgcagcttgctgtacagttcaatgcggcccgccatttcctcgtaggtttccatgctcataacggcaaggtcgcccttaccgtttttggtaataaagaccggctcgttgtaggcatggcagtaagaggaaatgtcattgtagttgtttctcaaatctgcgctggaacgaatgttcggcatagatagcacctctctttcatacacaaattatatcataatttgtgtatgaaaacaagtaggagttttagttgaatgtgacagtccagtaggtatactgcccctcggcggtggagcaaaaccaacaggccacacccatgctcgtaaagcaggcgttggtgatgttggcatagtgggcaggactgttctgccaatagctgcatacgctgctggccgagccgataggaccggctgcgcagatttcgctgcgggtggtcatgccgctgtggtcgaacgcaccgcccgcgacaaagctctcgcagcgggcatctgccgccgcgctcagcccgccgtccattgccagcggggaaagtcccgccgccgcacggatggcgttgatgttctcctgcacggc

SEQ ID NO: 14223 - DNA, 1730 bp, Unknown
  gut microbiota DNA sequence
ggttcacacaccaaaacaggtgcgcgcgttttctgcggtcacatccagcacggtctgggcgtccatctgccagatcgtgccgatgtaggcggccacatgggcaatgttgcggctgtcattgcgatgtccgcgcaccggctcgggcgccatataggggcagtcggtttccagcagggcgcggtcgtgcgggatggcggccagcaccttggcggcgcgcttggcgccccggtaggtcactgccccgccaaagcccagatacagcccctgctccaccagccatgccgcgtcctcggcgctgccgctgtagcagtgcagtgcgccgcgcggcttatatttgcgcagcagcgcatacatttcggcgtgggcctcacggtcgtggaccgacacgggcaggtccagctctttggccagctgcagctgtgcctcaaacagggcgtactgctcctcccgcgggaccggccagtgatggtcaagcccgatctcgcccacggccactaccgccttgtcctcaaacaggggacgcatggcggccaactcagcgcgccagtccccgtgatagactgccacagtcgcggcgtcctcctcgatcaggctttccgggtggatgccgatcgccgcgtggatgtagggcgcggcgtgggccagctccagcacgcgggcggcatcgccggagtgggtggcacattccagcacccccaccacgccgccctcgggcagggccttcagcagcgcagcgcggtcaccgtcaaactggcgcgaggaatagtgcgcgtgggtgtcaaaaatatggttcatacctgcttctcctgcggggcgcggttgacgagataaatgccgatgcagaccaacagcagcgcggcgaggtagttccactcaaacagcggctcgccgttcagcagcgccgacagcagcacattcatgaccggaatgatcaggccaaacaccgcaatgcgggagaccgggttgtttttcatcagcagcgcccagattacataccctgcgccggagataaacgccaaaaacagcagcaccgggatacctgcggcactctcggggtggaggccgccgcccatggcaaagcccatcacagccagcgccagaccgccaacaccgaggttcagcacacagaccgaaaagctgtctgcatgctgggtcacggccttgttccacggcccggccgatgcaaagattgcggaggcgatcagcataaacgccatcccctttgcgctgccgctgccgtggttgcccagcgtggcaatcagaacgccgccaaagccaagcgcacagcccagcgccttgcgcggggtcatccggtcggccttgccgtacaaaaagtgcgccagaatcacgcccataaagctctgggtgctgttcaaaatgccgcccatcgcgccggtcagcagcgccacggcggagtagtagaagaaatactgtgcagcggtctgccacaggcccagcccgcaggccgaagccagcgttttgccgtgcggcatcggcagcgggcggcggttcagcgccagaccggccagccagaccagcgccgcgcccatcataaagcggacacccgcaaagcacaaaatcgacgcggtatcggcggaatcaatcgcaaacagccggtagcccagcttgatgaaggggaacgccgacccccacagcacattgcagacaacggccatcaggaccgctgcggcggggatggagaaaaactggtcaaggcgggatttctgcat

SEQ ID NO: 14224 - DNA, 3045 bp, Unknown
  gut microbiota DNA sequence
ggagcagccgccctcggtgtcggtatcggcggcaaaaatcatgccctcgctgacatacttgcccttcatcatcgggcggggtgccagattcgcaacaatgccaatcttcttgccgagcagatcctccggcgcaaaccacttggcaatgccggacaggatgcagcgctcgcgctcgccgtcaaagacggtcaggtgcagcagcttcttgctctccttcatccgctcgcaggcgcgaacctcggccacgcgcagctcgaccttgcagaagtcgtcaaagctgatctcggcctcatgctcgccaatcagttctgcggacgcagcagcattctcagcgggcttttcctcctcggcaggcgcattcgcagcctgtgcagcggccttctgggcagcctcaagggcctccagctcagccagctccttcgcggcgtcaatacgggggaagatgttctcgcccttatgcagcgttgcgttggcaggcagggtgccgtacacggcggcgctgtcccacgtcttgccctcggcggcaacattcagctgcgcaaagatcttctcacaggtggtgggcatgaacggctgcagcagcacggtgcagatgcgcagcgtctcagccagattgtacagcacgcgggccagacggggcttggattcctcgctcttggccagcacccacggtgccgtggcgtcgatatacttgttggcgttgtcgatgacctcaaacacatcggccagcgcattctggaaggcgtaggcctccatgtcggcctcatagcgggcgcgcagcgccttggccttatccagcagggcggcgtcctcgggaccctcggcctgctcggcgggcagctcaccgccgaaatacttgtccgccatggcggtagtacggctcagcaggttgccgaggtcgttggccagatccatattgatgcggttgatcagcagctcattggagaagttgccgtccgagccgaacgggaagtcgcgcagcaggaagtagcgcagggcatcggcgctgtagcgctcggccagcaggtaggggtccacaacattgcccttggacttggacatcttaccgccatccagcagcagccagccatggccgtaaacatgcttgggcaggggcatatccatgctcatcagcatggcaggccagatgatggaatggaagcggacgatctccttgccgataaaatggacatcggccggccagaaggtctcgtaatcgctgtcggggtacttctcattcataaagcccagcgccgtggtgtagttgaacagcgcgtcgatccagacatagacaacatgcttggggtcaaagtcgaccgggatgccccacttgaaactggtgcgggaaacgcagagatcctccagacccgggtcgataaaattgtggaccatctcgttgacgcgggagcgcggcagcaggaagtcggtgttgacgagcaggtcgcgcacacggtcggcatacttggacaggcggaagaagtaagcctcctcctcggcatcgacaacggggcggccgcagtcggggcagcagccgttgacgagctggctctcggtccagaagctctcacacggggtgcagtatttgccgacatacttgcccttgtagatgtcgcccttctcgtacatcttcttgaagatcttctggatggcggcaacatggtagtcatcggtcgtgcggatgaagcgatcatagctgatgttcatcagcttccacagatccttgacgcccttggggccttccacgatgttatcaacaaactgctgcggcgtgacgccggcctccttggccttcagctcaatcttctggccgtgctcatctgtgccggtcaggaacttgacattgtagccctgcaggcgcttgtagcgggccatggcatcggttgccacagtgcagtaggtatggccgatatgcagcttatcgctggggtaataaatcggcgtagtgatgtagaattttttctgatccatctgtgatttctctccttatatacacaaaccgttttggtgtgttttttgcgtttatgctgaactttatattccgggtattcgggcgaagcccgcaaaagcctccccttacaggggaggtggccgagcccgcgaggccggaagggctttacccgttcactgcagccacacgcgcccgggcggtttcgccgctccgtagggcggccagttctccggccgccgcctcgtgcctttagaatcccaccggctccactccgcatgcctgtaacgcatgccggcacagcacctcggtgctgtcgatgaagaacgctcccaaatgctcgtcccgcttgacaaggctcagctccgtacagcccagcacggccatatcgcagccctgctttttcaagtcatgcaccgccgcgccgaacttcgtcatgtcggcgcgcttgccctgcttgatgtcgtcataaatgactgacatgacctcctgctgatgctccggtgacggcacagcccagtcgatctgctgttcccggcaggcgatttggtaggtttcagccgccagcgtgccgtccgtggcaaggatgcccaactttgtgcagcccgccgccttggcatcggccaccgtcaggcggggcatgttcagcaccggcaccggcagtgcctcggccagacggtcatagaagtaatgcgccgtgttgcaggggattgccagcaccgtggcgccgtaatgcaccagactgaaaccgtcctgctccatcacagcaaagggatcttccctgcttttgcccatgatgaaggccgtgcggtcgggcgtggacgcccgggacgagatcacaatgtcgatatgatcctgatcccgcgcagccggggtgtggtcgatcagcatctggtagagatagcagctggcagcaggcccaagcccgcccagtatccccagcacctgtttttgtggtttggtctgcgccgtggcacacccctccttataacaacagttatattatattataaggcctgcagcaaaattatgcaagcaccaccgcccggttttgcgccattttccatccgccttgcagctggatgccttattccctgctg

SEQ ID NO: 14225 - DNA, 1840 bp, Unknown
  gut microbiota DNA sequence
ctacaccagctttgattggaaggtgaccgatgcctccgccaacggtgccaccctgacgaaggacggcgatgtgaccgtgaaggtcaccgtcaccaacaccggcgaccgcgccggcaaggatgttgtgcagctctactacaccgcaccctatattgcaggcgagattgaaaagtccggcgtggagctgggcgcctttgccaagaccaaggagttgcagcccggcgagagcgaggaggttactctgaccgttcccgtggagaagatggccagttacgatgcctacgatgccaaccacaacggctttaccggctatgagctggacgccggtgactatatctttactgtgcgccacgatgcccacaccgtggacgatgccgaaaaggcaaccctgatctgcacgctgcccgccaatgtgcagtatcccaccgacagtgtttccggcaacgaggtcggcaacaagtttaccggcagcgatgccattgacggcgtaagccttgacggcagcgactccaaccagaacatcacctacatgacccgcgctgactttgcgggcaccttccccaagaccaacacccccagccgcgctatgaccgacaatgtcaaggcgctgaacctctacaccgccgatatggcgaacggctacatccatgaggccgacgaggccatcaccaccggtgccaagaacggtctgaagatcgaggataacggcaagaccaccgagctgggctaccagctgggcgctgacttcaacgacccgcagtgggataccctgctggatcagctgactgtggacgagatggaaaacctgtttgtcaacggctacggcggtctggttgagctcaagagcgtcggcaaggcacgcagcaaggacgccgacggccccgcacagatcggcggatttaccggcatgggtgccgggaccggctttcccaactccagcacgctggcccagacctggaacgccgaccttgctttgcaggagggccgtaccatcggcacgcaggcactgcagaacggctacaccggctggtatgcccctgccaccaacatgcaccgcagccccttcaacggccgtaactacgagtattattccgaggacagcctgctgtccggcgtcatctgcggcaacactgtgcagggtgccaacgatgccggtgtctacacctatgtcaagcatttcatctgcaacgatggcgagagcggcatctaccgcgattccgtctacacatggatgaccgagcagaccctgcgcgaaacctacctgcgccccttccggatgctggtagaggagtacgatgctgtcggtttgatgagcagctacaaccgcatcggcgcggtctgggcaggcggcagcgaggcgctgctgaccggtatcctgcgcgatgaatggggctttgacggcgctgtcatcaccgactactgcgaccaccacagctacatgaacggcgaccaagccctgcgcgcaggcggcagcctttggatgtccggcatgatgggcggccagctttcctgcgagaccggctccaacagctatctgcaggccctgcgccgcgccaccaaggaaaccctctacatgtacctgcatgtccgtgtaaccaaccgcgattatgcagaaagcatcggcgataccgccgcgctgcgccacgactttaagcccgctgtgctcggctggcgtcaccttgttgcgctgatcgaccttgttgccgtggcactgtttgcactggcgatccgcggcattgtccgtgatgtcaagctgtacaaggccgccaaggccgccagagccgaaaataagaacgcataaaaataacccccgcaataccgcacaatgcaagcgcatgac

SEQ ID NO: 14226 - DNA, 409 bp, Unknown
  gut microbiota DNA sequence
agactgcctcctctcgatcttttttcaactacagctgctatgccagcctcttatttttctcaagaagctcatagattttctcaacgtcataatccggcttcattgataacgctgcctcataaattggagcgataacctcctctttttcttccagatcatccgctatctctgccacgctcttgtccttttgcagcttttttacaataagagaaattatcttttgtctttctcctaattctctgccttcatttttctgatcttcccatgctttacacatatcaatcacctcttctttctcatctatgtctatatccgttcctgcaaacagattgattgcctcgactgtctctctgtccacactgctaaacttgtcatcattatgaagcacttcctgcatcttttctttatc

SEQ ID NO: 14227 - DNA, 4260 bp, Unknown
  gut microbiota DNA sequence
gtttacaaaccacccataagcctgatataattaagcagtaaaggttccaacactatgttttgtaaaggagtgcgcctatgaaacaccccaaaagacccgctgccttcaaccttttaatgcttaccttggccggcatgatcaacgccgtcggcatcacgctttttctttccccggtcaagctgtacgacagcggcatctccggcacctcgatgctgctggagcagatcacaccgccttatctctcgctgtcagtctttctgctgctgctgaacatcccgctttttctctttgggctgaaaaagcagggccgcctttttaccgtctatgcgatttatacggtgttgatctactcgctgtttgcgtggctcatcaccgatgttttcccggtcgatgtcagcattgcctcgccccttgcggggacggatcttctgctctgcgcgctgttcggcggcgttatctccggcatcggcagcggccttgcgatccgctacggcggcgcgatggacggcatcgaggtcatggccgtcatctttgccaagcgcctcggccttacggtcggcaccttcgtgatgatctacaatatcctgctctacatcgtatgcggctttgtgctgaacagctgggtgctgccgctgtactcgatcgtaacctacgcggcggccctcaaaacgatcgactttgttgtcgagggtatcgaccgcgccaagtgcgccgtcatcgtcaccgatcaccctgacgaggtctgcacggccctgatggatacctttgagagcggcgtgacctgccttgacgccaagggcggctattcccgccgcagcaagacgatgctctactttattataaaccgctatcaggtcatccgcatgacggagcttgtacacagccttgacccgggcgcttacattgcgatcagcgaggtcgcggatgttttttccaacaacaacagcagcgactgaccatgcctgccgccgggcaaacggatttattccaaaaagcaggtgacaaaccctgtccgggtgtggtatactaaatattacaatttggttaaaacgaatttgccggggcgcgggctgcagaccttgacgccccggtgttgtcgtgtgttaccggaggtgcttgactacgaattccacatcgaaccgtatgccccgcctgctggctatgctgtttttgctgctggggcttttttgtgcggcagcactgcccgcccatgcggaggacgattacaataccacgctggaccgtctttcccgcctgcaggcgctggcgcgggagttttcctcgtcccgggacgatgcgcccgaccccattgtgctgaccctctcctacacccgcacgggtgactataacaccacgatctggcagctgactgccggcgtgcgcgataccgagtttgagagctatgtcagcagcagcgatgccgagctggcctcgctgcaatccctgcacaccgtcaccctgcccaccggcgagaagatcgacttcggccatctgctggcctcgatgaaccttgtctacaacggcatccccatcaccggcagctggggcggtgactgccagcagctggcgcagcagtattacgggcaggcgcaggacgctgccgggtacgccgccgccatgcgcgccacctttaatatggacgatgacggctcgctgagcaaattcggcgatcaggatttgcgcgccgatatggattcggtgatcgtcggctccaaggtcacgcaggacaccgatctggccgatgccctgcgcagctactatgagaatctgaccgagtacgaccgcgccaaggagtttatctcgctgagcttcggcacgcaggacacctccaacagcagctttgcggacgctgtctaccgcgccctgctggatgattccggcatgcagctgctgttttacatgaacggcatgtggtcggtcaacggctggcagatcaaggaggactacgcccccgctgtgcgcggtgcggccgacctgtttgccgaatatctggccggggccgtcaaccatgaaaaggtcaagagcgagacgaacgaccgccttgtcgccatgggcgggcaggctctgtccgatgcgctggccgcgctgggggacagcgatgccgccgcagccgcgctggctgccgccaacgagctggccgacagcacccagtccgccgtctcctcggggtcggatgcgatctccgccgcgcgggacaccctgcagaccaaatttgatgtaaagatcttccagctgattctgctgatcgccgccgcggcggccgcgtttatgctggtgttcagccttgccatgtttgttttgcaccgcaaagactcctgactacggggtgaacgcaccttttttgacagcctgacggccctcctctttatacggggagggccgtttttctgttcatataccgttcacattccgtatattcgccgcaagttatccaccgtgtataacggttatccaccgtggaaatgttgaaaaccccgttgaaaccgtggaaaactccccgctcttttcccgttaaaaagcggaaaaccggaaaattccacggtgcgcaagggattattttcaacattttccaccgcctgcctgtggaaagctgtggaaacctgtaaaatgtgtattttgcgttttacgcaacacaaaatacacattttgtaaataaggggttgtatttaccgattcagagcgctataatagcaataaccatcacccgcacctgctgtgcggcggtgcgcttgaatagataagggagagtgtacatcatgttggacatcaaaatcaccaaaacgacccatccgaaggaaaagccgcaggacgagacaaagctcggcttcggcaagaagttcagcgaccatatgttcctgatggactataccgcaggcgagggctggcatgacgcccgcatcgttccctacggcccgtgggagatggaccccgccaccaccgtttttcactacgcgcaggaaatttttgagggcatgaaggcctaccgcaccgccgagggcaaggtacagctgttccgccccgagtgcaacgcgaaccgcttcaatgattcggccgaccgtctgggcatgcccgccatcccgccggaggattttgtgcaggccgtcaaggcgctggtcgatgttgaccgcgactgggtgccccactctgacggtgcatcgctgtatatccgcccgttctgcatcgctaccgatgtgggcctcggcgtgcatgccgccaagcactaccgctttgcgatcatctgcgcgccctccggcgcttactacgccgagggccttgaccctgtgcgcatctatgtcgaggatcagtatatccgcgccgccccgggcctgaccggctttaccaagtgcggcggcaactacgcagcctccatcaaggccggtgagctggccgaggagcgcggcttctctcaggtgctgtggctggacggcgttgagaagaagtatgtcgaggaagtcggctccatgaacatcatgttcaagatcgacggcgagatctacaccgccccctgcgtgggcaccgtactgcctggcgtgacccgccgctccatcattgagctgctgaaggactggggctaccccgtgcatgaggagcgcgttgccattgccgacatcatgaaggctgccgacgagggcaagctggaggaggtctttggcaccggcaccgccgcggtcgtttcccccgtcaaggagcttgactgggagggtaaggttgcccacatcagcggcggcaagatcggcgagctgacccagaagctgtacgacaccctgaccggcatccagtggggcaagctgcccgacaccaagggctggattgtcccggttgaataatccatattcagaaacaaagtaaagaacctttcttgcgcttgcggttttcgaggccgcaagcgctttttctatgacatttctatgaacgattgtgcaacctgtacaaaacagccaccgcactttacagcacattgtacaatcacgcatcttgcaaattcgacaaaaatgatgtagtataagtacatcgaaagcgaaacgctttcaaacaaaagtgaagaggaagaataccagagcgccctgccgaatccgtagggagggtatcacttgtagaggggtggttccgttcgtattcaggcgccggcgagacgttctgtttttctccttctttttaaaaaaaacgagacggggcagtggccgtctcgtttttttgtttttctggggggcttgccgcctacaatcattgctgcaagccttccgaccatttgtaggggcc

SEQ ID NO: 14228 - DNA, 1268 bp, Unknown
  gut microbiota DNA sequence
catatcgtgaagtgttatttcgtccatattgttgcctcatgcgaaaacactgctattgtttaagttgtcaaatcatagtcaatgaatggaggctgcaacaatggcaagacatggagaaaatatccataagcgaaaagatggccgctgggaagggcgctacattaaagggcgaagtgaaaccggaaaagcaatttggggctatgtatatgcgtacagctatgtcgatgcaaaatcagcattgattcggaaaaaggtaaaagcagctgattacacggttccgcttggggcacaagagcttacattttcggttctttcggaactatggctttctacgctgaatgacttagaggagtcttccatagcgcattatcgttattccattgagcattatattttgccggttatcgggaacctacgaatttcacagctttccggcgcaaaattggaattatgcgttttacagattatttctccggttgatggagagcataaaccttttggagcaagcctttcacgggaatgcatcagccttgtccgcaggctatgtaaatacgcatacaaactgcatttaatgcccatgattgagctgtcaatcaagcccgtgaaagaaacgaacgagtttccagaagcgctttctcttgaagagcaggcggctgtcagccgatttgtttttaagaatccatccccacgaaaggcaggcatattatttatgctccagcttgggcttcggatcagtgaagtttgcggcttgcagtggggcgatattgacctcgtgcacaaggaagtccatatacgccgcggcgttcggcgtattgccattggaacggggaaaacttcggttgtgatacaagcacccaaaacagaaagctccaagcgagtattaccaatcccgccaaagctttcggttctactccaaatgctgtaccagaaaaacacattcggcagtgatgtgtggttcttatcatgcagcagtaaaccggtagagcctcgttgctacagaaagagcattcatgggtatcttgcgaaggccggtgtacatgatgtgaatccacatatgttacgccatacttttgctacaacctgcctgcaggcaggttgcgacattaaaacactcagcgagcttatggggcactctaatcccaacatcacattacagcgctatgttcataccaacatggaacggaagcggtttgcaatcgagcaagcttttggcactgaatagaaatttgtggtcaattatccgtctgcttttgcttctcaatgctcat

SEQ ID NO: 14229 - DNA, 2846 bp, Unknown
  gut microbiota DNA sequence
gctactttctgcgtatctgggccatcggcactgcgatgggcactgtggaattttttatgatctatgcaggggccttccgccgcggggacggcttctacccgatgaatgccatttttcaggatctgatgctgctctgcatcatctggcagggcatagactggctgcgccagcgccggtttgtacggggcgcactggctgctgccatgccgattctctggccgttttgcatcgcagcgctgctgatgctttttcccaaaattcaggacgcaccgatcggctcctccgtgttggcgtgggtcatcaccgcgccgctgcctttgtggacatccatcaccgatggcggctggtcttttctggccgggggcatcgtgctgtatgcactgtacaatcataagcgtctgcagctgtccgtctgggcagccatgaccttcctgtgtgattttgtgctggtctatctgcaggttcacagtctgccggatttcgccttttcccagatgttcacagtctactatgagtggctcggcgtttttgccgttatcggcatggcgctgtacaacggccagcgcggcagcggccacaagcagctgttctactggttctacccggcacatgtctacctgctttacggtgcatcctgtcttgtttacagcttactgcaataaaaggggctattatggcaaacattctggcaatcgatgatgaccgcgacctttgtacgctgctaaaaacagcgctggagcgtgacggccacaccgtagaaacgcgcacctccggcacacagctgaccgatacgctctgccggtgggcggactgcatcctgctggatgtgatgatgcccggcgaggatggctttgccgtctgccgccgcatccgcgccgagactgacgcgccaatcttatttttgaccgcgcgtaccgatgaaccgtcggtgctgatgggccttggccttggcgcggacgattacctgaccaagccgttccgcatagcggagctgcgtgcgcgggtcgcagcacacctgcggcggcagaaccgcacaccgacccataagatcacccgcggcggggtggcgctggacctttccgccaaggaagccagcgttggcggcacgcctttgcacctgacaaaatccgagtacgccatctgtgagctgctggccctccatgcagggcagaccttttccaaagaacaaatctatgaagccgtgttcggttatgacggtacagcggatgacacggccatcacccagcacatcaagaatatccgcgccaagctgcgcacagccggggcaggggaggtgctgcaaacaatatggggagtgggctaccaatggcaaaacgaaaactgacatccctgcgcagcgttttgctgcggtatctccttttgtgcggcggcgggtgcgcgctgattctggtactctggtggggcgttttaatgcagctgatagacatcggttttctgctgcctgccgtggcgtccgcccaggcctgcgccgatgcccgggagactgtggcctcaatgacggcagacacattcgattccctgcagatcagcgacctgtgccgctgggctgtagtacagaatgacacggtgctgcagaccaacatgaatgaccgccatctgaaaattgccctcaacgcctttcacggtggcagcggcaatctggtgctgatgcagtaccagtacgatgttaaaatggcggacggaagcttttgccttttacagtacgactatgccttgccctacgctgacccggccctgcgggacacgctgccggatttccagacctgctatattttgctgctggcggtgctcattctcgcttggctgggctggcagacccactgcgccgtgcgggtctttgccgccgagaccgcccggctgaacgcggccgtagatgctattgccgcccggcagctggagcaaattgacacggacggcgtgcgcatccgggaatttgccgccaccttacaggccttacagacgatgggccgcgaactgacggacagcctgcaaagccaatggcggatggagcagcagcgcgccgagcagattgccgcgctgacgcatgacttgaaaacgccgctgtccatcattcagggcaacgcagacctgctggccgaggatgctctgtccgccgaccagcagacacaggtcgaagccatcctgcgcggcacagagcgcgcacgccactatttggccgctctgcgcacagccggcgcagcacctgccgtacaaacaccgctggccagccacgccctcacggcccgactggcgcagacagcccgcgccctctgcgcgcctgccggaatccattttatattacaggaggaatggcaggggacgatccgtgctgcagaaaacgacctgctgcgtgctgcggaaaaccttttggacaacgccgccgcccacaccccgcgcggcggaaccgtcaccctgaccgttgcaaaggaaaacaaccgctttattttgcgcgtgaccgataccggccccggctttaccgccgcagcactggcccgggcgggggagatgttctacacagatgccgcgcgcagcgacagtacccatcaggggctgggactgtattctgcacgcaggaccgctgcagcccatggcggtaccctgcgggtatccaacacacccggcggctgcgccgagctttgcctgcccatttgtgaataaattgagaaattacaaaaaaatgacaaaacgctcttgacattcggtgacaaaacagttacaatttagttgcaagctaaatgaaccccaagtcaaatagctttaaccacatttttcatgtgttcttctcctcctttcttgtaaatccccgcccatccctcagggcgggg

SEQ ID NO: 14230 - DNA, 4387 bp, Unknown
  gut microbiota DNA sequence
ggggcaataagagaggaacacacctatggcaaacacgatccgccacattaatatcatcggccaccagaacccggatacggactcgatctgctccgcactggcgtatgcatggttgaaaaaccgcggcagcctcaacggtctgtatgaggcccgccgcgccgggcatgtaaaccgtgaaacgcggtttgtcctgcagcatttcggcatcgaggcaccccgcctttgcaccgatgtcagcccgcagatcaaggacatcgacatccgcaagcaggccggtattgacggcgagatgagcgtgcgcgccgcatggaacctgatgcgcgatgtcgagatcgacaccctctgcatcgtggacgaggagaacgagctgcaggggctgatcacgatcaaggacattgccgatgccaacatggatctgtttgacacggccgtgctggccgccgccgacacccgctgcaccaatgtgctggaaacgctcgaggctgagctggtcgtcggcagcgcagaggcccgcatcgaaagcggcaacatctgcatcggctccagccccgagatcatggaggagctggtcaagcccggggacattgtgctggtttccaaccggtatgaaacccagatgtgcgccatcgactgcggcgcacaggccatcgttgtctgctgcggctccgcggtgccgcgcaccatcattgcccgcgcgcaggagaagggctgcgcggtgctggcaaccccctacaacacctatgccgccgcgcggctcatctcgaccgccgcgccggtgcgccactttatgcgcacgaaggaactgctgaaattcagcgtcaatacgccgatcgaggacgccaaaaaggttatggccagcgtgcgccaccgctatttcccgattctggacgagaacggcaaatactgcggtgtcgtcagccgccgtaacctgttgaacctccaccgcaagcagctgatcctggtcgatcacaacgagcgcacccaggccgtggacggtctggacgaggcggatattctggagatcatcgaccaccaccgcatcggcaatctggaaacgaccggcccggtgtatttccgcaatgtgccggtgggctgcacggccacgattttgtatcagatgtatcaggagcagggcatgacccccagccgcgagatcgcgggcctgcttttgtcggcgattttgtccgacacgctggtgttccgctccccgacctccaccccgcaggacgaagccgccgccaaggcgctggccgcgctggcgggcgaggacatccacacctacgccgagcagatgtttgaggccggcgccgacctgaccggccgcacggcggaggatgtattcagctcagacttcaaggcgttcagccgcggtgatgtcaagttcggtgtcgggcagtccacctacatgaccgacaagtcccgcgccgccgccgaggcgcttgtggagccgtatctgcccgaggcgagccgccgcgaggggctgccgctgattttctacatgttcaccgacatgaaaacccaaagcaccgacctgatgttctacggccgcaacgccaaggagatcatccgcgatgcgttccatgtcgagccggagggcagcatggcgcgcctgcccggcgttgtcagccgcaaaaagcagctgatccccccgctgctggcggcgctgcaggcccggcagtgaccgattaacggcagcctcccgggaggttattctttcttttggcagcaaaagaaagaaccaaagaaaactgccgctgtttcgacgcagcggacccgcgacctaggggctgcacgcccctaggaaccccaaagaggaagtcggaagcttcggcggctaaacggacgcagtattactgtccgttcttaacgccgccgaaccttcctccactttaaattcgggtgttgcggggttgcgagcgaggggccacagttgagcggagcgaaactggggtagtgagcaatgcttgcccctgcggggcaagcaaccgcacgagcgggccagctttgctggctggcggcgctcgttgcgcgccgccaagcgccccgaacccccgttgccggaaacagcagtccgtaggggccgggcatgcccggcccgcagccttgcgtcagctcccggtttcgctttgtgcccccttgtatgttacatcgtagggaggggtcttgacccctccgctacctgccgttaaactgccgtcaacggtcaatccgtaggggagggattcatccctcccgggcactttcccgccgccgcaaacggccacggcggccagagggctggccaccctacaccctcactggaaaatccatgcgtagggcggggtgccctcaccccgccgaaaaaactgccgctacaacccccttgtccatctcccacaaaaccaaccgccccctccgaatcccacttcggagggggcggttcactaacctttatatatacgctaaatggtgatgcaaattactctacgtcctgcagcgcagcgtaatcctgctcgccggtgcggaccttgacgacctttgccacattgtagacgaagatcttaccgtcgccgatgtggccggtgtacagggccttggtggcggtgtcgatgatcttgtccacagggatcttgctgaccacgacctcgacctttaccttcggcagcagcgtcgcgtcgacttccgcgccgcggtacttctcaccgctgcccttctgcaggccgcagcccatgacctgcgtcaccgtcatgccggtgacgccgatgccgttcagcgccttcttcagcgcctcaaacttcgcaagctgcacgatgatggagaccttgtgcatgccggaatccagcccggcgggcagcggggcttcctgcgtgaccttgacggccgccgcgatcttctcggggctggccttggtgatgtcgtcctcgccgaggtcggtgttctcgttgacatccagctcggcgtaggtcgggtcgctgatggcaaagcctgcgtaggcgctggtcaggccgtgctcatggatgtcgaggccgtccagctcctccttctcggagacgcgcagcccaatcgtctttttgatgatcgagaagatgatgaacattgtgatcagcacccaggccgccacgctgacaacacccagcagctggatgcccagcttggcaaagccgccgccgtagaacaggccgccctcggtggcaaacaggccgacagccagagtgccccagcagccgttgacgcagtggacggagaccgcaccgaccgggtcatcgatcttggcgatcttgtcgaagaactcgaccgagaagatgcagagcacaccggccacaatgccgatgacggccgcgccgaagggatcgaccacatcgcacccggcggtgatggcgaccagaccggccagcgcaccgttgaaggtcagggatacatcgggcttgccgtagcgcacccacgagacgatcagcgccgcaacggtagccagcgcggcggccaggttggtgttgaagcagataagaccggcggaaatcatcgtgtcatcgccggtcatgctgacggtggagccgccgttgaagccgaaccagcagaaccacaggatgaaaacgcccagcgccatggcggtcaggttgtggccggggatggcgcgcggggtgcccgccttgttgtacttgccaatgcgggggccgagcatccaggcacccaggcaggccgtgacgccgccgacaaagtggaccgccgtggaaccggcgaagtcatggaagccgagctgcgccagccagccgccgccccagatccaatggccggagatggggtagacgatcaggctgatggcggcggagtagcagcagtaggcgctgaacttcgtgcgctcggccatcgagccggaaacgatggtggcggcggtggcgcagaacacggtctggaacaccgcgtagacccagaccggcagcgtgccgaaatcgtagctgccgcggatgaacgggtcaaacccgccgatgagtgcgccggaaccggcgaacatcacgccgaagccgaccagccagtagcagggtgtgccgatgcaaaaatccatcatattcttcatcagaatattgccggtgtttttagcgcgggtcaggccggcttcacacaaagcaaagcctgcctgcataaagaacacaagaaacgccgcaaccagtgtccatgttacatctgctgagttgtacataccttgaaacccctctctcttactttcgcacagaatacttgcaaaagaaatagaaaaagcgccgggcagaaatactctgcccggcgcctttgccgttcttttgttgcgcttatgctatcacagagttgcagtccagtcaagagggtggggagatattttgttcatgtttgtagaaaatgctgtacaatcagccgaaaatgatgctgaaaaatt

SEQ ID NO: 14231 - DNA, 1386 bp, Unknown
  gut microbiota DNA sequence
acggaaaacgggcaaagcccctccgacttcgcttcgctcgtcacctcccctgagaggggaggctctcacgcgggcaaagcccgcgcaaaaaggcgccccacgcagtggggagctggcccgagcctgcgaggcctgaggggctttggcaccttcccgcagccgccccaacatcctacatccatacaattccccaaaaatattcatttttttgtaaaaaaatctacccaaaaaaatcactttgtgctataatatcatcaaatagcctttttctaaggctttaccatctaaaggaggatcatccatgcccaacctagctctgcttgccctggaagccagagacggcaccgttgttctgaccagtatcactctggtttttgcgatgctggtagccctgtgccttatcatcacgctggaaggcaagatctttgacgccatcaacaataagaaaagcagcaagcccgccgcgcccaaggcacccgctgcccccgctgccaaggctgcccccgccgccaagcccgctgcccctgcagccaaggctgacaacggctccatccccggcgagatcatcgccgccatctccgctgccgtggcctctgtgtgcggcggcaatgccgtgatccgcggcatcaagcgcgtttccaagcccgccgccggctcccgccgtggtgcgtggggcgaggccggtgtgcgcgagcacaccacgccctttatgtaaggaggtatggaaatgggtgctatttttaccaacattgctgaaattttcgccaagtccggctgggcgcagatcttcttcaccgagggcggctggaagtacgccgtcatgctggcggtggcctgcgtgctgctgtatctggccatcgtcaagcagtttgagccgctgctgctgctgcctatcggcttcggtatgctgatgaccaacctgcccctcgacggcatcttccacatggacatcttcatcaacgaaacgaaccacatcgactgggcgctgctcggctcctccggcggtatggtcgactacatctatctgggcgtcaagctcggcatctatccgccgctgatcttcctcggcatcggtacgatgaccgacttcgagccgctgattgcccgcccctccagcctgctgctgggcgctgccgcacagctgggtatcttcttcacctttgtcggcgctaagattctgggcttcaccaaccaggaggccggcgcgattggcatcatcggcggcgcggacggccccaccgccatctatgtcaccaccaagctggccccgcatctgctcggctccatcgcggtcgctgcgtactgctacatggcgctggtgccggttatccagccgcccatcatgaaggcgctgaccactgaaaaagagcgtcagatcgtcatgac

SEQ ID NO: 14232 - DNA, 18467 bp, Unknown
  gut microbiota DNA sequence
caagggtatcctgcccgaaggccgcgttttcacctggaaggagatcggcaagtttccgccgagcaaaaacatcctgatgcactcggtcatctaccgcaccgagatcctgcgcgcctgcggcatggaactgcccaagcacaccttctatgttgacaacatctttgtctaccagccgctgccgcaggtcaaaaccatctactacatgaaccttgacctctaccgttacttcatcgggcgcgaggatcagagcgtcaacgaagccaacatgatcaaacgcgtggaccagcagctgcgcgtcacccgcattatgatgaacgcggtcgatgtctacgccctgccgccggagcaggccaagctgcgcgcctacatgctgaactatttctcaatgatgatggcgatctccagcatcttcctgacgctggacggcagcaaggaggcgatggccaagcgccgccagctgtgggatgacctcaaggcgcacgacggccacctctaccgccgctgccgcttctcggtggcggagggctgcaacctgcccggctggctgggcagcaagatcagcatcggcggctaccgcatcgcccagaagatcttcaagttcaactgagggcgcgccatgcaggactatacaatcatcttgtttgatctggacggcacgctgacggactccgccccgggcatcctgaactccgtgcgctacgcctgccgcaagctcggccttcccatccccggcgaggagacgctgcgccgctttctcggcccgccgcttatcgcctccttccgggagctgatgggtttggacgccgccggggccgaccgcgccgtcagcgccttccgggagtatttccccacgaagggcctgtttgagaatgaggtctacccgggcatcccggccctgctggccgatataaaatccgccgggaaaacggtcatcatcgccaccagcaagccggaggcgtatgcccggcgtattctggagcatttcggtctggcgcagtactgcgatttcatctgcggcgccacgctcgatgagacccgcaccgacaaggccgaggtcattgcctacgcactggaaacggcgggcattaccggcagggacggcgcagtcatggtcggcgaccgcgagcatgatgtgctgggtgccggaaaaaacggcctgccctgcatcggggccgtctacggctacggtacagccgaggaactgaccgctgccggggccgctgctctggccgacacagtggacgagctgcacaagctgctactgggataaatcaaatgggagacagcctgcgctgcctcccgttttttattggtcccggtcgttgtaatagagataccacccgcggaagccgtacccgatgccgagagcgcccagcgtcagcagcatagccgccttgtcgggccaaagcggcatattccgggtgcagacccagaccaccgccaatgcaaggcatacaagcaccggcaggccgtagtgcagaaatctctgcacccgcagccgcttcgggtcgccctccgccgccagcgccaatggatcgcacacctcgcaccgcacccgcaggatcgggatattgctcacatgacttgaataccgcacggccctgtactcgatgccgtccagcataaaccgcggcgtcatgccctcgtgggtgatgacgatctcctcgccgcagcccgccgcccaggccaacagctcagcggtaaactcctgcggggttgcaatggcggtgtccggcgtaaaggtaaactgccgcttatgctcggcagccgccattttccggtagtcctgcacccagccggtaaaccagccgcccgccggggcaggggcctccatccgcttaaggcagctgtccacatccagctctgccgccgttcggtctccggcggccagctctgtgcagaaggcggctgccgccgccagcttttgctgctcggcctccagccgttggcgctggcgctcagcagcctcggccagcggcagggtgccgttcagcaccgtgccgatctcctcgaccggcatatccagtgtgcgcagcatccggatcagcttcagcgcgcgcacatccgcctgcgaatagacgcgatactcattttcggggttgcgggcgggggtcagcagcccggcctgctcataatagcggatattgcgggcggacacgcccgactgctccgctgcctgcttgatgttcataacatcacgctcctttcaccttcaccttacaccctgcacccactggaaggtcaatacttttcgtaaaataaccatatcatatttcgtaaaattgtgctatactgttttcatatatcaatacaaaagagggaatttatcatgtacaaacccggtgacgataagctcgaggtccgtgaactgctggtcaaggcctttgccagcgcgtgggaggccggcgaaaaggccgttgaccgcgacacctacatcaattccagcatcaatgtgatcgactctctgcaggtcggccccgagatgatctacggcgaggagggtcagggcctgctggacgctgagctggaccacctgccggacctgctgcgcgccgacggcgcatgggtctactacgccgtgcctgcggaaaactattttatcctgacctggatggaggacgccgaaaaggccgctgccaaggtcaactcgctcaaggacgaggaggacagtctggcctgcatcgtggacctgacgcaggagtggacgcacactgaggcataaaccgtacagacgccgagaggggagggagaaccgcatgagccgcgatacgatacgcctgccgcgtgatgcttaccggctgctgcagacgctgcgcgccgccgggcacagtgcctatgtggtgggcggctgcgtgcgcgacagcctgctgggccgcctgcccggcgactgggacatctgcacctctgcccggccagaccagctgcgggcgatcttccatgaccagcggcttatcctgaccggcgaaaagcacggcacggtagcggtcatcctgcacggcaagccgtatgagatcacgacctaccggctggacggcagctaccgtgaccaccgccaccccgacagcgtgcagtttgtggacgaccttgccgccgaccttgcgcggcgggacttcaccatcaacgccatggcctacgcccccggcgaggggatcatcgatctctacggcggccgcagtgatctggccgccggtatcgtgcggtgtgtcggcacacccgccgaccgctttgcggaggacgcgctgcgcatcctgcgggccctgcggtttactgcaaagctcggctttacgctggagcctgctaccgctgccgccgcactggcggcccgcgacaccctgcgcaccgtcagcgccgagcggctctacgccgagctggacggcctgctgctggcccccggcgccgggaaaacacttgcgcagtacggcgagattctgggcggcgtggtgccggagatcctgccctgcatcggctgcacccagccgggacggtggcactgctacgatgtgtggcagcattcggccgccgctgtggcagcccttgacctgcgcgggcaggacacccgcggcgtgcgggtgctgtgctgggctgcctttttgcacgacatcgccaagccgcagtgccgcacagtcggccccgacggcgcggcgcatttcaaagggcacaaccagcggggggcgcaggctgcccgtacaatcctgcgccgcctcaaggcccctgcctaccttacggacggcgcggtggggctgattgccgtccatgatgccccgctgcccgccgacgatgcgggcatcctcaagctgctgaaccgcagcggggcgatcttcctgcggcggctctgtgtgctgaaatacgccgatctggacgcccacgccgcgacaccggaggtcgcggcccgccgcgccgaggttgagcgcttcgcctgccgcatggacgagcttgccaagaccggctgctacacaatgcgtcagctggccgtcaacggtgccgacctgatggctgcgggcatccccgccgggcccggcgttggcgcaacactgcaaacactgcttaccgccgttatggagggccgcctgcccaacgagcgggaggccctgctggaggctgcaaccgtatgatatggggagttggcatagacctgtgtgacgcagaccgcattgaaaaaagccttgcaaagccgagctttctcgaccatgtgtttgcaccggcggagcaagccctgttctccgccttaggcgaaaagcgccgtgccgagaccgcagccgccaattttgcggccaaggaggcctttttgaaggctgtcggcaccgggctgggcggctttgccctctgcgatctggccgtgctgcgccgggaaagcggtgcgccctattttgcgctgaccggccccgccgccgcgtgggctgccgagcagggcgtgaccgtccatctcagcctgacccatgagcgcggtctggcaaatgcaatcgtgattttagaaaagccttgatctttcctgtgcccctctcccaaggggggccggctctttttgtaggaggtttccatgcccggtaaaaccgcgcgcagcagcaatctagagctgctgcgcatcctctgcatgctgctcatcatcggtgaccatctgaccgggcagggcggcattgcggactataccacgctgccgtcctccttcgcgttctgcctgatcggctgcgggtcgcgcatcgcctgcagcgtatttatcctcatcggcgggtggttcctgtgtgaacagccgtacaaggcccgccgcccgctctcgctttggctgtcgctctggctctacaccgtgccggtgacgctgctctgccgtctgggcgggctggatgtctccctcggtgcactgcgctgggcgctctttccggcgtccacacggcagctgtggttcatctcggattatctgctgctgctgctctgcgtgccgctgctgaaccggctgctgcacgggctgccgcgcacagcgcatcgcggtgtgctggcggtgctggccctgccgctgctcgtctacccgaccctgttcgcggagaacggccttaccggcgataccgcctggatgtttttgtatgagtatctgctcatcgcctatctgcgccgctatccggacaaccgtctgacgcggcttctgcagcgccgctgcgcggcgctgctcctcgggctggggctgccgctcgtcaacaccgccgtgcgcgcggtgcttgaaatgcgcggcctgaccgatggcagggtgttccggtacatcgcctgctaccgcaccgcactgggcgcactgcccaacctgctggccgcactggcgctgttttatctgtttgaggggttgtccttaggctctgtccggtggatcaacgccctgtccggcacaacgctcggcgtctacattctgcaccagatccccgcgttccggggcttcctctggaacggaatcctgcaggcgcaggcgcaccacggctcggtcggctacacgctgtttgcggtggcggctgtattcctcggctgcgcggcggtggatgctgcccgcaccgcgcttgtcatgcgcccgctcgaaaaaacaaagctgttccgcaccctctgtgaaaaaggcgatgcactcgccgcaaaaatcacagccgatgattaaaaagacctccctctgcttatactttcagtaacaagcaaagggaggtcttttctatggaagtacaccgcggagaggttttttacgccgacctgagccctgtcgtgggatcggagcaggggggcatacggccggtacttatcatacagaatgagatcggcaaccggcacagccccaccgtcattgcagccgccatcacaagccgtcaggacaaaaaccgcctgcccacccacatcaatgtgcgggccgaccgctgcggtctggcaaaggacagcatcatcctgaccgagcagatccgcacgcttgacaagcgccgcctgcgcgagcgcgccggctgcatcccgcccgacgacatgcgccgcgtggatgaggcgctgggcgtctcaatggggctggaaagcgcagatgtgcatcatgatgggggatatttttgagcgggctgcgctgccgaatacgcctttcacggcaggaagttcgccgccaccggtgccagaagcgcggtcatgatacccgccacggcaatcgccagcccgctcatcgcgccctcgatctcgcccatctgcagggccttgctcgtgccgatggcgtgggccgaggtgcccaacgccagccccttggccagcgggtctgtaatatggcagatcctgcacaccgtctcgcccagcaggctgcccacgatgccggtcaggatgatgaccgccccggccagcgcggctgtgccgcccagcgtttcggccacatccatgccgatggctgtcgtaaccgacttgggtagaaagctcacggcatggctgcgctcaagccgcagcacccacgccatggccagcacactgcccagactcgtcagcacgcccgccgcgatcgatgcaaagatagcggccagattcttctccagcagctcccacttttcatacagggggatggccagactgaccgtggcgggcatcagcagccagtttacgggctgggcgctggccttgtaatcggcgtagggcacgccgaagcagctcaaaaatacgataacgaagatactgcccatcagcaggggattgaacagggccttgcccgtcttgcggttgacccagacgccagcggcataggctgccagcgtggccagcacgccccagctgccgcaatgctgcaaaaactcagccatttttatgctcctttccgcctgcgcatttctgcgccaccatgccggtaactgccatgaccagcgccgtgaccggcacgatggccagcacggcgggcagcagcagattgataagctggctgcccagctccataacaccggccgccgccgggacaaacagcagcgggaagatgccggtcaaaaacagccccgtctcccgcacctgctccagcctgagcagcccggttttgagtgcagcgaccatcagcaaaaggccgtacacactggccgggatcggcagcggcagcaccgctgccagtacctcgcccgccaggcagaacgccgtgatgcgggcaaactgaaaaatatacttcacgcaataaccctcttttaccaaaaattcgtgtaccatcataccacgcgcgtcaacattcggcaagttgtacattgcatgaaaaccgtccacattttcacaccgcagttgtaggaaacagcacttgtaatttgaaataagctgtggtatactaaccgcaaaccaatgaatttcactcgaaaagaggttttgaccatgtctttactgaaaaaactggccggtctggccgtgggtgccgctgccttgggcgctgccgcttatgtcctgaaaaaccgtgagcacggcgaggagtatgagcatattatgggcccggaggacgaggtcgagcctgagaccgagtccgccgagcccgccgacgaggatgcgtctgctgtggctgagcctgcccccgccgccgcacctgaggaacctgccgcccccgccgaaacggcacagcccgaggaacccgcggaagtgaaagagacccccgcccccaaggctgccgactttgacgcccccaatgtgaaccctgtagagctgggccacatcgaggctccccgcacggcggacggcaagttcgaccccacccagatcgttgaccccgcagtggccggtgactgggaggagcagggctgcaagggctgatataccaaacgcaaaaggcgcatctttgtttatggcaaaggtgcgccttttttgtatttgctgctgcgggatcgcaccgcggcgggcaggggactgcccgccctacacaagtgccacggccgtagggcggccagtcctctggccgccgcaccgcagccgcaattttcgcgcacaaatgtccgcgattttactacaaaaaacgctttacaactttagtgcagtaaagtataataaaatctgtatcggagcagagaggtaggaatgttatggagatcgaactcaagagctttacccctgccgagcaggcgaccttccgtctgcgcgccctgtatgagcaggccggctaccgcaagtaccgcgcctcccggtttgaggaatacgcgctgtatcaggaatatcagcgcttcctgccggactcgcaggtcatcaccttcaccgatctggacggcaagctgcgcgccatcaagcccgatgtgacgctgtccatcgccaagacggcgcagcccgccgccggggagtgcaagcgcttttattataatgaggaggtctgccgccccagccgggagagccacaccttccagaccatccaccagatggggcttgagagcatgggcgccgtagacgccgatgaacaggccgccgttgtacggctggcgctgcaaagccttgccgcgctggaagtgcccaccgtgctggaaatcagccacatgggctatctgaccgcgctgctggatgcgctggcggtgcccgccgaggcacgaggcaaaatccttgattacctgcgtgccaaaaacgcccatgagctgcgcaccgccgcgctggaggccgggctggatgcgcccgctgccgaggccctgaccggcctgctggcactgcacggccccatgggtgccacgctgaccgccgcacgcgccgcctgccggtgcgaggcccagcacaccgccctcgatgaactgcaggcgctgcagaacgccttgggcgaggccggacgcggcacccagctggatctgagcatggccgatgagatggagtattacaacggccttgtctttaccggctatgtggcgggcattccccgcgccgtgctgaagggcggccgctacgattacctgatgcagcggttcacgccgggggccaacgccatcggctttgccatctatctggacgagctggagcgtctggccgcaccgctgccccccgtacagcagcagggcggcgaaaaaacatggctgaacatcgccctgccgaagggccgccttggcgacaaggcctacaagctgctggcgggcgcaggctacagcgccaccgaggattacaacgacacccgcaggctggtggtggaaaaccccgatgcctgcgtgcggtatttcctcgtcaagccgagtgatgttgctatttatgtcgagcatggcgcagcggacatcggtattgtgggcaaggacatcctgaccgagtcgggcgcagatgtctatgagctgctggataccggcatgggccgctgccgcatgtgcgtagccggtcccgccacctttgccgatgacgaaagctgcgcactgcgagtggccacaaagttcgtcaacatcgcccgcagccactatgcgcgccgcggccgtgacattgatattatcaagctgaacggctcgatcgagctggccccgattctgggcctgtccgatgtgatcgttgacattgtggagaccggcacgaccctgaaggagaacgacctgaccgttatcgaggaatttatgccgatctcggcccggttcatcgccaacaaggcgagctataaattcaaatacgcccagctgaccgagctgctgaacaagatgaaggaggcccttgcaagatgatccgtctgtatgattttgatgaggtacgccccgaggagatcctcaaccgcgacatccgcgccgaagccgatgtggagcccaccgttgacgccatcatcgccgatgtacgcgcccgcggcgatgccgccctgatcgaatacgccgccaaattcgaccatgccgaattgaccgatgtgcgggtcagtcaggccgagattgatgaagcctttgccgagctggaaaagactgatccggagtttatcacgaccctgaagatggccgccgggaatattcgccgcttccatgagcagcagctgcacaaaaatttcgttgtcaacgacacccccagcatcgtgctggggcagaaatacacccccatccagcgcgccggcgtctatgtgccgggcggcacggctgcctacccctcgaccgttttgatggatgtcatcccggccaaggtcgcaggcgtcaggcagatcgtcatgacaacccccgcagggcgggacggcaaggtaaaccccgccattctggcagcggcggtcattgcgggcattgatttgattttcaagacgggcggcgcacaggccgtggcagcccttgcctacggcactgagagtgtacccgccgtggataagatcgtaggccccggcaacatctatgttgccacagccaagcgcaaggtgttcggcaaggtcggcattgatatgatcgcaggaccgtctgaaattcttgttctggcggacggcagctgcaaccctgcatgggtggccgccgaccttctgagccaggccgagcatgacaggctggccagccccgtgcttgtcaccgacagctgggatctggccaaagccgtgcaggccgagctggaggtacagatcccgcagctgccccgcgccgccatcgcccgcgcaagcgtggacaccaacggcaagatcatcgtgaccgatgacatgcgcaaggccatcgaggccgtgaacatcatcgcccccgagcatctggagatctgcgtggatgacccgtttgccgtgctgaactcggtgcagaacgccggcagcatcttccttggcaagaatgtacccgaggcactgggcgactattttgccggcccgaaccacacgctgcccaccagcggcacagcgcgtttttccagccctctgggtgtggacgatttcgtcaagaagtcaagctttatctactacacccgcgaggctctgagcgaggtgcagggacgcatcgccgattttgccgagcacgagggcctgcacgcccacgccaagagcgttacgatacggtttgaggaatgagtttaccgaagcggaaatccaaccgtttgcctcaatttgattatggcacagttggcgcgtattttatcacgatttgttcccgggataaagcaaaagttttcggccgtgtcgtagggggcggcgtcctcgacgccccgcgcacgctgccgtcgccgcacggtaaaattgttatcgcgcaaattgaaaccatggaaaatttttacccggatttgcaaattgaaaaatttgtggtcatgccaaatcatatccatttgattattgcagtcacccaaggcccgtccggggcgtcgaggacgccgccccctacaaccgtgcgtgccaatcaatccgttccggcatttgtttccacgctcaaacgtatgacaaaccgcacagctggcacgcaattatggcagcgcggatattacgaccacatcatccgcgaccaactcgactatgataccatctggcgctacatcgacgaaaaccacgccaaatggcatcttgaccggttttatattccggagggggagaaacacccatgagccgttattttaccaaaacgcttgcctcgctggagccgtatacccccggcgagcaactcaaaatcgctgatattgtcaagctcaacgccaacgaaaacccgtacccgcccgctcccggcgtggcggcggccgtggcggcggcggtgccggggctgcggctgtactccgatttgaccaacggcgacctgaacgccgccattgcccggcactggggcgtcaagccggagaacatcctctgcggcaacggcagcgatgaaaacctgctgcttgcgctgcgggccttctgcgatgagaacacaccgctggcctttgccgatgtgacctacagcttttacacggtgctgtgtgagcttttgcacattccgcagcacattctcccgctggaggacgatctgaccatcgaccttaaaaaatactgcggtctgcatgaaacgatcgtcatcgccaaccccaacgccccgaccagcctgctggccccggtcgcggccattgaggaagtgctgaaaacaaaccccgacaacattgtcattgtggacgaaacctatgtcgagttcgcgccggccggctcgtcctgcctgccgcttttggacaaatatgacaaccttgtcatcacccacaccttttccaagacccacaatctcgcgggtgcgcggctgggcttctgcatcgcgcggccggagctgattgccgacatgaaccgcgtcaagttcagctacagcccttacaatatcaattcgatgacccaggccgccggcgtggccgccatctctgacgaggcttatttcgccgatgtaacggcgaaagtcatcgccgagcgcacccgcacaacggctgagctgcgcaggcgcggcttcacggtgttcgactcgtccacaaactttctgtttgccgcaaccgaccggatgccctgccgggagatttttgaaaagctccgcgaccgcggcatcctgatccgccatttcaacgccccgcgcatctccggctacctgcgcatcacaatcggcacccccgaccagatgcagcggttcctcacagcgctggatgagattttaaaagggtaatgtatacagagggggaagtattatgatcgcaatcgttgactacggcgtggggaatctgttcagcctttcatccagcgtcaaaagtctgggcgcggaggtccgcgtgacccgcgatgcggcggatctgcgggcggcagatcatatcctgctgcccggtgtcggggcctttgctgatgcaatggccaagctggaggccaccggccttgtacccgttttgcgcgaagaaacgcaaaaaaagccgctgctcggcatctgtctgggcatgcagctcctgtttgaagaaagctatgagtacggcgcacaccgcggccttggacttatccccggcgcggtctgcccgctggcggatgacctgcgcgaccctgcactcaaggtgccccacatcggctggaacgccctgaacattgtgcccgggcgcgaggctgacccgctgttcaagtatatccaaaacggcgagtatgtctattatgtacacagctattacgctaaaaactgcgctgcatcgacactagcgaccagcgactacagcatccccgtgaccggcgcggtgcggcaggggcttgtgtacggcacccagttccaccccgaaaagtcgggggataccggcctgcgcctgctgaaggcctttgccgagctgtaacgacaaacggaggagatcacgatgaaattataccccgccattgatctgcgcggcggtcaggccgtgcggctctatcagggcgattacgaaaaaatgaccgtctacaacgccgaccccgtggcgcaggcgcaggaatttattgacgcaggtgcgaaatatctgcacgttgtagatctggacggcgctaaggacgataccaccgcaaacctgcagcccattgccgccatcgccaagctcggcggcttgaagattgaggtcggcggcggcattcgggatgaggcgcgcatccgccgctatcttgatttgggcgtggaccgctgcatcctcggcacgatcgccgtcagagatttcgcttttacccgggaaatggcccaaaagtacggcgcacagatcgcagtcggcgttgatatgcgggacggccttgtggctgtcaacggctggaaggaggtcacccccgagccgggtgtggcattctgccgccgctgcgctgaggcaggcgtcaaggccattattgccaccgatatttcccgggacggcacgctgcaggggacaaatctcgacctgtatcgtgagcttttgacaattcccgggctggaggtcactgccagcggcggcattgccgccatggccgagctggccgcgctgcaggtcatgcactgccacgccgccattctgggcaagtccatctacaccggcgccattgatctggcagaagccgtaaggctgtacgaggaaagataatgggggagggagccgcatgataaccaagcgcataattccttgtctggatgtaaaaaacgggcgtgttgtcaagggtgtcaactttgccgggctgcaggatatggccgacccggtcgagatggcgcggtactacaacacctccggtgcagacgagcttgttttttacgatattaccgccagtgttgaggggcgcggacttttcaccgatattctgcgcgaggtcgcaagccagatcttcattccgctgaccgttggcggcggcatcaacacgctggacgattttgaccgggtgctgaaatgcggtgccgacaaggtcagcgtcaactccggcgccatccgcaatccgggcctgatcccggctgcggcccaaaaatacggcaaccagtgtgttgtactctccgctgacatcaagcgggtggacggcagattcatgctgttcgccaagggcgggcgcgagaacaccggcatggatgcccttgactggcttgaacagggcgtcaaaaacggcgcgggggagttggtcgtaaactccattgacacggacggcgtgaaaaacggctttgaccttgagctgctcgatgccgtggccgcccgctgcgccgtgcccatcatcgcctccggcggtgccggcaaaagggaggactttctggagctgttccgcaaccacccggctgtggatgccgggctggccgcgtccatcttccacaccaagcaggtagaaatcaacgatttgaagcggtatttgcgggcgaacggtgtagaaatgcgggtgtgattcccccttcgccatgcagccacccggtaggggccgcacatgtgcggcccgcaacatttccaaaagcgtcctcttgcgggaaagccgcgggccgggcatgcccggcccctactgcgtaactatagcaaacctacactttacctcttgccaaacctcacaaaaagaggtacactaaactatatgactttaggagtgtcccccatggaaatcaccgaaaattccaagaccctcaaatttgatgccaacggcctgatccccgccatcgtgcaggaccattacaccaaggaggtcctgacccttgcctacatgaacgccgaaacactggccctgacgattgccgaggggcgcaccgtgttctggtcccgcagccgccgcgaaatctggcgcaagggcgagacctccggcaatgtgcagcgggtcgtttccatcaccgccgactgcgataaggatgcgctcgtcattgatgtcatcaagagcggccctgcctgccacaccggcgccgagagctgcttcttcaacccggtgtatgtctccgatgagctgaagcagttcacctggcagggcttgtacgcactcatcgagggccgcaagaccaacccgcaggagggcagctatacgacctatctgttcgacaaggggctggaaaagatccttaaaaaggtcggtgaggaatccactgaggtcattatcgcaggctctaagcgcgacagggaggagaccatctacgagatcagcgaccttgcctaccatgtgatggtgctgatgatcgagctgggcatttctgtggaggacatcaccaaagaactggaaaaacgacatgtgatcgaccataaggtcaagcaggaaaggatgcagtaaccatggcaggcgaatacctgaaaagctctgtgcacgttcattccaaactgtgcgatggcaaaaacactcccgaggaggtcgcagtcacggcttggaaggccggtctgcagacgctgggcttcagcggccacagccacaccccccacgaccttgaatattgcatgacccagagccgtaccgccctgtacaaggcacagattgccaagctcaaggagcgctacgcgggcaaaatggatattctgtgcggtctggagtgggacctttacagcgacgatgacccgacccagtacgactactggatcggcagcacccactatgtccgcggcccaaagaccggcaagtattatgagatcgactggcgcgaggaggatctgcgcgcctgcattgacgatgattttgacggcgatgcgctggccgtggtcgaggcctattttgccaatgtggccaaggttgccgagaagaagcccacgatcttgggccacttcgacctgatcaagaagatcaacggtgacggcaagttctttgatgagaacgacccccgctacaccgccgccgccaacgccgcgctgatgaccgccgcccgcaaccgctgcgtactggaggtcaacacctctgcggtgtaccgcggcttccgcaaggatttcttcccgtccgatgcgatcctgaaggaatggctggtgctcagcggcaatgtcgtcattaccgccgacgcccacgataccaaggcgctgactttcggttttgaggctgtcgccgccaagctgaaggagctgggctacgccaaggttcaagtgctgggcaaggacggcttcaccccctgcgagctgtaaaatgtgctgttatttttgcgcaaataatttttaaaagaaaattgccggaaggggttgacaaccccttccgttttttgtataataatacctgcattctggcggcagccactgtggagaggtgtccgagtggtttatggaactggtcttgaaaaccagcgatccgcgcgagcggaccatgggttcgaatcccatcctctccgccattttgtgataacaagtgaatatataaactcactttgacttgtggagtaatactcaagaggtcgaagaggcgcccctgctaagggcgtagggtgggaaaccgccgcgagagttcaaatctctcttactccgccaacaaaaacccgcgtatctgcgtaagatatgcgggtttttggtttatctaagcacccgtataccccggcatttacgacaatccggctttccgttctttgtgcaagctgcccaaaatcctttggttcttttgtatttcccgccaaaacttgcattacaggcgggaatccggtatactttctttattacaattatgcggaggtgcctgcaatgcgtttatttgatgtgctgggtcctgttatgacaggaccgtccagcagccatacagcgggcgcggtgcgcattggcagcacagcgcgccgtctgctgggtgagcagcctgccgaggccgagatcctgctctacggcagctttgccgccacgggcaggggccacggcactgatcgtgcgctggtggcaggtctgctgggcatgcagcccgatgacgaccgcatcccccacagctttgcactggccaaggcggccggtctgcactttaagatcagcaccgccaacctgcggggtgcgcaccccaacacggccatgctgcggctggtgggtgtttcgggccgcaagctggaggtcgtgggctcgtccatcggcggcgggcggatcaacatctgccaaattgacggcatcacgacaaatttttgcggcgatcacaacacgctgatcgtccacaatcaggacacgcccggccatgtggcagccgtcaccacctgcctgagcgggcacggcgtcaacattgccacgatgcagctctaccgctccgccgccgggggttatgccgtcatggttctggaatgtgatgagcccatccccgatgagatcgccggggagctgcgcattctgccgggcatcgtcaaggtcactatattaaatttgtaagggggcaggcaaaatggcattttcctccgttcgggatatggtcgagctctgcaaagagaccggccagccgctctatgaggtcattctggaaagcgacctgaccgaaagcggcctgacccgcgccgaaagcgaggccgagatgcaccggctctggtcggtcatgtgcgccaccagcgccggctactgccgcacagaccgctcgatgagcggctttgcgggcggtgatgcagccaaggtcagcgaggctgctgcccgcggcatactgtacgcagacggttattttgcggatgtcatggccgaggcgctgaaaaccgctgagtgcaacgcctgcatgaagcgcatcgttgctgcaccgacagcgggcagctgcggtgttctgcccgccgtgctgctgcccctgtggcggcgcggactggcggatgagaccgccatacaccgcgcactttacattgccgccgggttcgggcaggttgtggccgcccgcgccacgctggcgggtgccgagggcggctgtcaggcggaggtcggcgctgccagcgcaatggccgccgccgcactggtggacatccggggcggcacagccgagcagtgcgccgaggcgttcgccatggcactcacaaatctggaggggcttgtctgcgacccggtggcaggccttgttgagatcccctgcatcaagcgcaatgtcatcggcgccatgaacgccgtttctgccgccgatatggcgctggccggtgtggtcgggcatatcccggccgacgaggtcattgatgcgatggccgaggtcggcaacgcgatgagtcaggatctgcgcgaaaccggcatcggcggcctcgccggcactccgaccggccgcgccatctgcgagatcgtcacgatgaacggcagggaagaggaagcgtaaatttcctccgcagcaaacaaacgagcatcccgcccttctgccatgcttt

SEQ ID NO: 14233 - DNA, 17751 bp, Unknown
  gut microbiota DNA sequence
atgtggtatactgaaagaaaaactctgggaggattccatccatgaacgatatgcgttgggcgtccattgacgcctttgccgagcaaaaccgtgacaatatcctgcgcgacatcacccgccttgttgccgtacccagcgttgagggtacgccggagccgggcgcaccgttcggtgccggcccccgcgctgcactggacaaggcgctggagattgccggggagctgggccttgacaccttcaatgccgatggctacatcggctgggccgagaccggccgcatcgccgatggccagaagttccttggcaccatcacccacaccgatgtcgtgcccgagggcaacggctgggacgccgacccctacaccgtccgcgtgcgggacggctggctgctgggccgcggcgtggccgatgacaagggcccgagcatcctctgcctgtatgcgctgaaatacctcaaggacagcggcattgagctgaaataccccgtgcgcgccctgctgggcaccaacgaggagaccaacatgcacgatgtagactactacgccgagcattacccgatgcccgccttctgctttacccctgatgctgagttcccggtctgcaacggcgagaagggcggcttcaacggtgagatcgtcagcccccgctttgagaacagcatcatcaccgcctttgagggcggcgtagcccacaacgccgtgcctgaccgcgcagcctgcaccgtgcaggtggccgcaggcgcactggttccctgtgagggcgtgacctttgaggcaggggagggcggtgccaccgtcatccgcggctggggcaagagcggccatgccgccatgcccgagggtaccgtcaacgccatcggcctgatcgttgactgcctgctcaagagcggcgtctgcaccccgcaggaggaggcctacctgcaggtactgcatacactgcacgcctccacggacggcagcgcgctgggcattgccgccgatgacggcctgtttgacccgctgacgatcatcggcggcacgatcgagatgaaggacggcatcatccgccagagcttcgactgccgctatcccaccaacaccgatcccgagaagatgaccgccgccatggagaagatctgcggcgcggctgcccgcatcgagaatgtgacgagccgcgtgccgttctatattgatgccgacagcccggccatccagaccctgatcaacacctacaacgatgtgaccggcgagggcaagacccccttcacgatgggcggcggcacctacgcgcgccacttcccgtatgccgtcagcttcggccccgagcacaccgacattgccatccctgactttgccggccccatgcacggcgccaatgagggcaccccgtttgaaaagctcattgaggccctcaagatctatatcctggctctgctccgcctgcaggagatcgagctgtaagtcccagcccggcagctttcgctgccgggcttttttctttgtcagattgttaatttttatacagcagttcaattctgcatcggttgcgaaaattgttgcaattcttgcgggttcggcataaaactgccgtctgcttgcttgacttgaccttgaaaaatggtacaatgtatttgtattgttatccacccggacaggggagcagacaacgcctgcccgggtgagaatcaaaggacattgccgcgcgattcccgccgtatcggcagtcagaatggtgcggcaatgccaaaaagagaaatgggggaaatcagattgttcaaatccctaaagcgctctgccaagggtgccgctgtgccgcatgtgaaggctacagccgggctgccgaccgtcaagatgccggtgcctgagcatgttgtcattcccatgtcgatgcacatcggcgcacccgcagagcctgtcgtcaaaaagggcgacaccgtcatggtcggtaccgtgatcggcaaggccggcggctttgtgtccgccaatgtctactccagcgtgtccggcaccgtgcaggacattgccccactgcgcatggtcaacggcgcaatggcaacggccgttgccatcaagaccgatggtgcacagaccgttgacccggcctgcgtgccgcctgtcgtcaccgacaaggcaagccttctggccgccgtgcagacctgtggtctggtcggcgtcggcggcgccggcttcccgacgcatgtcaagctggctgccaacacgatcgacacgctgctcatcaacgcagccgagtgcgagccctacctgaccaccgactgccgcgagatgcttgagtgcagcgacaccatcatctccggcatcgccgctgtcatgaagtactgcgagatcccgcactgcatcatcggcattgagcgcaacaagcccgagtgcatcgaccttctctgctcgctgacacgcgagatgaagggcgttgaggtcaagggcctgccgatgcgctacccgcagggtgctgagaaaacgctggtcgagacctgcacaggccgcgaggtgccgcagttcggcccctccggcaagccgggtctgcccgccgatgtgggctgcgtcatcatgaatgtgacgagcgtgtctaccttgggcaagttcctcaagaccggcatcccgctggtgacgaagcgcgtcaccgtggagggcgatgccatcgccaagccccagaacattgaggtccccatcggcacgctctaccgcgatgtcatcgaggcctgcggcggtatcaaggagggtgtcgagctgggcaagatcatcttcggcggccccatgatgggcggtgccgcccccagcgcggacttcccggttctgaagcagaacaacggcctgctgctgttcagcaaggccgccgccaccctgcctgagccgtcggcctgcatccgctgcggccgctgcatcgaggcctgccccatgggtctggagcccgtggtcattgcgcaggactttgccaacaaggattttgatgcgctgaaggcacgctgcgtggatctctgcgtagcctgcggcagctgcacctacgcctgcccggccaagcgccccgtcagccagacgatgggccttgccaagggctggtatatggccgagctgcggaaaggaggcaaataaccgatggaagatcgtctgatcgttaccgcctcgccgcacatccgcgaagcaaccaccacccgcgggctgatgggcaatgttgtcattgcgctgctgcccgccgtgctggctgccgggctgatcttcggcgtgcgggctcttgtgctggtggctgtgaccaccctggcctgcgtggcgtttgaatacttatatgaaatgctgctgaaaaagccgaacacggcgggggacctgtctgccgttgtcaccggcatcattctggcgctgaacatgcccgtgggcatgccgctctggatcgccgtggtcggtgcctttgtggccatcgtcatcacaaagcagctcttcggcggccttggctacaactttgccaaccccgcgctggtgggccgtatcgtgctgttcctcggctttacctcccgcatgaccgcctatgtctaccccgacatggccgttgatgcgctggcctccgccacgccgctggccgtggccgacaagaccagcctgaacctgctggacatcttcctcggcttccacggcggcatgatgggcgaggtctgtgtgctggcgatcctgctgggctttgcctatctggttgccacccgcaccattgaggccactgtccccgtcaccatcgtggcgaccgtctttgtgctgaccgcgctgaacaccggcagcccctacaccgctctggtcgagtgcatgtccggcggccttttgttcggtgctgtctttatggcgaccgactatgtgacctgccccttcaccactaagggcaagctgttctacggcgtctttatcggtctcatcaccttcctgatccgccacttcggctcgatgaatgagggcatgagctacgccatcctgctgggcaacctgatgaccccgtggttcaacgcttggggccaccagacgccgctgggctacaaaaagcccaaaaaggccaagaaaggcggtgctgaataatggctgaaaatcagaataccgagaagcagagcgccttcaaggagcttgtgctgcccgttatcgtgctggtcgttatctgtttgatctgcagcgcactgctggctgtgctgaacgatgtcaccgcccccatcatcgaggcgaacaaccgcgctgaaacgctggccgcctatgtctccgtcctgcccgagggcactgtcaccgatgacatgaccgaggtcgagggcctgaccaccgacggtgtggagggtgctgtcacgacctctgccggcgcggttgctgtcaaggccgcagcctccggctactccggcaaggctgtcaccgtctatgtcgccttcgacaccgagggtgcgatctccgccatctcgatcgacggctccacccagaccaccggcatcggctccaaggtctccgatgacacctttgcctccggctttatcggctggaatgggggagaggttgcctccggcagccccgtggacagcatcgccggtgcgacctactccagcaacggcgcgttcaacgccatcaatgcagccatccgctgctacagcaatgagatcaagggggtgcagtaacgatgaacgaaaaaccgagcaagtggaaggtttttacggccggtatcatccgtgaaaaccccgttctgcgtctggtgctgggctgctgctccgcactggccgtcaccaccaccgtttccggcgccgtgggcatgggtctggccatgacctttgttctggtctgctccaacattgttatctcggcgctgcgcaaggtcatcccggccaaggtgcatctgccttgctacatcgtcatcatcgccaccttcgtcaccgttgtgcagatggtgctgcaggcgttcatccccgacctgtacaaggcgctgggcgtctatctggcgctgatcgttgtcaactgcatcatccttggccgtgccgagatgttcgcctgcaaaaacaccgtagcggactccgcactggacggactcggcatgggcatcggctacatcctgacgatgctgcttatgtcctccatccgtgagatcatcggcagcggtacatggatgggcatcacgatcatccccgagagcgttgaccgcatgaccgtcatgaactccgccccgggcggcttcttcgtgttcggctgcctgatggccggctgtgtctggctggagcgcaagctgaacaagcccattgagcgcaagagctgcggcgatgtcatgctggaaaaaattgacgccgcgaaagaagaacagaaggagggtgccgcacaatgacttctcatatcgcaacatttgccaccatcttcttcagcatgatcctcgtcaacaactatgtgctggtgcagttcctcggcatctgcccgttcctgggtgtctccaaaaagctggattcctccgtgggcatgggcgccgccgttatcgttgtcatggtcattgccacggccgtgaccttcccgctgcagatcttcctgctggatgcctatgatctgggctacctgcagaccatcatctttatcctcgtcattgccgttctcgtgcagcttatcgagatcacgctgcgcaagtatatcccggccctctaccagagtctgggcgtctacctgccgctgatcaccaccaactgctgtgtgctgggcgtcaccattctggctgtgcaggactactcctccgttgtcgctgagtacggcttcggccttgcctttgccgaggccctgatctgctccgccggtgccggtgtcggcttcctcgttgccatgctgctgttctgcggcgtgcgttcccgtgtcgagaactccaacccgccggagagcttcaagggcctgcccatcacgctggtttccgccgccatcacctccctgagctttatgggcttcggtggtctggtcgaaaacatcatcaacgcgatattctgagaaaggggaataaagagaatgaacccgatcgtatttgctatcgttgtcgtggtggtgctgggtttggccggcggcgtgatccttgtgctggcctccaaattcatggccgtgtatgaggacccgcgcattgcacaggttgcagagtgtctggccggtgccaactgcggcggctgcggctacgccggctgtgccgactacgccaaggctattgttgaggacggcgcccccaccttcaagtgcgcgccgggcggcgataaagccaccgatgccatcaacaccatcatgggcaacgccaccgatgaccgccccagcctgcgcgccaccgtgatctgcgcgggcggcgagaactgcggcacccgctttgactatcagggcatccagacctgcgctgctgccaacggcattgccggcggtcccagcgcctgtgcctatgggtgtctgggtctgggtgactgcacccgcgcctgcaagtttgacgccatccatgtcatcaacggcgtggcggtcgttgaccgcgaaaaatgcaccggctgcacagcctgcaccgttgtctgcccgcgccatgtcatccagatgaagcccatcgccccgcagcctgcggtcaaatgctccaacaaggacaagggcgttctggtcaacaagacctgcaaggtcggctgcatcgcctgcggcctctgtgtgcgcaactgcccgaacgaggctatcttcctgaaggacaatgtagccgccatcgactacaccaagtgcaacggctgcggcacctgcgtttccaagtgcccgaagaaggccatccagtgggtcgagggtgccccgcgccccatcgatgcccctgtgcccgagcacgaggtcttaaagacccgcgtataagctaaggtaagcacccctgcgctccccgccgaatcggcggggagctttttgttttacccgtgctttcatccggctctgtagggaggggtcttaacccctccgcaaaacttggcggcagccgctgcgctgcagtgaacggcatatatgcgtcccctgcaaactcacggcaagtccgtaggtgcagcatatatgccgtccgtgccgctttgcagcagcaataacaccgcacggaggggtcaatgcccctccctacaaaccatattgcagaggacggcacccccgacgccctacaaatgccgcccaataaaaattttctcaaattatttttgaaaagaccaagacaaattcctaaaactatgctatactgtgcctaggataataatcagaaaccgtatttatcaggaggtttgcagttatggaaatcaccaaggatattttgtatgtcggcgtcaacgaccatcttgtcgatttgtttgaggggcagtacgacgtgcccaacggcatggcgtacaactcctacctgatctgcgatgaaaagatcgccgtgatggacagcgtggacgcccacttcaccgacgagtggattaccaagattgccgccgcgctgggcgagcgcgcgcccgactactttgtcgtgcagcacatggagccggaccactccggctcggtggccgcctttgcgcaggcctacccggagaccacgatcgttgcctctgcgcaggccttcaatatgatgaaggcttacttcggcaccgactacgccgaccgccgcgtcgttgtcaaggaaggggacaccctgccgctgggccgccataccctgcattttgtcactgccccgatggtccactggcccgaggtcatcatgacctacgatgacgccgacaaggttctgttcagcgcggacgccttcggcaagttcggtgcgctcgatgtggaggagccgtggctgcccgaggcccgccgctacttcatcggcatcgtgggcaagtacggcgtgcaggtgcaggctgtgctgaaaaaggccgccggccttgacattgagaccgtctgcagcctgcacggccccgtcctgcacaaggagcagcttggtgatgtgctggccgcgtatgacacatggagcgcctaccgccctgagacggagggcgtgctggtggcctacaacagcatctacggccacaccgctgaggccgctacccggctggccgaggctctgcgcgccaagggcgttgagaccgtctcgatggatctggcgcgctgcgatatggccgaggccgtggcgcaggcgttccgcttcagcaagctggttctggcaacacctacttacaacgccgatgttttccccttcatgaaggacttcatcaaccacctgaccgagcgcaactaccagaaccgcaccgttgccttcatcgagaacggttcttgggcaccgatggccgccaaggtcatgcgcaagatgcttgagaacagcaaggccctgacctttgccgacaccactgtcaccgtcaagggtgccctgaacgatgcctctgaggctcagatcgccgccctggccgatgagctgagcaagtaacccctatacataagcgcgcgccccagaccgcctttttcgcggtctggggcgcgcttttctttgccgcgtacacagtccgaagaaaaagtgttgccaacaaaaataaaagccgcagatactgctatctgcggctttgtggtggaggatgggggactcgaaccctcgacctctgcgatgtgaacgcagcgctctaaccagctgagctaatcatccatgtgcgattgacaaatgatattataaaggattccgccgcgtttgtcaagcgccggacacaatttttatccgcagtttttccaaagtatgcttttgccggcaggatgaaccgccccgccccagcatataggggagggcacaccggccgagcgccttcacttgggttgttattctgcgcacattttcgcacgctctgttgttatccacggcacaatttttcggcggcgcgcccctcggcgttgttatccgggacacaattttccccctcccgggttggagcggcacgcacagtttgccgccccgctgttgttatccagcgcataatttcacgcggccgctccctccaagatttccatggcagagttgttatcccgcacacattttgcatccttgctccgtcctacccgctgttgttattcagcacacattttatgcctgaaaaaaacgcagttgttatcggcagcacaattctgccgtgcgggattttgactttttgcagttttctctgttgttattctgcgcacattttacagtttgtagaattttgataaggttgttattcgcagcacaattcgcaaaaaagaacgcttttacgccggtctattgttgttatacaaggcacaattccaaaaatccttttcatgagttgttatttgcggcacattttaggaaaatctgtatttttccttcccccgttgttacggtcagcacagttttttctgtatgccgggcacggttgttatcggcggcacaattgcggtctgcaggatttttgcatccggggttgttaaacgcagcacattttttgcagagcagcttttccgcaccggtattgtaacagagagcacaattcaaaaaattcttttttatggttgttatacctgacacttttcaaaaatcccacccaaaattgcgaccgcagattttttgcgcaaaaaatatttttttgcgttgttaccgtcggcacattgtagtgcagcgcacagcccggttgttagacagcgcacagcagggttggaatccaccgcacagttttgttgtaattttcgacatagctataccttatttctaaatatatataaatatagcctaaaatttccaaaaacaaaaaacgcatatttccggcgcggaaaaagaaatgtgctgaatgttacaataattgacacccggcgcacaatctggtattatacgcttaacgaattgcgcgatacttttcgggaaattcgcatgcttttttagatttttagaaaattgttgttatttaaagcacatttccggactgcgcagctgtaaggctgcgggtttgggatgtgtatttttcagtgcgtgtaaaggcattctgtacaagtcccgtctgcgggtgttgtgcggcaatgcctgagaatgaggttttcagcatggcttcttacacacccaccccctcggcctccaaggcagggatcaaaaacggccgcaccaaaaagacagcggccaaggccggcgccaaaaacggcaaaaagcaaagcaccgccccggtcgctacctacagcggccgcggcagccagacgattgtccggaaatccaacgacctgatccagaacgcaatgtacagcctttcgctgagtcagcaaaagctgatgctgcacattttcgccatgatcaagccgtcggataccgagctgccccgctatgagatgtcgatctatgagtttctcaagctctgcggcgtggacccccacaacggctcgatgtacaagcaggtcaaaaagaacatcgaggatatcgctaacgccaaggtacagtggatccgtctggcaggcacccaaaaaatcacgatgttccgctggctttccagcgcaacgatcgatgagggcaccggcaagatcgtgctgacgctggatcagtcgctcaagccgcacctgatccagctcaaagagttctacacaacaatgaacatcacctatacgctcccgatgaagagccagtatagcttgaagatttatgagttgtgcaagagctaccagaatctctacctgacgaaaaagcagaagggcgaaccgctcgtctggaacattgaaacgctgaaaaaacaggtggactgcaacgcagccaactgggcccatgtccgccgcacggtgctggacaaggcgaaaagtgagatcaacgggcacaccgacatttattttgactatgaggtctacgaaaaagaccgccagcgcgtcattgccatcgccgtcacgattgagccggtggacaagcaggtcgcggatgacaagctgaacgagatcaccaaatccatgtcgagcaaggtgcgcagcaagaaaaacaagctgacgctggcagagaccggcactttggacgatgacccgaatgtcctgacgctggagtatgtctcggtgcctgagacaacgatcccgtattcctacggtgctacgccggaaatgctgcgccaggagctggaggtcaaggcagagctggataagctggcacgggagctgaccgccgatgagatggaggctgtgcataccatcatcggcgccatggtcaagatggccggaacgccgcgcggaaatgacaagatgattgacggcggcaacgcgcatttcttccagacgatgaacaatgtcatcgacaactgcggcggtctgcgccgctggttcgagggggctgcgacccgctatgccgccaaggtcatcccggtggcacgcaccaagagcgcgccgctgccgtatctgtcccgtgcgatccttgaggatctggaaaactatcgtctttatgtcgtgggcggtatgccggaggagttggaggacgaataccccgaaacgccggatatcgtggagacaactgactttgtggaaacagacgccgagccggtgaaccagctggaaccagacgatgctgcgacaaaaaaggaaatcacggcagccctgctgcgctacatcgaccgcgaggcgctctcagcaaggctgacgaccggccagatggaggcctttgaggacatcctgcagatgacagcctacttctgccgccgtaatgtcaagggcaaggatgacggcatgatggagggcaaggccaacatgcagtttttggatgccctcaataaggtcatcgcccgctatgaaagcctgaccattctgtttgaggcgatggcggtcatgatggactatgacacctactggaaggatttgatgaagaatcccaagatcaagaatccgaagctggtctttcagtccgaggtcgagaaggcgctgctgatgccctccgccgtgatcggcgcgtatactgcccgcagggaccagaatgacagtggccgccctgcaagaaaagagtacaactggacgaaggtttttgacgaagaataaccgcaccgtctgcaaaatgtgcgctgaataacaaccaaagcccgtatctctcaacgcgagagatacgggctttgcatatttattcagatactataaatattcacaaccgctttacaaccgcctcgatggcagccttatccagcccttcgccgatgacgatcagtacctcctgaccgtttgggatcggctgcagggtcattgcatcccgggcggcattcagctccagccagccgccgttttcgggaatgaagcccttgatgcgcaggatatggccgtaccctgcgccctgcagcagcgtgcgtgcggcccgctgcagctgctctgccgtgcggcccagctcgagaaaatacagcgaggtgaacgcctcatgctcgtcaaagtgcagctttacatagcttgtctgctgccagccgcagcggtcgatgcgttcccagtccgcatcggtcagcgcggcccagtctttgcagaggacatcgtcaccgaagcggcgggggcagcggcaggctgccagcgcgcgattcagatgcgcaaccaccgcctcggcctgcgcgcagcttgcctgctgggcgcggctcatgaccaccagcccggcgctggcagcctccgaggccagcagatactccgcctgcggggagagtgtgtcctcaagccgagcatccacgattgcaacgacattgcccagcgcgtaccagcggtccagcggctcgtcccgcaggatgtcgtagaactcgtccacatcaaagatgccgcttggctcaatgaccacccggtcaaagccgcgcatcgccatcgagattagcttggtccgcatgcggcgctgatgggtgtcgcagtcgcagccgccgctgatcgtttcgatgtcgcagcgctccccgatgaggtcctgcagcagcatggcatctacattcaccgcaccgaaatcattttccagaatacagacattgtgtccctgttggataagatattgtacatatttgcgtaaaaatgttgtctttccggagcctaaaaacccggtgatgagatcgacctgtaccataagcatccctccctatggaaaacagtatagcccatttgcaggcaaatgtccatgaaagcagagaaaaaggctgtgcagggcggataaagattttttaaaaatcttgaagtttttttgaaaaaagcgttgacaaatcctgcggggcacgctataatatatgagcgttgagggcagacgcccaagacacaaaatgcgatggggattcgcataatggtagtgcagcggactctgactccgcccgtgggagttcgatcctctcatccccaaccacaccgcagcagcttggctgctgcggtttttctttccggggtgtagcgcagttggtagcgcgcttggttcgggaccaagaggccgtgggttcaaatcccgtcactccgaccaaaaggacctccagcttaggctgggggtcctttttgtcgccagagggacgagggtttgaacaggacggcgcgccgcagcgcgcaaaaaacagtccggtggaaaatcccgtcactccgaccataagcctgtgacatctttttgtcacaggcttatttctttttgtgttgcctatatattacatataaaataggtaggcgcaatcatcataaccgataagaacaccccgcggcgagagggtacgctcccctcgctgcggggtgttctggtttatttcaggttcggtcggtcctgatcgccgtcggccttgaacatgacgaaattctccggcttgtttgtaaagtagtaatattcggtgttctcgtgcaggggcggggtcaggtagttgggaatgatgcagccatcgctctcaacgcgctcggtaaagccggcggccagccagacatcggcagggataccggcgttgtagcagtccatgtactcggcgccctcgtggttcaggatcgcgtccagcgctgctcccagacggggcagcacactgtcctcaccgatgaagtccaccagccgcaccacggcggcgcagccggtctccttggcggagactgtgcgggtcacgacataggccagcagcttgttgttctcgcaggcggcccagacatcatatttgaagtgcgggtagtggaagtaccgccgccgcatgtaccacacatccttgcgcggtgtgtggggcgtggcgggcatgcccagcgggatcaggtcggcggcatcctccaccttggcaaggcccagatcgcgctggaccgggggcagggaataccgcagcggcttggcaaggtagtaagagcggcggcggcccagacggtagtagtggggaagccgttcggcccgccagccgaggaactggtagaaggtgcaggtgttggggcggatgttgttgcaggcaaccacatcggcgttcaaaagcccgggcagggcgttcatcagctccagcccgacaccgttgtggcctttggcggccacccagacgctgacccagatgtccggcttgcgccgggtgttggccaatatgtatccggcggcgctgacatagcggccgtcctcctccgccacggcaaactggggcacaccgccgcgcccagcgtagtagtggtggtacagctcgggccggttcagcagcggcaggcgcatgtcaaaattgtcgttgataaaatcaatgatggcggcgtcctcgccgaggcgcgccagccggaatgttgtctcagacaatggccgaccctcccgtgaccggcagcgttacgccggtgatgaaccgcgcctcgtcggagagcaggaacgccatggccgggaccacatcggcgggggtcgcgttgcggcccatcgggttttcctcagcggcggcctgcacgatcaggtcgggggtgtccttcaaaaagttggtttccatcatgctgggggccacgcagttgaccgtgatgccgaagcgggcatactcgacagccagactcttgacaaggccgccgatggcgctcttggccatgacataggcggcggtgttcttgggcgggcagccgatggtgtagctggtctggatgaacagcacgcggccgaattttgccttggccatggcaggcagcacggcgcggcacagacgcacggcgctgtggacctgaatctcaagatcgcggtcaaagcgggtttggtcaaacgccttgaacttggcattgaccacgggcagggcgggcagatggatgaaatgggtcggcgcaggggcggacgatgccagcacctgcacaaaggtgtccaccttggcacggtcggacaggtccacatcaaaggggcgcacctgtccggggaagcgggcgcagaggtcggccagcttttccagatcgccgcagccctgggccagcacagtcgtgtcggcgggggcatcggccagcagccgctcaatcagtgcgcggcccacatcgctggtggcaccggtgataagataggtataagccatgattttctccttacagttgcaggggcggcaggggggctatttcgccagcccggccttgatgacgccgcgtgtcacgcgcttgccgtcctgattggtgatgaccgccttgatctcggcctcgctgccgatctcactgaccgagacaacggtccccttgacggtcagcgtgtccccgatgaagatgggcttggcaaatttacactcaacgccgtggagcaggcaatgctctccgggcaggtaaacgcctgccagtgtcgaaaagaagctggcacccagcatgccgtagacgacccggccgggaaagccgcggcccttggcatagtcggcatccatgtgaatgggggagacatccccggtgatggcgcagaatgcgtccatcatctccggcgtgaccgtgacggtgaattcctcgctcaggccgggggtcatttccgccagcgtgtagtggttcatggcagactcctttgtatcattggaaaaaggcggcaaaattgccgccataaaattatgcaaaagttatgtgggggcagatgtctgcatccgcctgcgggatcacaccatccgtgcgacgagatccagcagatcgccgacatccttcaggccgcggacatccgccagcttgaacttgatgttgaacttcttctcgatggcggtcagcaggttgatctgctccagactgtcccagtcctcaatatcgtccgcgcaggtgctgcggttgatctcaagggagtcatcgtcaaaattatcgcggaaaatatcctgtaccgcgctcagaatttcctgttcgctcatagtaatagctcctttatatatatggtagatgcctatactataccataaaaagggtgcggacgcaagaatcaaagtccgtaatcctccagccgctgctgcagctcggcctcgtttgcaagatagacgccctgctgcagggccagcacatcgctttcgggcagcaggtgtgtgtagatctcctcataggtggccagcgggccggtgccctcggctgtatacagggccgggtggccggcgcagtcccgcagcaggtagcggggcggggcagcctgcggctgcccgcgcacaagccatgccagccccgccgccaggcagagcaccgcagccgccgccagcagcgcgagatataccccgcgcgggctgatttgtctgttttgcataataattcccccttgcacggttagtatggccgccatgacagacaaaaacaccgaaagttgtgaattttgcgtccgatactgtacttttgctgccgttttgtggtataatccattctatagcattgtgcattttcgtgttacggcgtaaggccgtatcttttatatggaccaaaggaggcggttcccatagaacccaagcagcagcgccatatctccacagatggcgtaaaaacgaccgcaggtgccaccggtcagcccggcgcaccccagaacaaccagaacaaaaagaaaaaaccgaaaaagcgccgcagcatcattggtatgatcctgagctttatcggctgtgtgctctgcctgtgcatcatggcgggcagcgtgggcggtgtgctgctgtccatgtatatcgtgcaggtcacggcggatgatgccgagacgctcgatctggacaaccagaaaaacaagcagactacaatcatctacgacaccaacgttgacgaatacgcccagctgacccgcggcgaaaaccgcatctggcgcgagctttccgccatgccggacaacctgaaaaatgccgttgtcgccattgaggacaagaacttttggaccgagcccggcatcaacctcaagggcacgatcggcgctgcgctgaacgccttcaccggcaaccgcatctggggcaccaaccgcggcgcctccacgctggagcagcagctgatcaaaaacctgaccggcgataacgagcaggacaatatgcgtaaggtgcgcgagatcttccgcgcgcttggtctggacaacaagtacagcaaggagactatccttgaggcatacctcaatacaatcccgctgaccggtatcgtccacggcatggaggccggctcgctcgaatatttcggcaagcatgttgaggatctgaccctctccgagtgtgcggtgctggcgtccatcaccaagaacccgaccaaatataacccggccaccaaccctgaggagctcatcaagcgccgcaaccatgtgctgtatgagatgtgcacgcagggatatatcaccgaggcggaattcaacgccgccaaggccgagaccatcaccctgaccgaaagctcggccatggccgagaacgcgacccgctcttcgagcaactcttggtttaccgatgccctgtacaacgagctgctgacccagctgcaggaggatctgaactacacgaaggacgaggccaag

SEQ ID NO: 14234 - DNA, 3291 bp, Unknown
  gut microbiota DNA sequence
ctattcccaagagtgaaatattgccgagcacatggtctattctgctgccggttgctccaagcaacactatgcttcgtgcaccctctcttatggcaagtcttatggcatactctgtatcagtatcatcctttatgggattgagcctgtgtatctcggtctgtccctttctctcaaaaaactccaaggcctttgttgtggctgaatcgaaatcacctacaattatatcaggcgtgacaccgttttcgtacaggaaatccattccgctgtcagccgcaattatggcatctattccgtcagtctttatctcatttaagccgaattccttatctatttttccaccacatacaatcaaatacctcattttatccaccttcttataaataacatatccacatttgctacagccccggaagcatttttgttttaacctgcatctgttacatcatgatattcagaaaaccctttacattttcttctatatctccgctaaacaccgcacttcccgcaacaatgatattggctcctgccgcaagcagtgtctccacgttctcaagattaacaccaccgtccacctcgatatcagccttatttgcggttttctcaagaagtgcctttaagtcgcgcaccttgtctacagtgtacggaataagcttttgtcctccaaagcccggatttacagtcatgataagcaccatgtccaccttgggaagcacatactctatggctgagagcggagtagccggatttaatgctacacctgccagtatgcccttttcctttattgcctcgattgtcctgtcaagatgcttacatgcctccgcatgtactgtgatgatatctgctcctgctgtcgcaaaatcatctatatatctgaccggctcatctatcatcagatgcacatcaaacatacgctctgtacactttctgattgtctttatgaccggcagtcctattgatatgcttggaacgaagctgccgtccataacatctatatgcacatactgtgctcctgcctcatcaagctgcttaagctgctctccgagtattgaataatccgctgataaaattgatggtgataaacagttcatgttttcctccgtttgattatgctttaaattaatacttttgtctgtttttaagctcctcatataaaagcttataattatcataccgcacctgcgatattttcccatctgcaagagcttccttcacaccgcagtccggctcatttatatgactgcagccctgaaacctgcaatatggctcatactctacaaactccggataacatgtccacagatcttccttttcaaagcccggcacatccatcgagctaaagcccggtgtatccatgatatacgtgccatcctttatagggataatctcagaatgtctggtcgtatgctttccgcgctctattttctcacttatatgtccggtctccatctgcacatcatcctgcagacagttaatgatagatgacttgccaactcccgagggacctgcaaccgtggtcgtccttccctctaaaatgtgctttatctcatctatgccctcacctgttttcgtgctggtaaaaagcactctatagccagccggctcgtatatgcttttaagctcctgctgctctttaggtgtgattaagtcctttttgttgaagcatatggtaaccgggacatgctggtactccatcatacacaaaaacctatcaagcaggttgaaattgggatccggctttgcggatgcaaaaataaccagggccatgtctatattggacacagccggcctgataagttcgtttttccgtggcagtatacgttcgacattgcctatgtgcttttcatcatcgaggactgctatgtcgacgatatcgccaaccagcggctttatcttttgttttctgaaggtgccttttgctttgcactcgtagagagtgccgcctgtggcagtttcttttgcttctttggtttcttctacgtagacgtagtagaagccggcaattcctttaataatttttcctgtcatggttttccttgtattgcttttgtatttcaggagtcacgctttcggcggggtgcatgccgcgctttgaggttatgtgggtggcgggggcaggcatatattcctcttaaaaaatatgaagccagccccgggctctcctacggacaggctatggcttgctctgccctgttttttcctcgatagttttatggcaccccggggcatttcatattttttcctcggaacacatgcctgccccgctatctacagtccttctccgcgaattcaggttctcgtccgcgagttggtgtggtagtggggtgcggatagcaccacttcgtgggtgctatccgatggctacaataaggacatgtattgccatccacgttttcatcaaattatggtacttgtacagaaatcgttttttctcccggcttttcacctgttacatttccattctcatccttgacaggctctgtatacttccatgtaaccgttactgtacctgttttacagttcattgttccacttactgtaactgaagctgatgttacatcacttccgcttgcataagtttttccgtcagaacccacaagtgaatatgaaccacctgtaatattaacttctccgatatcaagcttaactgtcttacttacgttagttgatatctcctgcttacccttactgagtgtaagtgtgattgtggtgcctgcggctacggtttcaccggatttggtctggctgattacgctgccggctggtactgtgtcgctgtactgggagtcggcgtaggtgtacttgagccctgctcctgcgagggcgctttctgcatgtgactgtgaggcgcctactacgtttggcacggtgattggcttctggcccggtgagagggtgactgttactgtgctgccctttgcggcctgtttctttgctgatggtgactgtgctgttactacatctgctgctacactgtcattgtaatctccatactcgaaggtgacactaaagccggctgactcgagtgtgctctttgccgagctcttggtctttccgattacacttggtatcttgaccatctctgatgtactatcaccttttcctgcgataactacattaatctgtgaaccacgctttactgtatctccgcccttaacatcctgctcaaggattgtgccgtccttttcatctgactgctttgtctcaaatgcaaatactgtgaggtcaagctttaagcggtctactgccttctgagcagcctccactgacatgcctctgatgtcaatcatctgg

SEQ ID NO: 14235 - DNA, 2484 bp, Unknown
  gut microbiota DNA sequence
tgtgactctgtctgctgtgactctgagttctttttgccgccaaacttaaacactcctgccactgaaagtgcaagatatatgataactattacaatgattacggctgttactatacccatgattgtgattgctttatccatctttggatttaaaagcttgccgtcatcatcatcgtcttcgtcgtcatcatcgtcatctaagagtgactcatcatattcatcatcatcgtcttcatcgtcagcatactcatcatcattatctgcaccggtatcatcatcgtttaagtcctctgcgacacctctgccctcttttatcttgtcaagctcctccgggcttataaccttggtcttgccaccgtcaacgagtggtgctattgtgacgaaatcctcatcaggatgcgcaagagagcgccttatgtctgtgagaagctcctcaatagtctggtatctgcgatccggtgtcttttgtgtacactttaagatgattttctcaaagctgattggcagatccggtgcgtagatgcttggccttgcaatctcctcctgtaagtgctgcagtgcaactgccactgtggtatcaccgtcaaacggcacacggcctgtaaccatctcaaacattacgattcccagtgagtaaatatcacttctgccatcgacgaagccgtttcttgcctgctccggagatgcatagtgtactgaacccatcacatctgagcttattgtatttgaagatgtagcctttgcaattccaaagtctgtcacctttaccttgccgtctgtagaaataatgatattctgcggcttgatatcacggtggatgatatttttattgtgagcagcctctattccccttgccacctggattgcaatacttgcagactccttgaatgacagctgtccctttttctcgatataagtcttaagtgtgatgccctcgacatactccatgacaatgtagtacagaccattctcgctgcctacatcatagatatttacgatattcggatgctcaagtcctgctgctgactgtgcctcagcacggaacttggtcacaaatgaactatcctccgaaaactcctgctttaaaacctttatagctacaaaacggctcagtatatggtcttttgccttgtatacatcggacatgccgcctgcgccaaccttgcttaggatctcatatcgatccgataaaaaacttcctatctctaacatctgttattacctcgtcttaaaatggtttaataatcattacagtgatattatcgcggccaccgtttgcattggccatggcgacaagctgtgacgctgctgtctcgatattatcattttgcctaatagtatcgcatatttcttcatctctcaccatattggtaagtccgtctgtacacagaagaatcctgtcatcctcacatagctcgacctcaaagaaatctgcctccacatgatctgctgccccgacagctctcgtgatgatattcttgtccggatgaactctcgcctcgtcggcatttatctcccccatcctgaccatctcatcaaccagtgaatgatccctggtaatctgtctgatctgctctgtgccacctacaatataaagcctgctgtcacctatattggccacaaaaagcttgtttcctataatagttcctatgactaaggtggtacccattccacgcttagcttcatccccacgagactcagccaccaaaagctcatttgccttgttgatagcctctttgatgatggataccggttcatccccggcatttctcgataccgatgcaaccacacgctctatagtgtatctggaagcatagtcaccggctttgtgtcctcccattccatctgctacgatgaaaagattcggaagatttcctactgcagtgtcagacgagaaataaaaatcctgattcatctcacgaatagcacctgcatccgtaatggaaaacgtcttcatctagtttattcctctctctttatctatatgcttcttgcgaagctgtccacaggccccgtctatatctctgcccatttcccttctaatagtaacattaattccgtttttttcaagcctatttttaaaagcctctataacacccttgttggactgcacgtagtcgcgctcctttatcgggtttaccggaatcagatttatatggcagttcatgccatgtacgagtgccgaaagctctgcggcatcctcggctgtatcgttcactccgcctaccaggctatactcaaaggtgactctgcggccggtctgtgcaaaataatatttgcatgcatcgaccacatcatgtatatcatagctgtttgcaaccggcatgagagcttttctcttttcctggttggaggcatgcagtgaaagcgccagcgtgatagaaagcttttcatctgcaagctgcttcatgcgcggtacgagaccacatgtggaaactgtcagattgcgctgactgatattgattccgttttcatcagtgagaag

SEQ ID NO: 14236 - DNA, 817 bp, Unknown
  gut microbiota DNA sequence
cgaaacgaccgctccgccgactgcaattccggagcagcagcctgcttcggatgaaactacaccggaaacctccgttccggaaccggagcagatgcagcccgccgaagcgcttccgaactatgaaccggcacaggcctccggcgaaccggatgtcgatctgactacgctcagcagcacgatggtctactccgaggtctataacatgatgtacgagccggatcggtatctcggaaagcgcatcaaaatgaatgggcagtttgcggtctatgagaatccgaacaccggcgcggtgtacacggcctgcatcatcacggacgcgactgcctgctgctcgcaggggctggaattcgtcctcgcgggcgagcatagctatccggccaactatcccgaaccgggaacagaaatcacggtcgttggcacattccagacctacgaagaaaacggatatagggactaccatctggccgatgcagagatgaccgagtaagaaatcgtatctggcaaaaaaacaggcagctttccaccgaaaccgcatttctgcgcaacggttgacgaaagctgtctgttttgctatagtatgctcctcggtacagaatatatccgatgcgtggcctcctgcatcgagcgagccgggtggtattgaatagcgctttacaatcacccggcggttatcgcactaaaatgtaacttttctgcgaatacaagctgattttcagttcccacagtgtcgaacatatgcttccaaggtttcttcggcagaagcgatgctgaacgggcttggaatgggttcaaatccgggaaatgacacttaaaaaag

SEQ ID NO: 14237 - DNA, 946 bp, Unknown
  gut microbiota DNA sequence
cgaattatgctttttagattttctatgcttgacgaaaccgtcgaaacgcgccgtccatggcgcggtttctccttgccccggcgtccatgccggggcatttctgcgtttcatgtgcataattctacagtatctaagccactgcgctagtcgctctttcgggagcacctctgccgggggcaaatttcccgtgcaccggtcgccttccatcaaaatactaagtatattacaaataaatttccaattatactttcccttatattgtatcttcccacagcataccagacaccagccccacataccgcgggggcgcatacatcctcccccatttcagccacagcgtaagggacgtaagccgccggagtgactgccctgcagcagaggcgctctttcgtaagcgcatagcgaagctgcctagctactgtagaattatgcacacgatacacaaaaatgagctcccacggatgggagctcaaggagaatcacgccatggacggcgcgtttcgacggttttgtcgggcatagaagccctaaaagcataattcgtacagtatcttggcagagtagcgtagcgaacgagagagtgcctatgctgcagggcagtcactccggcggcttacgccccgtatttccatagccctatgctatgcaaactgactattgtagaggttcgcataaaatccgtctgctgcaagcaggctctcatgattaccctgctctataatctttccgtctttcataacaaggataatatccgcttccctgatggtggacagacgatgagccactataaagctggttcttccctgcatcatggtaaggaatgccttttgaatcttaatctctgtacgtgtatcaatcgatgatgtagcctcatccaatatcagcataggcggtaagcagagcatgactcttgtgatgcataatagctgcttctgtccctgtgaca

SEQ ID NO: 14238 - DNA, 1557 bp, Unknown
  gut microbiota DNA sequence
gcaccttttcggcgttgtcgtcccagacggcggggtcttcgatcaccggtgcagtgcgggtcgcgttgtcatgggcggttgccatggcgggcaccatggtcggctccggcgtggcggtcggggcgggggcggcgctgctctccggcgtggcggtgggcagggggctttgcagcggggtctcgtccttgggggcgttgggcatctgcacacaggcgcacagcaggctcaggcagagcagcagcggcaggatacggcgtaggttcgacataaaagctccttattgcttggtgacgccgtactccgcagccacaaaccgctccagcgcagcaaagctgcggcggaccttttcggtcccgatgcagtaggccatgcggaagtagcccgggcagccgaagctgtcgccggggacaagcgccagatcgtatttctgcgccttgcggcagaacgccttggcgtcctcctcaagcgctttggggaagatgtagaaggtgccgtccggcttgacaacggtaaagccgagcgcgcacagctcgtcatagagcaggttcatgttcgtctcgtagacagacaggtcgcttgtcaccgcaaggcagcgctccaccgccatctggatcagggaggacgggcagttgtggccggtcccgcgggagatctgcccgcacatcggcacgatagcggcggcgtcctcgcaccgggggttggcggccagatagccgatgcgctcacccgggacgctcaggctcttggagaaggaatagcaggtgagcgtatcatcgtagaatttggcagggtaagggatcgcggtgccgccgaacgcgatctcgcggtacggctcgtcagaaatcaggaagatgtggtggccgaatcgggcggacgcctcaacaaggaaatccgcaagctgctgcagcgtttcggcgctgtaggcggtgccgctggggttgttggggctgttgatgaggacggcggcggtgttctcgtccaccagcggcgcaaaggcggcaaagtcgatctggaaatccgcgcagcggggcggtgtgacgcgcagcgtcaggcccgcgccctcgacatagggcttgtattcggggaagaacggcgcaaaggtcacgatgttctgcccgggcacggctacgcagcgcagggcatgggccagcgcaccggccgcgccgctcgtcataaagatgtggtcggcggtgtagtccatgccgaagcgttggttcaggctctcggccacggccttgcgggcggagggcagcgtcagggtcggcgtgtagccgtgcagcgtgacggggtcggtgctttggagcaaatcctcgcacgcggcggtgaactgcggcgggcagggcaccgagggattgcccagcgagtagtcaaatacattttcgtagccgatctgtgcgccgcgcgcggtgctccactcggaaatctgccgaatgaccgacttggcacccagcatatctttatagtgctgtgcaatcataataacagctcctttgcaaaatgtttgtcgagatgcgggagggggggaacggcagtccctactgggcactttcccgccgc

SEQ ID NO: 14239 - DNA, 921 bp, Unknown
  gut microbiota DNA sequence
gtataaataattatttcaccagacgctcaagacgcagtgtgccccacacaggctgggccgtactgcgccttttctataaggaggccacctgtggactacatccaaatcaccaaggagaacatcgacaaggagcatatctgctgcgcgatgtccggtaagcagagccttgccaaaaaggaatggctcaagcagcgctttgccgagggacttgttttctaccgcagcgttgagcgcggcaagtgctttatcgagtacatcccggcagaaaacgcatgggtgcccattacagcggacggctggctgtacatcaactgcctgtgggtctccggtgccatgaaggggcacggctgctcaaatgacctgttgggaaaatgcctcagcgatgcaagagcacagggcaaaaagggcatctgcattttgtgcgccgagggacgcaagcgggaatttctcgccgatcccaagtttttgtcccacaagggatttgagattgcagatgtctcagactgtggaatcacccttatgtgtctgccgctcaatgccgatgctgcgctgccgaaattcaagaattgcgccaagcaccccaaagccgatggagaaggcttcgtcctctactacaccgatcagtgtccctttacctattactgggtgcctagggtgcagcaggccgcacagcagcataacatcccgttccgggccatccatatcaccgacaaagaagccgcgcagaatgtacccgcacccgtcacgacctacgcactgttccgggacggcgtattcctgacgcagggtatccagtccgacaaaaagtttctggcactggcggatgtacagatatgaaagaacgaatcgttgatgagcaaatcagactggttccctactatcgaaatgatgcagtatcgttttcatgatatactagtgttg

SEQ ID NO: 14240 - DNA, 2602 bp, Unknown
  gut microbiota DNA sequence
attccgtcaatgttccctgtctcgcggtagctgcgccagacattctcgaagaagtcatcatcttcggggatggggcgcggggcgcgccaagcggtgcggcaggtaccatcctcgaaccacagctcctgaatcagcggggattcggtttcgtccaaggcaaaggtgaatgtatcggggagttgtccaaaaggcttggtgccgcccatcatatctgtatacagcgcactgccacggctcttaccgccgtgggcggtataatccgtcatggccgtcaggtaggcgcgctggctcagcagcatatctcgcaggcggtagagcatcgcaaattcggcgcaattcgcagccttgacggtcgcactaaacttgaccagtagcttttccacgctcgcgcagtagctgcggatctgctccgtgtcgcggatggccgcaccacagcggctcatgctttcggcggcggtctgccatagggcacgcacgttgccggtttcggccttgcaggtatctgccagcgcggccatttcagtcagcgcagctgcagcggtcttttcaaagctggccggggcctcgccctggcagcgcgcagcgatatactgtgcggcgcgggtgctgcccacctgcccggcgttcagcgccgtgccgcccgggcggtaaacaccgtggctggcagcgacctcaccgaccgcaaacagtcccttgacgttggtctgccaccagcagtcaatgcccaatccgccgttgttgtgctgggcgcaaagggcaatttccagcggctgggtgtacaaatccacgcccttgtcacggtagaaatcaatcgcaggcttgttcatatgggcaaggcgctcgatgggcgtgccgaagcaggcccccgccttttccagatattcgcgtgcctccgtcagcagcgccttgtagtcaaatgcgccacccaccgggttggtgcggtaatcaagatagaccttgcggcccttgcagctttccagatagaccagaatatcaataatcgaactgccgttcgccactttgcgcacgtcaaacggccactggtagccctttaagaacagcttgctcagcatatcgtgggcatcggtgaagaattccatcaggaactccttttcgttgctgccgtccgccgccgtggagtagacacgcggcagcacctgcatataggtgccggacacattccagcgcggtgccacactggcaagtccatactgccattcggtcaggtttttgccttttgcaccagcctccagcgcaaggcccgttgcaccgtactggctgaacggatagacgctgtcggcgtacataccggccgggccgccggtggcgtacacaacgtttttgcagcgaatcagcacaaagcgctcgtcctcgctctgcgccgtgacattcaggcagagcaggccgcagaccgtgccgttctcgctcagaactttaatgacctgcgttttgtccagcatcggcacacccttggcctgcacggcagcttccagacattcggtcatctgcttgctggtgtaggggccaacgctcgttgcgcggcggcgggggtcatggtcggtcttgtagccgatgtattcgccatagcggttgcgcgggaacggcacacccagctccaccagctttaaaaagcactgggtcgagagcgcggcctcgcacagggcaatatcgccgtccacgcattttccctcgtagagggtctgcgccatctcgcgcacactgtcagggtcaccgccggaaagcgtcagcttataataggtctgcttgtcgctgccggtgttgcggctggtgccgccgatgcggttctcgctcacaagcagaatgtcatgctggcccagctgccacaggcggtcggcggcgttgaagcctgccgcgccgctgccgacaacggccgtattgcagcgatacacccttgcagtgtacttgccggcgcggaaaatctcgttttccatttgctatcctcttacaggcgttggatgtggaagccgccatccacatcaatgtagttgccggtggtataacgcagacggtcactgcacagcaggctgactgcaccggctacgtcctccggcgtgccccagcgggcaatcgggaaggtgccctttgcaatcaggtcatcgtacttgccttgcaccttgctggtcatatcggtggcgataacgcccgggcgcacctcattgacgaggatgccctcggaggcaaggcggtcagcgtagagggtggtcagcatggacacccccgccttggagacgcagtactcgccgcggctggtgctggacaccacagagctgcagctggacacattgacgatgacgcccttgcggccatcgaccggctcctgcgaaatcatctggtttgccacaagctgggtcaggaacatgttgcccttggtgttgatgccgaccacgcggtcgaagctctcctcggtcatttccagcaaatcggcgcgcaccttgggggccacaccggcgttgttgaccagcacatccacgcggccaaaggcggccagtgcgccgtccagaatcttcttgcggtcgtcggcgctgccgatgttggcctgcacgtaggcacagtcgatgccaagtgctttcagttcgtcaag

SEQ ID NO: 14241 - DNA, 1860 bp, Unknown
  gut microbiota DNA sequence
cttggcaatggcaaagccgatgccgcggctggagccggtaacaatagcagtttttttcataccagtttactcctcatcagccgcggaagtttgcgggctgtgtctttttgatttccaagaattccttatagaacggcataaaggtcttgctgtcgcggattacgcagcccgtaggcttgtgggcacggatcaaatcgccgcacttgccgcaggtcagacagacccgcttggggtcaatgcggccctgtttgatgatttcgttggcaaaatccgggtcagcaaaggccatgcggccaaacagcataccgtcgcacaggccctcctccaccgcaccggcggtgaacaggtcggcataggctcgcaggtaagtgggtgcagatgcccagacggtcatctccggcacggcctttttcacatcaccgatgccgtgaatcatgcgggcaagcccaacaaacggatgttcgtccggctcatatttgccaaaatcaaacgggcgggtcacatgggtggtggcgtaggggttgcccatcgtcaggtctaccatgtcgaggcccagctcgttatgcagttcgcgcacaaggcggatgggctcggtcaggtcgggatttgtgccgctttccgggctgacgccgaacccccatgggtaagcgtagccgtcatagatgccgatgcgggccgtgaccataaagctgtcgtcctcgtacaccttggcggcgcggatgccgtttttcagcagacggaagcggttttcaaagctgccgccgtattcaccgggacggttgtaggcggaggccagttccgccagcagatagccgtggcagctcttgatgtcaaccgcgtcaaacccggcctctttggcaagcagggcggcctcgccgaacttttcttccagccctttcaggtaatcgtccgtcacgatgcaggagtcatccgcggcgcggtaccgctccagaatcgggtgacgataggcgatcatcggggcgggcttattgccggggtttgagtagcggccgctgtggttggcctgcataatcaggtacggcgcaaagccgttggccttgataccggcctccttgacagcggcggtcatcttcttgaactcgtccagcgtgtcgcggttcagcagcagctgcgtcttggaggatcgtccctcctccacaatggagattgcctcgaaccagatgaccgaactgccgccgatagcctcgttgacatagcggcggacggtgtagtcagacggtgcgccctccggtgtggagtccgcaccctccatcggggcaacgcccagacggttggggaacgtgatgttgcgcacggtcaggggctgtgccaacacatgggtgtcggctgcaaagggcaggtcaacacccaactctgcggcacgcagcttgacttcttctaacgatttatagtgaaatttttcttgcggcattgtattacctcttttcttcggggtggggccacactgcggcccaatcggtaaaacggattgcagacacaccatgcacatataggcccaccatagcccctgtgaaccgctttccacactgtaagccctcactggtcaggtagcgtggttccgggatgctccaaagcgtgcgccagcctgttccgtcctgtatagcaaaatgtcgttgaccacccgttgccgtaacgcgcagacgaacaggagatgtgcccgcaggcagcggggctgtttgctttgaagttacctcatatcctgcgtattcttccagcaaaaggccctccggcccaatgccgaatttcaaatagctgtgctcatcgtagtaacaggtcagacctgcagtgcctgcagtgggaatatctaacgcagtttccgctgtgaacgctcgttcctgc

SEQ ID NO: 14242 - DNA, 334 bp, Unknown
  gut microbiota DNA sequence
ctgcaccaaaggttacttttgctacagacaacttaccgtcctcgatacgctcaaatacgcctatccagaatggttcttcaaaatacaccgtcagttttccatttactttgtccataagaatccctcccaaaataattgttgaacaaagaatggacaacccggaggggcaggttacttaccctatttacataggacggctgggctacctaccagctctagtacattgctgaatgtacattgcgtttttatctttgtatttataatcaagccatatggcgcgattaacttagaatgtcaaacaacgatttatcctattaagacaactgaaatttta

SEQ ID NO: 14243 - DNA, 53637 bp, Unknown
  gut microbiota DNA sequence
gatgaagatcatagtaatacctcatgtgtagttataaaaaaggcttccccctagggggaagctgtccgcgaagcggactgatgaggggcggggttcccaatacagcccggtaacgggatggcggggcaaggctgcccctcatccggcctcggtcagagcctcggccaccttcccccataggggaaggcacgtaatttttagttttcagccggattttcagcgggttcggaatatgcctccggcgggaaggtgtagcggccgcggtatttctcgtaccggcgctcaaatttaccatcatcaccgtgcttgacggcgttgaggtattcgtgggtgtcgaacttatcggcggcgacctcgatcatcgcaacggcaatgttcgagcagtggtcggcgatgcgctcatagttggtcagcagatcgtccagcacaaagccgtactcgatcgtgcaggcaccggcctgcaggcgggcgatgtggcggctcttgacctcgcgcacaaggccgtccacgacctgctccagcggctcgatctttttggcggcgtaggtgtcgcccttctggaaggcatcgaccgtgcggttcacgatgtcctgcacggcggcctcaagcacgctcaggtcgccgagggcctcgtcactgaatttgatcgacttgtcgcggatctcctcggccgtcttgatcaggttgacggcatggtcggagacgcgctcaaaatcgccgatcgtgtgcagcagcgtgttgacggtgcggttgtcgtccacggagagatgcttggcgctcagcttgacaaggtaggtgcccagcacatcctcatagtggtccacggcgtcctccttgcggatgacctcatcggcgatggggtcattccagacacgggtcgtggacatggcctgcaaaagggcagtgcggcagatctcggccatatcgctgccggtcagcatggcgcggcccacagccacggagggggtggtgagcagacggtcgtccagcagggtgttctcctgcttggtgtcggcgggggaatcgggcacggtcaggatggcaagcttctcgagcaagcggttgaacggcagcaggattgcggtcgtcacgacattaaagaccgtgtggacgatggcaatgccgaaggtgttggccgtgtcggcaaagaagctgaacccaatcagcgcgttcaggccgtagaacccgcacaggaagatgacagtgccgatcaggttgaagtagagatgaacaaaagcggtgcgcttggcgttcttgttggcgcccgcggaggaaatcagcgcagtgacggtggtgccgatgttctggcccatgatgatgggcacagcggccgagtaggtgaccgcgccggtgctggtcagcgcctgcagaataccgacagacgccgacgaggactgcaaaacagccgtgagcacagcgcccgcgataacgccgaggatgggatttttgaagctgaggaacagatccatgaaccacggctcgtcggccagcggggacatggcatgggacatcgtgttcatgccggccatcaaaatggcgaagcccagcataattttaccaacgccgcgcttgcggtccttgccgatcatatacatccagatgccgatgaagcccagaatggggctccaggcattggggttcatcatctgggtgatgaagctgtcaccctccagaccggacagcgacagcagccagccggtgacagtcgtgccgacattcgcgcccatgatcacgctgatggcctgatgcagctccatcaggccggagttgacgaagccgaccgccataacggtggtggcaccgctggactgaatgacggcggtgacggccatgccgagcagcaggccgcgcagggggctgctggtcatggtggacaggattccctgcagcttactgccggctgtctgctccagcgctttacccatcaggtccatgccatacaggaacatggcaatgccgcccatcagggtgaacacattaaaaatggtcatccggtgttacacatccattctctgttttgttttcactataccgccttctattataatgtatgcgcacaaagcacaccaccacggcaaagtaaatgttgtgtaaaatttgtgtaaagccgtaaggagcggcagtctcccgggaggtcttactttcttttgtgaccaaaagaaagtaacaaagaaaagtctcgctgttgcgacgcagcgaacccgcgcctcgggggctgcacgcccccgagacccccaaagcggaagtcggaagattcggcggctaaacggacgcagtattactgtccgttcttaacgccgccgaaccttcctccactttaaattctggtgttcccccgaacccccgcggcgataaacttcttatcgccctgtaggggccgggcatgcccggcccgcaacctaccgccaaatccctttcacggtcaatccgtaggggagggatttatccctcccgggcactttccgccgccgcaaacggccacggcggccagagggctggccgccctacaacctcacttaaaaatccgtgcgtagggcggggtgccctcaccccgccggaacttaccgacctatcctgccccttctgttttgcatattctttacaaactttaccgttcccacacaaaaccgggaatgtctttgcaaaagctttaccgcgattgtaccgcaccatggtcgatacccgcccggaaatgcggtacaatggccttgcttccggtgaagcactgcgaaatgcacaagctataccacataaatttggtaaaaagggagagtacacacacatgaaacgcaaatctgctattgctgccgttaccgccgctgctctggctctgagccttgccgcctgcggttccgctgattccgccgccgcttcctcggctgtccccgccggtgactttgacaccgatcaggacatcacggtcatctcccgtgaggacggctccggcacccgcggtgccttcattgagctgaccggcgttgaggagaagaacgccgatggcaagaaggtcgacaacaccaccgaggccgctgccatccagtccagcaccaacggcgtcatgaccgctgttgccaacgatgagaccgccatcggctacatcagcctcggctctctgaacgacaccgtcaaggccgtcacggtcggcggtgtggccgcctccgccgagaccgtcaaggacggcagctatgtgctggcccgtcccttcaacatcgttaccaacggcgatgccaccgaccctgtggccgtggacttcatcgcctatgtcttgagcaaggacggccagacactcgccaccgataagggctacatcggcgatgacggcgcggacttcacctccgcccagcctgccggaaagatcaccgtcggcggctcctcctccgtctctccgctgatggagaagctgatcgaggcctacaagaccgtcaaccccaacgccgaacttgagctgctcaccaccgactccaccaccggtgtttccggcgcgctggacggcacctacaccatcggcatggccagccgtgagctgaaggactccgaggtcgagggcggcgccaaggctaccgttctggcactggacggcatcgaagtcgttgtcaaccccgccaacaccaccgaggatctgaccgttgaccagatcaagggcatctacaccggcgagctgaccacatgggctgacgtgcagtaaagtatagcagcaccgtaggggcggggcatgccccgcccgcagcgtacccgtgaccgcgcggttatgggaaggccgcgggccggacatgtccggcccctacatggcatataaccaaaggagtataggaaaatgacctccaagctaaaagaaggcgtcatgcaggtggtgtttaccctctgcgcctgtgtatccattctggcggtcgcgctgatctgcatcttcctgtttgcaaacggcgtgcctaccctgttcaagatcgggccgatgcagttcctgctcggcacgacatggaagcccggcaacgacattttcggcatcctgccgatgattctgggcagcatctatgtcacggcgggcgccatcctcgtcggcgtgcccatcggcctgctgaccgccatttatatgtcccgctttgccagcccggccatcaaccgggtcatgctgccggcggtgcagctgctggcgggtatcccgtcggtcgtctacggcttcttcggcatgatcgtgctggtgccggccgtgcaggccatggtcaagacccccttcttcaagacggtgctgcatgtcaaaagcggcaagggtatgagccttttcaccgccgccgtgctgctgggcatcatgatcctgcccaccatcatcacggtcagcaagacgagtcttgacgccgttcccaacagctactatgagggcagccttgcattgggcgccacccatgagcgcagcgttttctgcgcggtgctgcccgccgccaagtccggcgtgctgtcggcggtcatcctcggcatcggccgcgccattggtgagacgatggcggtcgttatggttgcaggcaaccagacatggatgcccaagggcctgttccaaggcctgcgcacgatgacctccaacattgtcatcgagatgggctacgccgccgacctccaccgcgaggcgctgatcgccaccggcgttgtgctgttcgtctttatcctgctcatcaacctctgcttcagccttgtgaaagggggcagcgaccatgcctgagatcaccgcaacaaagacgatggctgctatgagctgcgccaagccgcatacgcttatgcccggcggcgggcagaaccgccgcgccgcccgcgcgcaggctgccgcgctgcggtggctggtgcggatcgccgccttcctgacagccgccgtgctggtgttcctgatcggctacatcctcgtcatgggcatccccaacctcaggcccgagcttttcgcatgggagtataactccgagaatgtctcgctgacgcccgcgctcatcaataccgtgctgatgaccgcctttgcgctgctcatcgccacgccgctcggcatctttgccgccatctggctggttgagtacgcccgccgcggcagcaagctcgtcaaggtcgtgcgcgtcacgaccgagacgctgcaggggattccctccatcgtctacggcctgttcggcatgctgttcttcgtcacccagctgcgctggggctacagcatgattgcgggcgcgttcacgctggcgattatggtattgccggtcatcatgcgcacgaccgaggaggcgctcatcgccgtgcccgactcctaccgcgagggcagcttcggcctcggcgcgggcaagctgcgcacggtgttcaccatcgtgctgcccagcgccatgccgggtattctgtccggcgtcatccttgccacgggccgcatcgtgggcgagaccgccgcactgatctacaccgccagctcggtcgcaaagatccccaccggcgtattcagctcgacccgcacgctggccgtacacatgtacctgctctccaacgaggggctttacatcggccagacctacggcaccgccgttgtgctgctggtgctggtgctggtcatcaactgcctgtccggctttgtggccggcaagctggcgaagcagtaaagcgcgggcatgacaaatcgtaggggagggatttatccctcccgtggggtgtgcggcagccgcagacctgacgggacgcatatatgcgtcccctacgagcaaccccaaaacagcctgtaggggcggcatacatgccgcccggggccgtgtacggcagagggaaagtgcccgggagggatgaatccctcccctacagaacagagataagagcagagataagaggtcatttcatgaacaaatttgaagtccgcagcatggatttgtactatggcagcttccatgcactgaaaaatatcaacatcgacatcccggaaaaggagatcactgcctttatcggcccgtccggctgcggcaaatcaacctttttgaagagcctgaaccggatgaacgaccttgtggagggctgccgcatctcgggtgacatcaagctggacggcgtggacatctacaaggacaagatggatgtcaatgtcctgcgcaagcgggtcggcatggtgttccagaagccgaaccccttcccgatgtcgatctacgacaacattgcctacggcccgcgcacccacggcatccacaacaaggcccagctggacgagatcgttgaaaaatccctgcgcggcgcggccatctgggacgaggtcaaggaccgcctgaacaagagcgccctcggcatgtcgggcggccagcagcagcgcctttgcattgcgcgcgcgctggctgtcgagccggaggtcctgctcatggacgagccgaccagcgcgctggaccccatctcgacctccaaggtcgaggagctggccaccgagctgaaggaaaactatacgatcgtcatggtcacccacaacatgcagcaggccgcgcgtatcagcgataaaacggcgttcttcctgctgggtgagctggtcgagatgggccccaccgagcgcgtctttgcaacgcctgtggataagcgcaccgaggattatatctcgggccgcttcggttaaggaggagtgcaatatgggtacaagtgtacggaagatgtacgatgccgagctgctgcagctggatacgatgctggcccggatgggccatgcggcgggcggtgcgatcgagagcgccatgaccgccctgcgcaccggcgatgtggagctggcgcgcagcgtcattgcgcgggacagcgagatcgactcggctgagcatgagatcgagcaccgctgcctgacgctgtttctgcgccagcagccggtcgcgggcgatctgcgcaaggtgtctaccgcgctcaagatggtcaccgacattgagcgcatcgccgatcaggccagcgacattgccgagatcacgctgcacctccacccggagggcgcgcgcaccgtcggcgtgctggacgacctttacgctatgggcgatattgcgctacacatggtcaaggacgccatcgcggcctatgtgcaggtcgatctgtccaccgccgcgcaggtcattgcccgcgatgatgagtgcgatgccatgttcggccgcatcagcaaggagattgccgcctacattgcggcacaccccgatgatgccgagacggcgctcgatctgtttatgatcgacaagtatctggagcgcctcggcgaccacgccgtgaacattgccgagtgggtcgagttcttaaagaccggcgtccacaaagcccgcaagatcgtctgacgcgggcagccaaaagccattctctattttcctataccaaccaaaatggggcctgccgcaaagcagaccccgttttggcgtggaaggtgcgaaatcaaggccgcgctgcaaagcccctcaggcctcgcaggctcggccagctccccgcaaagcgaggagccttttcggcggcctttggccgcaaaagcctccccacaaagtggggaggtggtcgaacgaagcgatgaccggaggggctttgctcgtttcccggtagatatacaaaaatgggagccgcccacttgtcgggcggctccctgctttatttacttcgccccgcgtccggcgaagactacatacacggtcttgaacaaaatcttgatgtcattccagagcgaccagttgtcgatgtaggtcacatccagcttgacgacctcctcaaagtcctcgatgttgctgcggccgctgacctgccacaggccggtgatgcccggcttcatcgacaggcggcgcttgtggtggctctcgtactgtttatactcgtccactgtcggcgggcgggtgcccacaaggctcatatcgccgcgcagcacatcaaaaaactgcggcagctcgtcaatgctcgtcttgcggatgaacttgcccaccttggtcacgcgggggtcgtcctccatcttgaacatcaggccgttcatctcgttctgggccatcagctcctttttgcgctcctcggcgtccatgtacatgctgcgcagcttgtggatgtaaaagtaccgtccgttgcggcccacgcgcttctgcttgaagaagagcgggccggggctttcgatcttgagggggatcgccacgatcgcaatgatcgggatgctgaggatgcagcccaccagaccgcccacgatgtccatgcagcgcttggcgatctggtcgcgcagcttcagctccacggtgcccatcgtcacgatgctgccccccgcgcagcggcccagcgtgcggctcagccgcgcagcgctcgtctcatcgcagcaggcctcctcgatccggtcaagcagcggcaggcagaaatgcacggtcaggcccatgctctccatctcctccagataggggatgaagctctcgccgctgtccatcggcacatcgacatagacctcgtccagcgcctcgcgccggatccagtccataaaatcggtaaagttcgccttcactgcaatgccgtcgatctcggtgccgatgatctcgtgcgtggcctccagcagcgccacgccgacaatgcggcgggaccagtccttgccgatctcattgatgaggcggtcggcgcggtcggtggtcgtcacgatgccgaccagactctccatgccccagctgcgctggaaatggagcagcagccgcttgagcgcaccgtgcgcgagcggcagcagcaaagcgttgatgagcggcaccgtcaccgcaaaatagcgggagtcgagcatcgttgccttggtcagcagcatcagggccgagtagatgacgcagagcatcaggttgaatttgagcgagagctttatctcggcaccggggcggcgggtgacgatgttctcggtctggtcaaagcagaaaaaggtcacgataaaggccagtaccagcgcgcagagcgtctgcatccagtcccgtgcagtgtagggcaccagcacattgaacagtccgtccgtgatcagccacgacagcagaatactgaccgccagggccagcagatccgtcaggaaaacataggcgtactgcatcttttcgcgttttgtaatgacgtgcaactccaaattcctctcattctttctgtacaaaatcgtataagcaagggcagccggcttgcggctgtccgttcatgcgtataaatcatgtacaattttaccacatcaagcgccgccattcaaccgaaagcggcaccctgcggcagaaaacggcgaatttcggcaaaattcccaatccaagcccgcgcacaggcagcaaaatggcagcttcacaacggaattcagcaaaaccggttgcaaagtaacaggaaaatcgcccgcgagcgaacggcatcactcctcgggggcggcaagctcggctttgaaggtgtcctgcaggtcggtcaggcagtccagcagcaggggattgaaggccccgcactcgccgcgcaggatcatctgcactgccacatcgggcgcgtaggcgtccttgtagacgcgcttgctcacaagggcgtcatagacatcggccatcgccaccacctgcgccgagatcgggatctggtcgccgctcagcccatcggggtagccgcggccgtcccaccgctcatggtgccagcggcagatctcataggcggtgcgcaccagcggctcgttgcggtagctgcgcagctggtccagcatcgccgcgccgatcgtggtgtgccgcttcatgatgtcgaattcctcgcgggtcagccgcccgggcttgttcagaatcgcatcgtcgattgcaatcttgccgatgtcgtgcagcgacgatgccatgatgatcagctcctgctgttcgggcgtcagggcgtactggtcggtcttttgggtcagctgccccagcaggtgccgggtcagcgtgctgatgtgcagcacatgggcgccgctctcgccgttgcggaactcgaccgcctcgctcaggatcgagatcagcatctgggtgttcttctctttttcacggatctggctcgtcaccagcgaggtgagccgccgctgcttggcgtagagcttgatcgtgttaaagacgcgccggtagacgacccccgcgtcaaaggggcggctcacatagtcggagacgcccagctcataggcgcggcgcacaacggtgtcggcgtcctcgcttgagatcatgatgaccgggatgtcctcgatccggtggctgcggttcatcgtgttcaggacctcaaagccgtccatcaccggcatgacgatgtccagcaggatcagcgcaatcgcggtgtcgtactggtccagcatcgtcagacattcctgcccgttggaggcctccagaatattgtaatcactgccgaggatctcggccagaatcgcgcggttcatctcggaatcgtctacgatcaggatattctggcgggcctgacggtcccgcccggcggccgagggggcggcggcgccggtggtgtcctcggtcacaacggtgtttttgtggttcttggcctgatacatcagccggtccgcgcgggaggccgcctgctcgcagctctcgcccgggcggctcatcacgccgccgatgctggccgagatctgcagccgggtgtagccgggtacaacggcggtgtgcagctgctggcggatgcgctccagcttggcaacaaatgccgcctgtgcaatgccgggcagcacaagcaaaaactcatcgccgccgtagcggatcagatggtcgcttttgcggatgcagccgcgcacgacctccacggcggtgcgcagggctgcatcgcctgcctgatggccgtaggtgtcattgtacagcttgaaatcgtcaaggtccagcacggccacaccggccggttcgctccggcctttgatgatatcctcataatagcggcggttatagcagccggtcagggcatcgtggtagagcttgatgtggtagccggacacgctgcacatcagctggtcgctgttttcggggtcgatgagattgtcgcagtccagcggctggatcagctccagcacgcagggcgcgccgtccacctcgcggtagaccgctgtgacctgatacagatcgcggcccatatattccagcttggtgcgctgggcatgatcctccatcacctgacgggagatgcagttctggcaggggtcatccttatgccagaattcatggcaggggcaatgcccctccaccggggcgttgccgcacacctgccctgcgtccagcagccgcacgatcggaaaaatcgtgcggtattgcatcatttccttttcgacctcgtctctggtcatagcctcgccgcctttgtgtcctgaaaaaatgtcacatatatatccagtatatcatttccagccaattcctgtcaatttctgcgtgtgtaaaaaaacggtaaaacggaatccctgcaggcggcggcgcatatctttgtgggacagggggtggtacgatgcgatatatccggtatatcctgctgctggcggcggtgttttttctggcaccgctcgccgtgctgccgcgcagggcggccggggcggacgagcctgcggccccaacgcccgcggccacggcacagcctgcggctgccgcgccctaccgtgcggtctgggtcagctatctggaatggcagcaggtcgatttctccacgcaggcagcttttgcggcggatgtggaggcgatgctggatgacatcgccgggctgggtgcaaccgttgtccttgcgcaggtgcgccccttcggggatgcgctctaccccagcgcgtattttccgttcagccatatctgcaccggcacgcaggggcaggaccccgggtttgacccgcttgccgtcatgattgcggcggcccatgcgcgggggctgcagctcgaggcgtggatcaacccctaccgtttacaggcggggcaggtcccggcgctctgtgccgaaagccctgcgcgccgtcaccccgagtgggtgcgctataccgacagcggcgcggtgcttgacccgtccagcgcggcggtgcggcagtatattgccgatggggtggaggaactctgccgcagctacccgctggacggcatccattttgacgattatttctaccccgtgcaggaagctgattttgacgccgccgactatgcggcaagcggcacggcgctgagtctggacgactggcggcgggagaatgtcaacgcactgatggagctgtgccacgcggcagcgcagcggtacggcgtgcggttcggcgcggccccggcgggcgaccccgagcagaactacaccctgcagtacagtgacgccgcccgctggctgcggcagggtacggtggactacctgatgccccagctctattgggggcaggcgtatgaaaaggacggcgataccgcgcacagcctgccccggttggcggccaaatgggcggcgctgccccgggcggcgggggtgcagctgtatgcggggctgggggcctaccgcatcggcgcgggggacggctccgacagcggcagcgagtgggtcagcggccatgcgctggccgaccagctggcactgctggcgcgcagcggcatcacgggcgtggggttgtaccgctacgccagcttgtttgacaaccccaactaccccgcactggccgagagtgaggccgccgccctgcgcactgcgtggaaatagggcgcggcgcgtaaggttttggcacattcccgccatcgacgccttctgcgcgggcgggcctgtatactccaagacgatccctgcaatggacaagccgcccgcgcaggaatttgtgcaaaggaggaatacgcctatgaaaaagcgtctgttggctgtgcttctggcttgctgtatggcggcgggcatggccagcgcagtctttgcggaggaggagccgcccctgcccgcagcggcggccgccgaggctccgcctgacccggcaccgaccgaggcccccgccccggagccaacggcagaaccgaccccggaaccaacggcagagccgaccccggagccgaccccggagccaacggcagagccaaccccggagccaaccccagagccgaccccggaaccaacgccggaagcaaccacagagccgacccccgcgccaagcgaggcaccgacccccgcacccacagagaccccggtgcccacggcggcaccgaccgaaaccccgacccccgcaccgcagcagacggccacgcccgagacagcatgcgccccggtgctgcgcgccctgccggagatgaccgcccagtcggctgccgtgaccggggtggtgctcatcgacagcattgccgccgacggctgcctgaccgcgcaggtaaacggcagtgacgaaaagctgccgggggccgtctacacatggtatcgcagcagggatggggacgactggcagacagtgaccccgcagatctgctccggctcaggctggaacatcgaggcgggcagcgagcagcggctcaacgcggcgctcgattcctgcgtggcgggcatcggcgatgcggacaggctctattataaggtggaggtcaccggtgcagacggcaccgcagtggccgctcagacccgggtggcctactacatccagctgcagaacggcagctttgaggcccccgccgtgaccggtagcagcacgctgtactacccctttgcggccaagcggtcgcactttatccagacggcagacgccgacaccaaccctgccattgtatggcgaacgaccggcgcggccccccactggagcagccttgtcaacggccattacatagagcttgtggacggcacaggccgcagctacaccgattggatagacggggagatacgcaccgaccccaacgacccgtccgtctgctaccacacccccggcgcctatgacggcagccagtttgccgagctgaactgccaggcctacggcgcactgtatcaggatgtgctgaccgtgcccggcaccacgctgcactggtcactggcgcaccggggccgcgcgggcagtgactcgatggcgctgctcatcgcgccggtcgcagtggcgcagcagatcaccgagatcctgacgcaggcctcggccgatacgaccggcggcagcgtgcgcagcgcactggaccggacggtggactacaacggccagccggtcgcaatccgcagctttatggtcggcggggagatgacggacggcaacaccgcatgggtgacccatcggggtgactacacggtggcggcggggcagtatctgagccggttcttctttcttgcactgtcctgcgcaagcggggaccggcgggagggcaatctgctcgacaaggtctggttcagcaccgagccggaaccaccggtcatgggcagcggcagcctgcagctgacaaaggccgtggagcaggacgcctaccgcaccgaggccgccgccgttacaaacaccttttccatcgagctgcccgccggcagctatacgctgacctatgcggacggcacggccgagacgcgcacccttgctgcgcccggcgcgctgcgcttcgggctgcgcgggctgcagagcgtcacgatcggcagcctgcccgccggccggtataccgtgaccgagaccgaccaccccgatctggacagcgcctactgcacgacaacggccgccgaggcgcagacggaggcggaggtgacgaccggcgccacggcacaggccgtcatcacaaaccggtacgcgccgtggcgcagcctgacgatcaccaagcaggtgacgggcggctacggcgatacccgccgcgcctttgcctttacggcggctgtggacggcgtgccggtgacagccgaccgcgcggccgtgaccgctgcgggcggtgcggcgctgacggcggcgggcttcacgatcccccaccggggcagcgtgacgatcgggcatctcaagcccgggcagaccctgaccgtcagcgaggaggcgctggctgattatgagacaagcttttccgacggcaccgccgtgacgcagggcggccaatggaccggcacggtggggcagagcgacacggcgctgacctgccgcaacaacaaggacggcgtaccgcccaccgggctgcgccgggacgccgcgcccgcgctggcggcagtggcgggggcgctggtctgtgcgctgctccgccgccgaaggggggtgtgagtgctggaaacacaggaggaccgccgcgccgcatgggcggagatacgggagtttttggtgcgggtgggggcgctggcggcgctgctggcagtgctgttcggggtggtgttcgggctggctatccagccggatgacacgatgcacccccacatcaagcccggcgatctgcttttgtactaccgcctgccgcaaagctatacggcgggggagacggtcgtctttgacagggacggcacccgctataccggcagggtggccgcccgcggcggcgatacggtggaggtcaccgacacagcgctgctgctcatcaacggcagcgtggtggcggagccggacatctatgagcagacgccccgctatgaaaacggcgtacaataccccctgacgctggcggacggcgaatattttatcctttgcgatgcccgcgcgggtgcgcgcgacagccggtggttcggcccggtccgcaccggtgagatacgcggccgcgtcatcgccctgctgcgccgcagcgggatatgacccaaaacctacacatatgggagaggagaccttacttatgaacgcaaagaagctttctgcagttcttacggcggccctgctggcgggggcgctgtccaccacggcgtttgccgccgaccggctgcccatcggcgatgccagcgtcaccttcaaaaaagccattgatatgaccgatgccgccggtgcgggcggcgtgctgggcatgatgaccttcgatgtgaccggtgcgcaggagggcgacctgcccgaccagccggagaagggcgcagcgcccggcagcaccgaccagcttgccagccccaccgtcacggcggtctttgcccgtggggctgacggcagccttgccgccgagagcgatgtcaccgtacagttcgatatgacaaaatttaccacgcccggcgtctactactaccgcctgaccgagcgcgaccccggcattgcggggctgaccgccgcccccgcctacctgctgaaggcccgtgtcgtcaatgcggacgccgccgaccccaacgggacaagctttaagatcgactatgccgcgctggcaccgctggcgggcggggacaaggtggattttatcgcaaacagctacacgacctacgcgctctccctgaccaaaaggctggccggtgattttgccgactacggcgacagctttgactttaccctgacgctggaggaccccgatgccgaaaagcacatggcgtccgtgacggtccgcaccggcgaggccgggggcgcgctgaccggggagggtacggtgttgagctttgacgcaaacggcagggcaaccatcaccgagacgatccgcgcaaatcagaaaatcgaggtcaccggtctgccggcgggcgccttctacacgatcgtggagggcggcgatgatgccgccaagtacacgaccgactgggccacacccaccggcacggtggaggatacccccacgctggcgcagcgcgccatgacggctgcggataccgacatcaccgtgacgaacacccgcgaggcagcggcccccaccggcctgctgctggatgctgcgccctacggtgccatgctggcgctggccgcaggcagcggcgcggtgttcttccgcaagcgccgccgcggccgctgatgctgcgggcggcggcccggctggcccgtgcgggcagcgcggccgtcagcgcggcggcggggctgcttatgctggtgctgctcgccttcggcgggtttgccctctggcaggacgctgccgtcagccgcggggcctttgcgggggcggagctgctgcactacaagcccgccgcgctggcggcggacaaccccaccctgaccgagctgcaggcccgcaaccccgatgtctgcggctggctgaccattgacggcacgaatatcgactacccctttgtgcagggggccacaaatatggattacatcaaccgcgatgtcacgggggcgttttcgctgtccggctcggtttttctcgacagccgctgcgccgccgggctgaccgacccctacacgcttatgtacggccaccacatggagaacggcgcaatgttcggcgatgtggccgcctttgcgcaggcggatttctttgccgcccacacgagaggcagcgtaagcctgcccgatgcggcctacaccgtggagctgttcgcctgcctgtgtaccgatgcctacgacagcgccgtctatgaccccgcacggtaccagaccggcgtgcagccgctgctggactatctggcggccaacgccgtgcagcagcggccctgcagcgccgatgcgcaggcgggcatccttgcgctgtccacctgcgccggggccgagacaaacggccgggtggtggtgttcgggtggctgcaccctgttgaaaaaggagatgaaatgcaatgaagtatgccacaacggccctgcggtgctggctgacggcagcggccctgctgctggcgctgtgctgcccgctgccggtttttgcggcgcgcgcgggggcggtgctgcccgtgacggtgcgcaccgagggcgcggccacggatgccgcctgcgtggtgagcatcacgccgctggacgctgcgcccgccccggcgcaggcatcgctgacgatacggggcagcggcacggcgtattttaccggctttgcctttgatgcgccgggggactaccgctacactgtcacgcaggcgggcggcacggcggcgcatacggtgtacgatacccacagctacaccgtgaccgtccgcgtgacgggccgcgcggacggcggtctgaatacggaattgtgggcggtgcgcagcggcgaaaccgccaaggcggacagcgtgaagtttaccaaccgctatgacccgcccacggaagtggcgaaaaccaccgcggcgcggcccgccaagaacaccgccgccccggcggtacgcgccgcacccgccctgccccagaccggcgatgccttccccgtggaggcgctggccgccgcgctctgcgccgggcttgtgggctttgccacagcatggtcaaagcaccggtaagcctgccccggcggtcacagattggtcataatctttacaattcgtcccgtttgataaaattcttatcaaacgggattttttgctgattgtaaccgggccgcggcatgggtatactaaagccataccaaacaacaaacggcacaacgccccggcggaagccggcctgcgccgtatgactacaggaggtagcgttatgtattattccagcggtaactatgaagcttttgcaacgcccaaaaagccggacggcgtggacggcaagtccgcgtatctggtcggctccggtctggcagcgctgtctgcggcctgctatctggtccgcgatgcccagatgaagggcgagcatgtccatattctggagaaggaccccatccccggcggtgcctgcgatggctacaaatatcaggacatcggctatgtcatgcgcggcggccgtgagatggacaaccactttgagtgcatgtgggatctgttccgctccatcccctccatcgaggacgagaaccacaccgttctggatgagtactactggctgaacaaggccgaccccaactacagcctctgccgcgccacccgcaaccgcggcgaggatgcccacaccgacggcaagttcggtctgtccgacaaggccgccatggagatcatgaacctgttcatgtcccccgatgagaagctgtacgacaagaagatcaccgacttctttgacgatgaggtgctgaactccaacttctggatgtactggcgcacgatgttcgcctttgagaactggcacagcgcgctggagatgaagcgctatctgcagcgctacatccaccacatcggcggcctgcccgactttacggcgctgcgctttacccgctacaaccagtatgagtcgatgatcctgcccatggtcaagtaccttgagggcttcggcgtccagttccactacgacaccaaggtcacgaacatcgccttcgactgcgcgggcggcaaaaagcaggccacccgcatcgacatcctccacaacgggcaggaagagtccatcgacctgaccgagaacgaccttgtctttatcacgaacggcggctgtgtcgagaactcgaccctcggcagccagaacacccctgctgagttcaagcccgagctgaaggagggcggcggctgggacctgtggcgcaagatcgccgcgcaggacccgagcttcggccatcctgacaagttctgctatgaccctgagctgtccaactggatgagcgccaccatcacaacgctggatcagcgcatcgtgccctatatcaagaagatctgcaagcgcgacccgttcagcggcaaggtcgtcaccggcggcatcgtcacagtcaccgattccaactggctgctcagctggacgctgaaccgccagcagcagttccgcgaccagcccaaggaccagctctgcgtctgggtctacggcctgttcaccgacaagccgggcgactatatcaaaaagccgatgcgcgactgcaccggcaaggagatctgcatggagtggctgtaccacatcggtgtgcccgaggatcagatcgaggatatggcgaccaacagcgccaacaccgtgccctgcatgatgccgtatattgacgcgttctttatgccgcgcgccgccggcgaccgccccgacatcgtacccgagggcgctgtgaactttgcgttcctcggccagtttgccgagaccgcgcgcgacacgatcttcacgaccgagtactccatccgcaccggcatggaggcggtctacaccctgctcaatgtggaccgcggcgtgcccgaggtctggggcagcgtctatgacatccgctgcctgctggacgccaccgtcaagctgcgcgatggccgcaagatcaccgacatggagatgccgctggtcggcaagctcgccatgaaggaggccctcaagaagatcgagggcaccgaggttgagaagctgctgaaggaatacaatgtaatctgagcaacagaacacaatgcgggggctgtccgattgggacagcccccgcgctgtgtcaaggccccccgcagaggaaatagggaaccggcatttcccggggaaacggcactgcggcgtaatttacaaaatgttcatacgaaaaacatagttttttagcagttgccctgtactatataagcacagggtcacggagccgcaaccgtgattctggaacatgattcctcctcacacaaaccgataccccaagcccccatccggagccgcaaccggatgggggcgatttttgtctgcgtatattgcgtatatttatttgtcgatgcggcaggcgttcagggatttggtaatgtccccgtggatcagggtcgatacgcgctccacaagggcggcggggtcctccttcatgccggtgcgcacccattccagcgtcaggccgacaaaggcgtacttgtaaaaatcggcgatgaactccttgtcctcctcgcgcaccgtcatgccggcggccttctcctccaccacgccgatcatcagatcgtaggtcacgcggtagaggtagctctcgatatgctcgcggctgatcgagtggtagacatttgtaaaaaacaccttgtcccgctgcacagcctgcaggatctgcaaaaagccctgctgccaggtgtcgtaggtcttttgcccggccagcgcgcgggtggcattctcgatgcaggcccactcgaccagatcgtagatgtccttaaaatggtagtagaaggtcatgcggttcacgccgcagtgctcggtcaggtcggtcacggtgatcttgtccagcggcttttcggccagcagatctttcagtgatgcgaccagtgcgcgttttgtcatctgggacatgggtgcgttctccttgttataagcgttacggcggatgcggagcgtcggggacgccgccccctacggttgcggcaatatcattattataaaagaagattatgaatttttaaactccgtttgcggagaaagtgggtttgtggtataacggaggtaatacaaaataaggaagtgacctccatgcctgagatgctggatattgtcgatgaaaacggtctgcccaccgggcaggccgtgccgcgcaccgtggcccacgccgaggggctgcgccaccgcaccagccatgtctggatcgtgcggaaaaagaacggcgcagtgcaggtgcttttgcagatgcgctgcgccgccaaggattcctaccccggctgctatgatatttcctcggccgggcatatcccggcgggggatgagtttgtggaatccgccctgcgggagctgaaggaggaactgggcgtggacgccgcgccgcaggacctgcatgtctgcgggctgcgccgtttccgctttgagagtgtctttcacggcagaccgtttaaggacaatcaggtcagcagggtgttctgcctctggctggacaaggaggccgaggacttcaccgtgcagcgatcggagatcgactatgtgaagtggtttgatctggacgaggccatccgcgccgtggacgaggggacgataccgaactgcatcttcccggaggagctggctatggtgaaagagtttgtggcgggggcgaaggggtaaagcccctccggtcatcgcttcgctcgaccacctccccacttgcgtgaggaggctttcacgcgggcgaagcccgcgcaaaaaaaggctccccctccgggggagctggccgagcctgcgaggcctgaggggctttgctgcagcactgtgttgcaaaaaccgcaatcttgtgttgctcacggcggaaaaccgtgctctaatacccctatcggtgctgtgtatacatacatgcctgtatatttttgcagatggatgctgcataaacgcataactattcatcaatctgccgaaaacaagcccaaatgcagaaaatcctttggcaggtttgccctcttgcaaaatgtataaaagagtgtataatatacagcaatgaatgaataaatattcaagacaaacagcaagcggcagcaccctgcgggtcttgacagagaggggaattttatcatgaaaaaggataagaaggatattaaaaaggttgttctggcgtactccggcggtctggatacctcgatcatcattccctggctgaaggaaaactacaacaactgcgaggtcgttgcggtttccggcgatgtggggcagggcaccgagctggacggtctggaggagaaggccctcaagaccggcgcctccaagctgtatgtgctggacctgaagaaagactatgtggaaaactacatctggccctgcctgaaggctgacgccaagtatgaggactatctgctgggcacctcccacgcgcgcccctgcatcgccgccgcactggccgacatcgccaagaaggagaacgccgacgccatctgccacggctgcaccggcaagggcaacgatcaggtccgttttgagctgaccctcaaggccctcgccccggagatggccatcatcgccccgtggcgtgagtgggacatcaagagccgtgacgaggagatcgactacgccgaggcccacaacatcccgctgaagatcaaccgcgagacgaactactccaaagataagaacctctggcacctcagccatgagggccttgatctggagaagccctctctggagccgcagtacaataagcccggcttccttgagctgggcgtctcccccgagcaggcccccgacaagccgacctatgtcaagatccactttgagaagggcatccccaccgccgtggacggcaaggagatggagagcgttgcgctggtcgagtacctgaacaagctgggcggcaccaatggcatcggcctgctggatattgtcgagaaccgtctggtcggcatgaagagccgcggcgtctatgagacccccggcggtgcgatcctgtacaaggcccatgatgttctggaaaccatcacgctggacaaggagtcgatgcacttcaaggcacagctggcccagaagatgggcgagctggtctacaacggccagtggttcaccccgctgcgcgaggctatcagcgcctttaccgatgacctgcagaagaccgttaccggcgatgtgaccctgaagctgtacaagggcaacatgatcaacgccggtgtcaccagcccctacaccctgtacgatgagcagacggcctccttcggtgaggatgacgattacaatcaggcagacgccaacggttttatcaacctgtttggtctgcccatcgccgagcgcgccaagctggccaagaattggcccgcacaggactgatttataagcgaacgagcgccgaataagcaaccgccaaggggcgcggcaaccctttggcggttttgatgttactaaaaaagataaaagataatagataaaagataataaaaaatgtggagttttggcctgaggccaaaacaaaaaaacgtaggggcggattccatatccgcccgtcaacaggcagacgacctgcgggcgcatatagaatgcgcccctacggaggcagagaatttttgagcggtgcgccggcaccgcgaaccaccaattttattatctattatcttttatctattatctaaaaaacggaggttttactatgccccaactttggcagggccgggccagcaaggccgttgacagccgcgtaaacgattttaactcatccatccgctttgacgcgcggatgatcgagcaggatattcagggcagcctcgtccactcggccatgctgggcagacagggtatcatctcccaacaggatgtggacgatattcacaagggtctgtactctattttggaggatctgcacagcggcgcgctggagatcgaccccaacgccgaggatgtacacacctttgtggagcagacgctgaccgcccgcgtcggcgatgccggtaagcggctgcacaccggccgcagccgcaacgatcaggtcgcgcttgacatccggcttaacctgcgcgccgcaagcgagcatatgcagggccagatcaaagagctgatcgccgtgctgtgcgaccaggccgagaagggcgcgggctatgtcatgcccggctacacccatttgcagcgcgcccagccggtcaccttcggccaccagctgatggcctacgcatggatgctgctgcgcgatctgggccgtttgcaggacgccacccgccgcatggacgccgagtgcccgctgggctcgggcgcgctggccggcacgacctacccgctcgaccgcttctacacggcggagcagctcggctttgccgcaccgtgcggcaactcgattgacggcgtgtccgaccgcgatttctgcattgagctgtgcagcgccatggccacctgcatgatgcacctttcccgcctgagcgaggagatcatcctctggtgcagctgggagttcaagttcattgagctggacgatgcgtttacgaccggatcgtccatcatgccgcagaagaaaaaccctgatgtgaccgagctgatccgcggcaagacggggcgcgtctacggcgatctgaacacgctgctcgtcatgatgaagggcattccgctcgcctacgacaaggacatgcaggaggacaaggaggccatttttgacgcggtggatacgctggagctttgcctgcgcaccgtgacgccgatgctggccaccatgaccccgctgcccgccaacatgcgccgcgccgccgccaagggctttatcaacgcgacggactgcgccgactacctgaccaagaagggtatgcccttccgcgatgcgtacaaatgcaccggcacgatggtggcagcctgcatccgtgagggcaagacgctggaggagctgacgctggacgagtttaagcagtacagcgacctgtttgcggaggatgtgtataccgccatcgacctgaccacctgctgcgagggccgcaccagctacggcggcccgaccaaggcaagcgtgctggagcaggttgcgctggtgaaggggaagctgtaaaaagataaaagataatagataaaagataataaaaaatgtggagttttggccaaggccaaaacaaaaaacatgccgtaggggcggattccatatccgcccgcggcacctgccgtaagctgcacgggcgcatatagaatgcgcccctacggaggcagaaaattttgagcggtgcgcagcgccgcgaaccaccaattttattatctattatcttttatctattatctgataatcagggggtgcaagtatgggaaagtacaaaatctttgtcgatggctccgccggcactaccggtctgcggatcgcggaccgtctggcagagcgggatgaatttgagcttctgcagatttccgaggcagaccgcaaggatgtccgcgcccgggcagcggtcatcaatgagagcgacctctccttcctctgtctgcccgatgacgccgcgcgcgaggtcatgccgctggtgcgcgaggatgtgcggattctcgacaccagcacagcgcaccgcacagcccccggctgggtctacggcctgccggagctgcacggcacccgcgcggcgctgcctgccgccgcccgcgtggcggtgcccggctgccatgccaccgggtttattgcacccgttgcgccgctggtggagcgggggcttatccccacggctgcgcacctctcggtcacaagcctgaccggctacagcggcggcggcaaaaagatgatcgccgagcacgagggcgagcgcgtcaacacggcgctgaatgccccgcgcccctacggtctggcgctgcaccacaagcatctgccggagatgaccgctgtcacagggctggacaccgcgcccaattttgtgccgatcgtggccgactactacgccggtatggagacgatgatcccgctggatctggcggcgctcggcatcacggcgcaggctgtggccgatacgctggccgactactacgccgggcaggcgatgatacgggtgcatccgctcggcgaaggaacggacggcggttttctggccgccaacaagcttgcaggcaaggacacgctggcgatcttctgtctgcccaacccggacggcacccagctgcagctgatcagcctgtttgataacctgggaaaaggcagctccggcgccgccgtacagtgcatgaacctgatgctggggctggaggagacgaaaggattagaaagataaaagataatagataaaagataataaaaaatgtggagttttggccaaaggccaaaacaaaaccgtaggggcggattccatatccgcccgcggcacctgccgtaagctgcacgggcgcatatagaatgcgcccctacggcggcagaaatttttgagcggccgtaaggccgcgatccaccaaatttattatctattatcttttatctattatctaaaaaaagaggggtacatacaatgagcaacttcaactccatccccggcggcatctgtgcgccgcagggcttttatgcagcgggcgtgcattgcggtatccgccataaccattccaagcttgacctcgcgctcatcaaggcatcggtgcgctgcgcgggcgcgggctgctataccaccaataaggtctacggcgcacccatcacggttgaccgtgagcatcttgcggacggctacgcgcaggccatcgttgtgaacagcggcaacgccaacacctgcgcgccgaacggcctgcagcttgcgcgggatacctgcggccttgtggccgaggcactcggcatccgcgccgaggatgtgctgccctcctccaccggcgtcatcgggcaggccatgagcattgagccgttcgccaagggcatccccgaggctgccgcaagactggctgcagacgaggcaggcagccatgacgccgccaccgccattatgaccaccgacacccaccccaaggagcttgcgctggagttcacggtgggcggcaagccggtgcgcatcggcgccatcgccaagggcagcggcatgatccacccgaacatggccacgatgctcctctttatgacgaccgatgccaaggtcacgccggccaccctgcagaaggcgctctccaccgtggtgcccgcgaccttcaaccagatctcggtggacggcgatacctccaccaacgacacggtgctgctgctggcatccggcctgtcgggtgcagaaatcgttgacggtacgcccgattatgatactttcgttgccgcgctgaccgaggccgccgagcagctcagccgtgagctggccggggacggcgagggtgcgaccaagctgctggaatgtaccgtcaccggtgcgcccgacctgctgaccgcccgcgcggtgtccaagagcgtcatccactcgaccctgttcaaggcagccatgttcggcgcggacgccaactggggccgcgtgctctgcgccatcggctacacgccgggggattttgacatcagccggacctcggtacggctcaagagcaaggcgggcgaggtgttcgtctgcgaaaacgccgcctaccacccctacagcgaggacgaggccgccaaggtgctgcaggaggatgagattgatattctggtcgaccttggcagcggcagcgccaccgccaaggcatggggctgcgatttgacctatgattatgtgaagatcaacggggactatcgcacctaacgcaaaaggcttcccccgtggggctgcgcccgcaggcgcgtgtcggagcgcaaccgccgaaggcggctcttagcgcgtagactgaagctgtcaccgaaggtgactgatgaggggcaaacttcctgctgtaacccgctcacgggcaatcgcggccccgccgcccctcatccggccctgcggggccaccttccccccaaggggaaggctttagaggtaggggatggaggaaagtatgaaaaacgaacaaatggccctgcttttcagcgaggctacgccttatattcaaaaataccacggcaagacgctggtgatcaagtacggcggcaatgccatggtcaacgatgagctcaagcttgcggtcatgaacgaccttgtcacgctgacgctgctgggcgtgcgcgtggtgctggtacacggcggcgggccggccatcaacgatatgctcaaaaaggtcggcaaggaatcccgcttcgtcaacggcctgcgctataccgatgccgaaacgatgggcattgtgcagcaggtgctggccgggcaggtcaacaaggatcttgtcgcgctgctcaaggggcgcggcgtcgggctttgcggcatggacggccagatgattatgtgtcggcgcaaaaccgatgctgacctcggctttgtgggcgagatcgagcgggtcaacacaacgctgatcgaccacctgctggcggacagctttatcccggtcatcgccacggtcggcatggacaagaacggcgtgccctacaacatcaacgccgacacggcggcggctgaaattgcgattgcgctgcacgcggaaaagctcgtcagtatgacggatattgtcggcctgctccgcgacaaaaacgatgaatcgacgctgatccccgaggtcgagctttccgagattgagggctacaaggcggcgggcgtcatcgcgggcggtatgctgcccaagatcgagggcatggcggacgccatccggcagggcgtgcatgaggcggtcatcattgacggccggatgccgcactcgatcctgctggaaatgttcagtgacagaggcgcaggcacgatgttctatcggagaggaaaccggtaaatggcttccccttcgggggaagctgtcagcggccccgcccgctgactgatgagggcgaagtgtttggcgcggttccgcaaacggccagccgcaggacacttgcccctcatccggcctgcggccaccttccccccaagggggaaggcttttgcgtatgataaaaagggggtcacccaattgaataccgaaaaagttatttcccgtgataacgactacatcctccacacctacgcccgcagcccggttgcgctggtggcgggcgagggcatggtcgcgcgggatgccgagggcaggcagtacctcgactttacctccggcatcggcgtcaattcgctggggtactgccaccccgcatgggtgcgcgccgtggccgggcaggcggctgccctgcagcatacctccaacctgtactataccgagccgtgcggcgcgcttgcgcaggcgctctgcgcccgtaccgggctggatgccgttttcttcggcaattcgggtgccgaggccaacgagggtgccatcaagtgcgcccgcaaatacagcgtggacacctacggccccgcccgtaataaggtcatcaccctcgtcaactcgttccacggccgcacgctggctaccctgaccgccaccgggcaggatgtgttccaccacgacttcgggccgttccccgcaaattttgactatgtgcccgcaggcgactttgccgcgctggaaaaggccacggatgccgatacctgcgccgtcatgctggagctggtgcagggcgagggcggcgttgtcgcgctggacgcggactatgctgccaaggtcgcggcgttctgccgggaaaaggatattctccttatcgtggatgaggtgcagaccggcgtagggcgcaccgggcggtttctggcgtgtgagcatttcggcctgaagcccgacatcgtcacgctggccaaggggctgggcggcggcctgcccatcggtgcggtcgtgatgagccaaaaggcggcggcccatatgggccccggctcccacggctcgaccttcggcggcaacccggtctgctgtgccggtgcgctggctgtgctggacacgatggacgaggtatttctcgcgcaggtcagggagcgcgccgcccagctgcgcgccgggctggccgcgctgccgcatgtgcagcaggtcagcggccttggcctgatggtgggcatcgagtttgcggacggcatcaaggccgctgaggtccgcgccgcctgcgagcgcgagggtctgctggtgctgaccgccaagacccgcctgcggctgctgccgccgctgatcctgaccgccgatgatgttgcggcggcccttgccaccctgcgccgggtgctggaaaacacccgcagctgaggccgcccccccttgacagccatggtatactggtaatattactgccaagggggaaaaaatggcaaaagaaacgctgcaacaaaaaattaagcgggtactggggcggttcacaccggggcgcatcgctgttatcatgctgggcacggcgatcctgtccttcggcatccacaatatccaccagcgcaccgccatcaccgagggcggcatcatcgggctggtgctgctcatcaaccattggctgggggtgccgccctcggtcgcctcgcccctgctggatgcagccagctatgcgctggcgttcaagtttttgggctgggactttctgctctcggcgggcattgccagcgtcagtctggccgggttttaccgcctctgggagtgtctgcccccgatgctgcccgacctgacgccctacccgctggcggcggcgctgctgggcggcgcgtttgtcggcatcggcgtcgggctgatcgtgcggcagggcggctccagcggcggtgatgatgcgctggcgctcgtcatccacaagctgaccaggtggaagctctcccgcgcgtacctttttaccgatctgacggtgctgcttgcatcgctgtcctacattccggtgcgccgcatcgcgttttcgctcgtcacggtcacagtgtcgtccctcctcatcgactgggtgaaggagtacaccccgaaaagcggcaaaacaaatgtgtaaaaacggcgggaacgcttgtacatgggccggaattgcggtataataaaaccattaccgcataattccgggtgcgggtgcggcgcagccttggcgtgcgccctgccgctgcctgcgggattgctgcggagattttctgcaaagcacccaatggaggttcacgatatgaaacttacccgcaagcttacggcgctggcaatggcggtgctgctggccttcaccctgactgcctgctcccccaaggcgtgggcgcaggacaccgttgtcaagctggtcaaggcgatgggtctggtcgaggagtccgatgatgacgataccgacaccaccaccaaagcggccgtcggcggcagcgtggaatttcccgaggggatggacaccggcgcggcccgcgttgtgacctacccgcaggacaacacgctgtatgtctccttcaacggcattgccaaccgctccacggagtattttgtggcgggcggcgacagcatgacggtgaccggctacgccacgactgaggccagcagcgagaaatatatgtactttaagatcgcgttctgggagctgagcgacgacaagaccagcaccagctatgtgcagggctcgacgatctactactgtgcggacggcagcgcctaccagtataatgtcacaggcctgaccgcgggcaagcagtacaagatcacgatcagctacgataacggcaacaagtactatgtcaccggcggcctcaaggtcgaggggctgggcagcgatgagctgaacacctacggcgaggaaagcacaaacagctgataacacataccgcccgcgccgcagatggccgggcggtattttttgaagcacagggaaagtatacacaaagaggacggacagggggggacagccctgtccggcaggatgtgcaacgagaggggattttgcactatggataaaagacagctgcgcaacacactgctgctgatctgcgccgccttcatctggggcacggcctttgtggcgcaaagcgtcggcagcggctacatgggcgcgtacacctttttggccagccgcagctggctggcctgcgtctttctgctggggatgctgtttgtgcgccgcgccgggcagaaaaagcgcggcagcggcctgcccttctggatccacggcaaaacgctggtgctgggcggtatctgctgcggcacggcgctgtttgcggcatcggcggcccagcagatgggcatcggcacgaccagcaccgccaaggccggctttatgacggcgctgtatgtggtgctggtgccggttgcgggggtctttctgggcagccgccccggcatcaagctgtggtgctgcgtggcggtcagcgttgtggggctgtacctgctctgccttgcggggcgcgatacgctcagcctgaccggcggcgagtggcagctgctgctctgcgcgctgctgttcacactgcagatcctcgtggtaaaccacttcagccccaagctggacggcatccagctcagcttcgcccaatttttgatggtcgcagtgctgtccacgatctttatgtttgtctttgaagcaccgacaatcgaccagttccggggcgcggcggtttccatagcttactgcggcatcatgtccagcggcgtggccttcacgctgcagatcgttgcccagcgggaccttgacccgacgatcgccagccttgccatgtgtctggaaagcgtattcagcgcccttgcgggctggcttatcctcggtgagacgctctctgcgaccgagctttgcggctgtgcgctgatgttcggcgcgatcgtggccagccagctgcccgagaaaaagcgcgcctgaccctctgcggcgagactgccataaacggccttgtgtgcacgatgcgcgaacaaagttacaaaaacaccgcaaaaatccgtgacagactttatttaataaagctgtgccgcggattttgtattgactttttcagctggtgtgctataataagaagcaggatcaggcaggatgatccgggacgatagcacaggaaccacggcgctattgtccttttttgttattctgcccgatgtctgctttccgccgcgcggcggcgggaaaatctgtggagtggaaaggaaagtgtctcatgaaaaaactgtttgcactcggtatggcctccgtcatggccctctctctcgccgcctgcggcggctccgcctcctccgcggcctccggcgctgcggacacctcctctgcggcaaccgccgaggccaccggcaaaaagtgggtcgtggctactgacacggtctttaagccctttgagtacaccgatgcttccggcaactttgtcggcattgatgtggatatcctcgccgccatcgccgaggatcagggctttgagtatgagctgaagagccttggctgggacgccgccatcgcggcctgccagtccggtcaggcggacgccatgatcgccggtgcctccatcaccgacgagcgcaaggcgagcggctggatgttctccgacggctactatgattccaaccagacgctgaccgtgcccgaggactccgacattgccggctttgccgacctgtccggcaagaatgttgccgtcaagaccggcacgcagggcgcgtcctacgccgagagcctcaaggacgagtacggcttcaccattacctactttgaggattcccccacgatgtatcaggccgttctgggcggtcagtgcgtcggctgctttgaggatacccccatcatgaaggcctccatcaaggacggcgctctggccctgaaggtgctggaggataccgccagcgaccccgcgccctacggctttgccatcttcagcgaggacagccaggagctgctggacatgttcaacaagggcctggccgacatcaaggccaacggcaagtatgacgagattctggcaaagtacctcggctaaaccatgaaaaatacgcggggacgcctgtttttgcgggcggccccgcttttgcgaccccgggatccctcttggcccctgcgcggagagcggctcttgcaaatccaacccccgaaaggagttctgcgccttgatttttaagattcttgccaactacggcccgctgctgctggccgccatgggccaaacgctgctgctggccctgtggagccttttcttcgcctgtctgatcggcctgtttgtgggcatcctcagcgttttgaaaagccgcgtctgcaacatcatcgccacgatctttgtcgatattatccgcggcgtgccgatgatcgttctggcgttcttcgtctatttcggcgtgccgatgctgatgaacgacaacctgaactggacagccatgaccggcagcaaattcacctttacggcgctgcaggccggcatcatctgcctgtcgctgaactgcggcgcctatatggccgagatcatccgcgccggtatcgagagcgtggacaagggccagatggaggccgcccgcagccttggcctgccgtactggaaggcgatgtacaaggtcgtgctgccgcaggccatccgcacaatgatcccctcgatcatcaaccagttcatcatcaccctcaaggatacctcgatcctgtcggtcatcggcttccccgagctggtcaacaccgccaagaatgtgaacgccaacataatgcgttcgcttgaggtgtggttcatcgtcggcgttatgtacctgatcgtcatcacgctgctgtcccgctttgccaagcggatggaaaggaggctcaaccgtggccgtcaataagaacaatgtaaaaattcatgttgagcatctgaagaagaacttcggcaatctggaggttctgcgcgatgtatcggctgatatttatgagggcgaggtcgttgtcgtgctgggcccctcgggcagcggcaagtccaccttcctgcgctgccttaaccggctggaggagatcaccggcggcacggtcatcgtggacggccacgacctgaccgataaaaagaccgacctgaacaaggtgcgcgagaatgtcggtatggtgttccagcacttcaacctgttcaacaacctcaatgtcatgggcaacatgacgctggcaccggttgagctgaaaaaggccacccgccccgaggctaaggagaaggcactgcagctgctggaccgcgtgggcctgtccgataaggccgatgcctacccggcgcagctgtccggcgggcagaagcagcgtgtggccattgcgcgcgcgctggccatggacccggacattatgctgtttgacgagccgacctcggcgctggaccccgagatggtcggcgaggtgctgcaggtcatgaagcgccttgccgccgagggcatgacgatggtcgtggtcacccatgagatcggctttgcccgcgaggtcgcaagccgcgtcatctttatggagggcggctacatcgtggaggaaggcacccccgatgaggtcatcaaccacccgaagcagccccgcacggtggacttcctgagcaaggtgctgtaaacacagcaaaatacgccaaagcgccccgcacccaccggtgcggggcgtttcgtgtggaaagacgcatttccccggtgtacaatacgggcgggactttaccgccgccgtattgcacccggggcgcgggtttgctacaataaggataagcgaaaggagcgtttgccaatggaaaaaatcaaaaggaatttcggcttcggctgtatgcggctgcccatgcagggcgaggaggtcgatcttgcccagacaaagcagatggtcgatgaatttttggcgcagggcttcaactatttcgacaccgcgcacggctacatcggcggcagaagcgagacggcgctcaggacctgcctgaccagtcgttacccgcgcgaaagctatgtcctgaccgataagctgtccggaggcttttttgaaaccgaggccgacatccgcccgttctttgcacgccagcttgcggcctgcggcgtggactattttgacttttacctcatgcactcccaaaatgccgagaattttcagcacttcaaggcgtgccgcgcgtatgagacggcgttcgacctcaaggccgagggcaagatccgccatgtcggcctctccttccacgaccgcgccgaggtgctggaccggatactgaccgagtatccgcagatcgaggtcgtgcagatccagttcaactatctggattacgatgacattgccgtgcagagccgcaaatgctatgaggtctgccgccggcacaataagccggtgcttgtcatggagccggtcaagggcggcaatctggtcaacctgcccaaggacgccgccgctgtgctggactcgctgcacggcggcagcccggccagctatgccatccggtttgcggcgggcttccccggtgtcatgatggtgctgtccggcatgagcaatatgcagcagatgcaggacaacctcagctttatgcgggattttcagccgctgaacgaaaccgagcgcgccgccgtgtccaaggtggtggagatcttccgcaaacagaacctgatcccctgcacagcctgccgctactgtgtggacggctgcccgcagcagatcgccatccctgacctgtttgcgatcatgaacaccaagaacatccaccacgactggaacgccgattattattacgaggatgtccacacccgccccggcacccgcgcatcggactgcatccgctgcggcagatgcgagcagatctgcccccagcacctgcccatccgcaagctgctgcaggatgtggcaaaggagtttgaaaagtaagcaccgtacacaacacccccgcccgccttccttatataaatggaaggcgagcgggggtgttgtgtgtaatgcggaatgtcggacagtccgaacaaaacaaaaaaggtcacttactttcgtaagttgccttgtctctatgttacaaaaaagataccctataaaaaggcttagacaaggccgctgttttataaaacattgatttgatgactgaaaattttgtattagaatactgcctctaaagactgcctatggcaagggaagatattggtattcttccggtagggtaagagccgcccaatcaattttttttgctgtgtatacgatttctgtatagagctcgtctccgcgctgctttcgatatgtaatgacgattctatttgcgccacctttaaccatgcttcggatatcgccttccaatacggtgttgggaacaaaacgccctttgccgccattgcggacaaagcccatacaagcaccaactgatccggcgagtttgtcagtgtacaatttcggctgggataaattgtaatcaccgaccatcttagcagaaagatgtttctgcaccaatccgggaagaacgcgcattttcatttcggtcgtgccgtctgctgcaaactcaaaatcagattcagataagcgcttgtcgcagcatatactaaagaagttgtttgcactgatttccttcttgttcagcttaaagcctgtcatgtgcagaaaattgctgccgtcaaatgtaacttccagacaccgaacggtcttatgcttgtcagtcgtaacaaataaaaggcttcttcccgctaggttttccttataggaagctgcgcaggagaaaacgatttgcaaggcttcttttttcgtcatgataaacttcctgttgcattctatattttacaaaaagaaagggacacctacaacaccgcagtgctgtccgatgtcccttgtggctagttttatcgttgtccgccaaccgacaggtccttacgccctgcatcgctttcgggttttatcgttgcccgccaaccacaggttcttacgccctgcatcagatcggattttaggtgctagcccaccagcagaatgtcgtctgctttcctacctatagtatacacaagacgaacgaaaatagcaacagatctagcaatcaattttatgaaatttttgcaaataaacgcacaatcgaccactggctttgccaattttgtgtgatacaagaaagttgccgatatttaatttattggagttgccactctaaaaatcaccacactgacaacttggattcgaatatcttcctatatgctgcaatgcgcagcttttgcaattcaagagatgtttcctttttaataatagtcggatatattgtgtgagtctgtacagacataaaaagcgccccatgtctactataacatgaggcgcttacaatataaaataaaaagtaaaagctacatccaaattgctttgaatgtagcttttaacttggtgcgccggaagggactcgaacccccgaccttctgattcgtagtcagacactctatccagctgagctaccggcgcatattctcttgtgcgttccgctcgagaacgtgttttattatagcgtcatccggggagaaagtcaaccctttttttcaaaaaactttaaaaaaaaggcaaatgggcaacttgccctaaatttcgcggggcaggggagagcatttcggccatttgtcgttgattgttggggtgcagagaattgacaaatactttgcaacattttataataaaataaattcttggatattggcgatggcgtttgcgggccgcagccgccatcgacttttttattcttcaatgtgtgcgccgtacacgaacaagcgtgtgcgtatagcgcaggatagggaaggattgacccggaattgaccccaatttgtattccaataagaaacggagtggcactaaaccatggcgaagtacatcgtcaagcgcgtggcaatgggcattttcagtgtgttcatcgttgcgacccttacctttttcatcatgaacctggtccccggcggtccgttcgtggctgaaaagtccatcagcaaggcagcccagcaggctctggccgagaaatacggtctggacaagcctctgggggtgcagtaccttaactatatgaacagcctgatccacggcgacatgggcctgagcttaaagcagcgcggccgtaccgtcaaccagatcatcttctccaagctgccggtctctgcccgcaccgccggtctggccgtgctggtagcgctctgcgtcggcatcccgctgggctgtctgtctgcgtataaccgagggaaatgggctgacaaccttattattgtcttcgccacctgcggcatcgccatcccgagctttatctccagcgttgtgcttttgtacaccttcggcatgaacctcaagctcctgcccaccgtcggcctgaacgagcctgcggcctacatcatgccggtcacggcgctggcgatctatcccaccgcctacatcacccgcctgatgcgctcgagcctgctcgatgtcatggggcaggactacatgcgcaccgcccgcgccaagggtgtttccagcgtgaagatcctctttaagcatgcgctgcgcaacgccattctgcccgttgtcacctatgtcggcccgatgctggccggcctgatgaccggctccttcgtggtcgagaagatcttctcgatcccggggctgggccgcgactttgtgtccgccatcaccaaccgtgactacatgatgatcatgggcaccaccattctgctggccgccctcgtcattgtggccaatgtggtcgttgatattctgtacaagatcatcgacccgcgcatcaagctgaagtaaggaggagcagacaaaatggaaaatctgaaaaagaatccgttgagcctgcaactcaacgtggaggatttcgcccccgcatccaacgaggagaaaaagagccttgtcatcatgcgcgagagcgtcaacttctggaaggacggcatgcgccgtctgaagaagaacaagatcgccatggtcagtctggtcatcattctgctcatcgcgtttatggcctatgttctgccgtccctgtggccctacagctatgagcagcagatcaagggcagcaacaatctggccccgtttgcctactctgccgctgagcaggccaagatcgacgcgggcgagaaggtctttccgcatatcctcggcaccgaccgcatgggccgtgacttcgccgtccgcgtcatgatgggcacccgcgtttcgctgtctgtcggcctgctggcctcggtgctggtgctgctcatcggtgcgacctacggcgccatctccgcctttgcgggcggctgggtggacaatatcatgatgcgcatcacggatattctctacaccatccccgacattctgctcatcatcctgctggccatggccatcaaggagccgcttgaggtgctggccaccaagccgggcttcggctggatgcagaccctcggccccaacatggtgtcgatcttcatcatcttcgcgctgctgtactgggtcggcatggcccgtatcgtccgctcgcaggtgctgaccctcaaggagagcgagtatgtcaccgcagcccgcgcactcggcgcgtccggcggccgcatcatcaagaagcatctgctgacgaactgcatgggcaccctgatcgtcaccaccaccctgcagatcccgtcctccatttttaccgagagctacctgagcttcctcggtctgggcgttgcggcgcccatgccgtctctgggctcgcttgcgaccgatgccgtcaagggcatgaacacctaccccatgctgctgattgcgcccgcgctgatgatcagcgtcatgatccttgtgttcaacctgttcggcgatggtctgcgcgatgcctttgacccgaaattgaagagctaaaggaagggaggaagaatcatgagcgaaaaaattcttgaaatcaaggacgaacgcctgtccttctttacccccgccggtgaggtcaaggcgctgaacggcgtttccttcagcatgaatcagggcgatgtgctgggcattgtcggcgagtccggctccggcaaatcggtcacggcctactccatcatgggcctgaccgcctaccccggccgtctggtcggcggtacggtgtggttcaacggccaccagatcgacaagatgaccgagaaggaattccgcaagatccgcggcaacgaggtctcgattatctttcaggacccgatgacgagcctgaacccggtctacaccatcggcaaccagatcgttgaggtcatccgcctgcacacccagaaatccaagcaggaggcgtgggcccgcgccaaagagctgctggagctggtcggcatcaacgagccggagcgccgcctgaagcagtacccgcatgagctgtccggcggtatgcgccagcgcgtgatgattgccattgcactggcctgtgagccgaagctgctgattgcagacgagccgaccaccgcgctggatgtgaccattcaggcacagatccttgagctgatgaacgacctgcgccacaagctgggcatgtcgatcatcatgattacccatgacctcggtgttgtcgcccagatgtgcgagaagatcgccgtcatgtacgccggtcatatcgtggagtacggcacgaccgatgagatcttctacaacccgcagcatgagtacaccaagggcctgatcaactcaatccccaagctgaacgccgaggagaaggagcgtctggtgcccattgagggccagcctgttgacctgctgaacccgccggccggctgcccctttgcaccccgctgcaagaactgcatgaagatctgcctgaacaagatgccgcccaagaccgagctgagcgacacccactatacccactgctggctgcgccagaaggaagaatttgagaaaggaggcaaggccgaatgagtgagcagaagaatctggtcgaggtacagcacctgcagcagtatttccctgccggcggcatgggcaagaacaagcagtatgtgcaggctgtcgatgacgtgagctttgccatccgcaagggcgagactctgggtctggtcggcgagtccggctgcggcaagaccaccaccggccgtaccctgctgcgtttgtatgagccgacggacggcaccatcatctatgacggaaaggtgctgtttgacaagaaaaagaagatcgcggtggacatgctgccctaccgccgccgtatgcagatcgtgttccaagacccctacgcgagccttgacccccgcatgacgatcggcgacattgtgggcgagggcatcgacatccaccacctgtgcgccaacgccaaggagcgccacgacaagatcatctccctgctggagcgtgtcggcctgaacagtgagcatgccaaccgctacccgcacgagttctctggcggtcagcgtcagcgtgtcggcatcgcccgtgcgctggctgtggacccggagttcatcgtctgcgatgagccggtctccgcgctggatgtctcgattcaggcgcaggtcgtcaatatgtttgaggatctgcagcaggagatggggctgacctacctctttatcgcgcatgacctgagcgttgtcaagcacatctccaaccgcatcggtgttatgtatctgggcaagctggtcgagctggccgacagctttgagctgatcgcccacagcgtccacccctacacccgcagcctgatctcggccattccggtggctgaccctgtgacggcccgccagagccaccgcattgtgctgcagggcgatgtgcccagcccgctgaacccgccgagcggctgccgcttccgcacccgctgcccctacgccgatgagcgctgcgccgccgaggtgcccgagttcaaggaggtttccagcggccactgggcggcctgccaccatctggataaggtgaagtaaaattctgtccgccgactgacttcactcagcttgcagcttatacttatacagggcggctcaccgcggccgccttgtgtttttgccaaaaatgtgcgcggaagagagacattcatctgtgtgccacagaattgtatgcgagtgaaagacaaacggattttctatcaaaacagttacaaaatttacagaacacttgcaaatgccgctttagagtggtaaagtataaatattcactccgcagggggcagcgcccccgagggggttgggtataaagtataatgaatttggagggtatttcacatgaagatgaagaacgttgctgccgtggctatggccggctgcatggctgcttctctcgctgcctgcggcggctctgccagctccgcagcctccaccgagaccagcaccgcagcatccaccgaggctgccaccggcgaagagagcactggcgttgccagcggctttactgtccagctcggttccaaccccgagacgctggaccccgcgctgaacaacgcaatcgacggcgccaacacgctgatcaccgtctttgagccgctgctgctcattgatgagaacaacgaggtcatccccggtcaggctgagagctacactgtcagcgaggacggcctgacctggaccttcacgatgcgtgacggcctgaagtggagcgacggctccgacctgaccgcgaaggactttgagtactccttcaagcgtctggccgcgcccgacaccgctgccccctatgccgagactgttgtcggcatgatcgacggctacgccgatgccaccggcaaccccgataaacagggcaacatgaccaccgagcctgacttcgacgccctgaatgtcgttgccagcgaggacggcaagaccctgaccgtcaccctgagctacccctgcgcttactttgacaagctggctgcctttgccgccatgagccctgtgcagcaggctacggttgaggccaacggcgatgcatggtgcaccgagcctgacacctacatctgcaacggcccctactgcatctctgagtgggtcccctctgagcgcatcgtgcttgccaagaacccgaactatgtcggcggctgggattcctccaagatcgtttccgacaccatcaccctgctcctgctcgaggattccagcgcctcctacaccgcttacaacagcggtgaggcacagctcatcaaggatgttcccaccgatgagatccccagcctgaccaaggctgaggacggcggcgacttctatgttgacaccatcctgggtacctactacctctccctgaacgaccagaaggagccgttcaacgatgtcaatgtccgtaaggcgctgagcctggccatcgaccgtgactatgttgccaacaccatcatgcagggcacctacacccccgcctacaacatcgttggccccggcatcgtcgatgagaacggcatgttctacgacaacgccaacggcggcaagacctacatcagcgaagactacgaggccaacctcgaggctgccaagcaggctctggccgatgccggctaccccaacggcgaaggcttccccgtcatcgagtacagcaccaacgatgccggttaccacacccccgttgctgagtatctgcagcaggcttggggcgagctgggcatcaccgtgaacatcaacaaggtcgagtgggccagcttcaccccgatgcgccgcgccggcgactatgacgcttcccgtaacggctgggtcatggactacaacgatccctccaacatgctcgagctgttcaccactggcaacggcaacaacgatggtaagtactccagcgctgacttcgatgccgcgatcgaggcttccaaggttgctgacaagagcgtccacttccagaagctgcatgaggctgaggacatcctgatgaatgattacgcctgcatcccggtggcctactacaacgacttctggctgcagagcccctctctgaagggcacctggcacagcccctacggctactggtacctgcagtacggctatgttgaggagtaatctccgcgcataaccgcaataaccgcatagaaaaaaggcataacctgcgaaaacaggttatgcctttttgtttgtgtgacgcaatagttccgaggggcgtaggggcggggctctgctccgcccggggtgttgacccgatgacgggcaatattgatacacgcggaggggtcaagacccctccctacaaagtaaccataaacggtatttggcgggtaacgcccggccccggccaaactgtaaccccttacgcgcctaaggttgcggccatgacagccttgatcgtgtgcatacggttttcggcctcctgaaaaacgatggactggcggccggtgaatacctcgtccgttacctccatttcggcgcggccgaaccgctcgcccatttcccggccaatggcggtcttgtggtcgtggtaggccggcaggcagtgcataaagacggcggtgcgcttggccttggccatcagcgcagcgttgacctgatagggggccagcgcgttgatgcgctcctcccatacggtggtcggctcgcccatgctgacccacacatcggtgtagacggcatcggccccggctgcggcatcggtgtcctcggtcagggtgacgctgccgccgctcaggcgggcaaactcctcacagcgggtgacaagctcggggttcggccagtaggccttgggggcgcaggccacaaaatgcaggcccatcttggcgcagccgatcatcaggctgttgcccatgttgtagcgggcgtcacccatgtagacgagctttagcccctgcaggctgccgaaacgctcacgcagggtcaaaaggtcggccagaatctgggtggggtggtactcgttggtcaggccgttccacaccggcacgcgggcgtgcagcgccagctcctcgacgatcgactggccgtagccgcggtactcaatgccgtcaaacatgccggaaagcacctcggctgtgtcggcgatggattcctttttgccaatctggctgccggtggggtccagataggtcgtgcccatgcccagatcgtgggcggctacctcaaacgcgcagcgggtgcgggtggaggtcttttcaaaaatcagcgcaacatttttgccgcgcagcgtgtcatgggggatgccggccttctttttagcctttagctcggctgccagctccagcaggccgccgatctctgcgggggtgaagtccagcaatgtcaaaaaatcatgccctacgaggtccatattcattctccttttaaaaattcattatgcgtgtataaatatacatgaattatagcacattatccacggatatgcaagcgcggttttttgtgatatactgataccatgcaaaaaaagtgcccggcaaggaggggagaggtatggcaaaaatctactttcatgtcgatgtgaactcggcgtttctttcatggtcggcgctcaaggccctgcaggacggcggcaccgtggacctgcgcaccatcccggcggtggtcggcggcgatgaaaccaagcgccacggcgttgtgctggccaagagcggccccgccaagcagtacggcatcaaaacgggggagagcctgttcgcggcccgcaccaaatgcccggggctgacgatcgtgccgccggattttgactggtatgtgcaaaacagcaaggcgctgatccagatcctgaacgactatacgcccgatgtggagcagtacagcattgacgaggcgtttctggacatgaccgggaccgaggcactgttcggcccgccattgacggctgcgcacacgatccgccgccgcgtacaccgcgagctgggctttacggtcaatgtgggcatcgcccccaaccgcctacttgccaagatggcctcggactttcaaaagccggacaaggtccacaccctctatctgtacgaggtggaaaaaaagatgtggccgctgccggtgggggagctgttcggggtcggccccagcgcggccaaaaagctgaacagctgcggcatttatacaataggaaatctggccgcacaggaccgggccacagtggtttcgctgttcggggcgcgcggcgatacgctgtggaactacgccaacggccgcgaggccgaccctgtgaccaagcagggcagccgtgacaacagctacggcaacagcgtgacaatgccccgcgacctgccccgccccgaggaggcggacgccacgatgctggcgctctgcgattcggtcgggcggcggctgcgggcggacggcaagaccgcccgggtcgtgacggtgcagctggtggacaatgcgttccgccgcaccagccaccagacgaccctgcccaacccgaccaactccaccgaccggctctaccgtgtggcggtcgagctgatgcgccagatgtggccggcccgccctgtgcggctggtgggcgtcagcgccgaaaagaccggcgaggacaactttgagcagatggatctttttaccgatgccgcgcggatcgacaagcaggaaaagctcgaccgcgccgccgatgctttgcgccgcaggttcggcggcgctgccgtgacccgcgccacgctgctgacccccgacacccgcaagcccgaggcactgagcgccgccaaagaacgcgaaaaagaaaaaaagtgacgggcgcggcggcccgaatagcgggcagcgggcatccgcgcaccgcagcctgcgtacaaagtgtggttatacctattgacaagcaagtgtattatgcgtataatacacttaaagcacaaaataaaaccgggaaaggaggcggagcagttggtcaatttcagcgggctgcaatttcatgacggcgcgccggtctaccagcagattgcggaatacctcaagcggcagatcctgacgggcgcggtgcaggacggcgagccgatgcccagccggcgggagctggccgcgcagaccggcatcaaccccaacacggcccaaaaggcctaccgcctgatgacagaggagggctatgtcgtcacggacggcaacagcggcagctatctgcggctgacccccgccctgcgggagaaaattgacgaggagctgacccgcggccttgtggaggattttgtggcccgggccaaggccaaccgactgagctacaaaaaggtcattgcgctggtcagcgagctttgggacgatgaggcgtaggacgagccgtttgttttttaggttgagcgtactatacttataatacataaggaggagtccaaatgcagcataccttcacccttgccgcgtggaattttcgtttggcgcggcgcagtctgctggcactgtggggcgtttttgccgcccagcaggcagcggtcatcctgtggcgggccgcgcagccgggggcggccgggctgggactggcgtctcattattacgctacgatgcagatttttgtctatctggggttttacctgctcaccgcgctggcagcgggggcggccacccacaacagccgccgcgcccgcagcggctatacatgggccacgctgcccggtacgccggggcagaagcttgcggccaaggccatcacgattgccgctgccgagctggtctttgccgcgtggcagcttgtgtggtacatcgtggagttttaccccgtcacagcgctggaaagctggcgccgccgccagatgtacggcgtggtgctgcccgccgccagcctgtatgagcaggtcgttgccaacaacctgttcgcccgccttttgccgcgccgcccagcacagatcgtgatcctgctggggattctggccctgtccgccgcgatgctggccgcgctggacacggtgcgcggctggcgcaagctgcccgtctttgccagcggtatgttttgcgcatgggtgtgcttctacatcgtgagcatcgagcagcatcttgcatggctgcttgacgagccgcgctatgccttgcgtatcgctgcggccgctgtgctggctgtgctcaccgtctggtgggcggtgcgcagcatccgccgcggcgaggcagtctgaaaaggggagtgaccagacatgaaaacgaaaaaatcaacatctctgcggaattttgtgacagcaatcgttctggccgccgccctgctggccgcaggtgcgctttgggtgctgctgggctggcgcggtgcgctggatgtcaccctcaccgatctggcgggcgaccctgccgcgctgcgcggctttacgatgcgcggccagagcagtctgggcagtgcccacacctactgggagctgcacgatgggtatctggataccgcctttgcgctggaccctgatggggacgaggagcagtatcgctatagtgcaccgggtgttgccacgcggacgatctacgcgctgacgccggaaagccgcgccgccgttgacgccgctgcccgccgtgtgcagagctacgcagacagctggcggctggagagcgccgcatccgccttccgcgttatggccgaaatttatataaacggcggcgtgctgcgcgtggcgctgcgggatgcagcggtgaacgagcctgttgcggtaaccgcctacgcagaggcaccgagttatctggcacgcaccagctgccagtacgactatgaggccgacagccccgagcagctgcagaacatggaaacggaccacgattttattgccgggcagctgttcagcttgggcggcgggcagggccttgtctggaagcgcaccatcggcagccgcagggcgggtctgtacagggcagcgccggtcagctatgaggcgcttgaggcgctgcccgccgatggcaaggccggtgaccgcgcggtactgtgtgcgaccaccgaggttggcacgctggagccgttctattgccccgaggatgcccggctggtcgcctgcggcctgccgatggctgacggcctgacgctgtgcgtctatataaataaggtagacaaggcctgcgctgaccttgtcaatgcggccggtgtgcgggtcgctcatctggagctggcggagtttgccgggcaatcggacttttccgccgtggccctcccgcgcagcaccgactgtgatgccgtgctgcatatctacggcgatgactactccggttatctgactgcgctgcgcatcgagaatggcagctttgccctgcaccaaagcctgccggtgggggaaagcgtttacctgcgcaacgccgaggcagccgtgctgaacgcagccggtgatgcactgcttgttgccacgcccgaatacaccacggtgggcgagggcggcacagacaatgcctacaacatataccagaccgggacgctgctgctggtctgcccgctggacggcagcggcacgcgctaccggggccgcctgaataccggggccgagcgcgactggggcgcgcagcagctgggcgaggactggcgcagggtctctctgcgccgctacatgagctacgagctttacgaaaaggacaggaggagacagctatgatcgaggtgcgaagcctgcagaaaacctaccgcagccacggcgcggctgtgggcctgctgggtgcggatttccttgtgccggatgggcagatcgtgggcatcctgggcgagaatggcgccggtaaaacaacgatgctgcgctgcattgcggggcttctgccgcacaaaggcacggcgctgctggacggccggcctgccggggtgcagtacgagcgcatcagttatatcaccggcgagggcagctattacccggcgctgacggtggcagcctatggtcagctgctgaccgacctgcaccccgcgtttgaccctgcgcggtacgaaaaatttctggaatttttcgccctgcacggcacggatacaatcgggcggctttccaccgggcagcgcgcgcgggtggaactggctgccggctttgccaagcgggtgccgtattacctgatggatgagccgtttttgggtaaggaccccttcacccggcgggatttcatcaagctgatgagcgccacgctgaccggcggggaaacgctgctgctctcgacccattatattgaggatgtggagcattttttggaccgcgcactgatcctgcatgacggccgcattgcggaggacctgcagctggacacgctggcacccggcgacagcctgctggcccacatggcatcggcctgccattgggacccgcagcggtatctggcgtttgaggaagaataaaaagtgacccatgagcaagcaggctcatgggccacttttttaattcgcttcaaacaataaatattccctgtcgatctccacaacgatggagttctccccggtcagccagtaggaataccccgtgccgaagttggaacatccgtccgtctccgggaaggcatcgtgcgccacactgtccgcaatcacgccgtcagggtcgcggttggcggcaaagtcaatctgggcgggtgactcaaaataccgcacaccgtccagctgcacgcaccgcgccacgcccagtgctgtggacgattcggcggcgtcctgcgtgcctttgacggccgccccctcgttggcttctgcattgcccgcggtctgcggggcggcagtgtcggccatcgcttcatcgggggcggtctcgactgccgcagtctcaggcagctggtcgctcagcatcacggcatcgtgggggatggcgctgcgctgccaaaccgttatgccgcctaaaaagatgcaggcgcaggcggctgcagcggcaaagccgcgccagtacaccggcggcctgcggcgctttttaaccggcgcatcggcggctaaaatcaggtcatcgtccagatggccgatggcctcaaacaattcgcgctctgtcaaagcgcagcacccctttcctgtaagtatgcggccagcttgccgcgcgtgcggtgcagcgtcacccgcaccttgctctcggtcaggctgtaccgcgcggcaatgtcggcggtggcatcgcagtaccagtaccgccgcaaaaatatgttgcgggtctcctcgggcagcgtgcgcagaaacgcgctgatcagccgcccggtctcggcggcgtcaaagctttcctccacgctgcccggcgcggctacacattcggcaagttcgtccagcggggcaaagctctggccgcagccgcgcttctgcgctgtggttttgtcaaagcggtcaagcgcaagattccgcgtgatgcgccccaaatagggcgccagccttgcggggcggttggcgggcatgctgttccatgcggccagccatgtgtcgttttcgcactcctcggcatcgtgggcgctgtggagtatgttgtcggcaattttgcggcagtaggcgccgaatttggcggcggtctcactcagggcctgctcgtcccgcgcccagtagagcgccacgatggcggcatcctccatgattttgccctcctttaatagtatagtaggaaaatagtcgcaaatgttacagaaaaagcctgccggcgggggcagacttttgaaattgtgcttgcagcggcgcttacagcatatgctttttatgcagcacccacgccgcaaacacgcacaaagccagcgtcagcgccagcacgatggcaaacccggcggtggtgttggcaaacggcataccatcggactggacattcatgccgtacaaaccgctgatgacggtaggcacggccatcagcagggtgatgctggtcaggtatttcatcgcattgttcaggcggttgtccaaaattgagctgaacagctcccgcgtgcccttgatatcatcgcggtagatactggtcatctcaatggcctgccggatctcaacgatcacatcgtccagcagctcacggtcatcggggtactgctccaaccgcttgtagcgggtcaggcggtccagcacagtagcgttggagcgcagacttgtcgcaaagtagaccagcgtggattccagtgcgtgcagctccatcaggtcgctgtccttcaactcgccggacagatttttctcaatggcctgacggcggcggtcgatcaggcgcagctcctgctggtacatcgtagccgcacggtagagcagctggtagacgaaccgcatcttcttccgggtggagaaccccttgacccggcaggcggcaaaatccccgataacggcggtatcggacgagcagaccgtgacgatcagctcctgcgtcagcagaatgccaagcgggatcgtggagtagacgccctcgcctgcgccctcgaccttgatgggaatgtcaacgatgatgacagtgtagccgtcctccagactgatgcgcgccgactcctccgggtcggtcgcggccacgatgtcggccgactcaatgtccagtgtggccgccacccggcgcacctcatcgtccgtgggactggtcagacagatccaggtcccctcgctcatatcatcgacccgcgtcagctgcttgtcctgcgtgcggtaaatcttcatcatggctcgttccacccatacattattataatatcagtataaagcttttccgcacgatgcgcaagcagatattttccccggccgtaccccctgcggcagcacccaccaaacggtccacccgcccccaagccttcccctgagggggaaggtggccccgcagggtcggatgaggggcaaccttgcggataacgccctttatcgggcaatctttccgtccctgcccgcctgtagggaggggtcttgacccctccgccgcttcgcattaaatgtcattcctcatttaccacccctgtaggggctgggcacgcccggcccgcaaccgtacctatttacatcactttttatcttaaccccgtaggggagggattcatccctcccgtgcacccaacgcaaccactcaccaaacggttcacccgggcggatgcaagcatccgcccctacaaattgggtgtactgcccagccaatccccaacatgcaccttgcccaaaaatccctctcgaaatttggcgaaaaaatcaaaaacagcccttgacaatagtcatacacattgctataataagcaagctgtctcgcggcggaagccgcggcaagcccttgtatcaacagcttgtgcgcgttttttgaagaaaacttcttcaaaaaactttcagaaaaccccttgacaatcaagcggttctgatatataatatacaagctgtcagcgagagcagacagcacagcaggaccttgaaaattgaacaaaactgaaacttg

SEQ ID NO: 14244 - DNA, 205 bp, Unknown
  gut microbiota DNA sequence
gctataataatcaagctgtcccgcggcggaggccgcggcaagcccttgtatcaacagcttgtgcgcgttttttgaagaaaacttcttcaaaaaactttcagaaaaccccttgacaatcaagcggatctgatatataatatacaagctgtcagcgagagcagacagcacagcaggaccttgaaaattgaacaaaactgaaacttgt

SEQ ID NO: 14245 - DNA, 1126 bp, Unknown
  gut microbiota DNA sequence
tttggggcttgacttttaatagttagtctttcagtttatacatggtttgtagcgttcgtccattcctctttactcagtgcgcctcccttctgcccttgcgcttgcgtggtacagaaagcgcaagcagcagaatccctacaccaactaccacatacagccagtcgcccgtactgcctgtatccggcagcatggggtgatgggtgttggtgatagttgcatgataagtcttttcgtcataggtggaatccgtcagggtataacccggaacggtttcttcctcaaacgaatagacatagtaggcttcaatcgtatccgttacggtgccatcggcagccttcttatacttcagcacgggggcatttttcagcaccgtgcgccaagtagaagcatggccggactctacatcgtccttggtcatgataatggttttgtaaagggtcttgccacgagccgtgccatccggcgtaaactcctgctgataaatgttgatcttgatttcatcggggcgcttgccatcgatattcgcaaagtctttccagattttgctgatggttaaatccacatatttcttgcaggggtctgcggtgtcagccggttctgtaattgtactgtccggattgtcggtgttggcagtgtccagcatcagcacagcttttgccgggctttcataggctgccagatctgcggtagtagccgctgcggcatcttccatctttgcatctttcaaatccgaaaactcggtgattttgtccaaatgtagcacatcgtatcggttatagtccgtgccggtggaagtatctttttctgcgctgccgaatacatccttgtttgccttggcaacatttttcagcgcctcgttgaaagcacgataaatggaatagtggttgttgttgccctcaatcgacttgatggtattgaagctgtaaaccgacttcaaatcattcacgccggtaaagggtccgaccaagcttgctgtgccgcgcaccacatcgcagagggtcatggtgctgttcttgacctgaccttcatggtttaggccaataaagccgccggaatagccatccgcatctttgccgtctacatcatgcccggcaccgcccgcaaatacatcgtatccggaagaaat

SEQ ID NO: 14246 - DNA, 579 bp, Unknown
  gut microbiota DNA sequence
gatttttacattggagattttgtctttatctatgccgcctttttccgtacagggcagttcaatgaccgagtcaccgatagtgataatggcaaggtcgctttgaccgggtcccgccttctggttgagtgcaacgccgatttgcaaaccaagcaaagaaacggcaagcgttttgccatcggccaagagtttaactgtaagcacccagcccaaatcaacattcagtacacctaggttttgcaacttacccacatataggatgctcagcagcttattgacaatctcaaagacagtgttcagcagtttggactgcaattcagcagaaaccacatagttcatatcggtcttgcctataaacccacctgcaatttgaccactggtgacctgtttaagcgccgtggtgctgcagccattgattttggcaagatctgcataaccggcaaagccgcctgcaatgggctgctggccgccctgagccttgatcaccgtgccaagcccaaagcctgccacagagcagttatccacatgggagccgaacaaatcgagcgcccccacggtgccgcccagaagcttttcaagaac

SEQ ID NO: 14247 - DNA, 256 bp, Unknown
  gut microbiota DNA sequence
tttatcttatcagcaaaggatgtgagaacatggaaaaatctttggaacagttgaagcaggaatatgaaaaaaccactgtcctgctggaacaggaaaaacggaaaatgcagcgtttgaaaaaccggcaggcgtatctggaaagcggttcccggaaacagaggacgcaccggctgattacccgtggggcagctattgagagcattgcaccacagacaaaggagctatccgaagcggaattttattccctcatggaaag

SEQ ID NO: 14248 - DNA, 2068 bp, Unknown
  gut microbiota DNA sequence
ttttacattcttacattcttaagacagcatttcactttacaaggtttttcaatcgtgataaaataaaagtcgtatgtccttatctgcctgtataagcgggctgtagtattataaactgtatgcatatcgtttttttgagaaagcaagagagggaaaagcaataccatggcacaatctcgttccggcaaaaaatccacaaagagctccggcaccaaaaagcgctccggctctgccaaaggtacctcccgcagcaatgcggggcgcactgcgtccgcacgcagcagtgccgggcatgagcggcagccgtcccgccgcgcccagcgccgtgcgcagaccccgaaccttacccgcagtgttctgctggtaggccttggcctgctgtgcgtagcgcttgtgctggtgcccggccagaatttctggagcacgctgcgcagctggtattttggcatcttcggcatcacgacctatctggtcgggccgtttctgctgtatcttgcctatctgctggcctccggctaccgcgtagcgctctttgcggggaaggtctccctgatgggggttctctgcgccagtgtgccggtcatcttctccaagctgaatgtggaaagcctcaaggtaggggagatcatcaagatgctcttcacccgcggcggcacctatttctgggagggcggcgttctgggtgcccccatcggtgccaccctgctggcgctgtttggccgtccggcttccaatattattatgctgctcgtccttctgctgggtatgatgttcttttttgccatcaccccggccgatattgtcctctttctggacgcgcggtataaagcctttcaaacccgccagcaggagcgcgccgccgctgaaacagcctacgacacccggcttttcaacgctgcaccggaggaggagagcgttgagaacctgaccggtgcgctgcccgattcctccccccggccgcaccatccggtctatgatgtcattgccgacaccagccgctttccgaagcagcaggctgcaccgtcccggcagccttacacagcccccgtcacaccggtcacgcccgaagccccctttactgcgcagtctgccgcagcacgcccgggctttgatgtagacctcggcccgtccagcaccgaaagtgctcgccgcaaggcggaagccaacgacccgcttgagccgatcagcatcgggccgggcggcaccttcggcatggacccgctgtccggcaagaccagcggcccgctccattacgcccagccgccgcagcccgcgcctgccccgcaggaggactttgagctgcagctagagcctgccgaggaaccggcagcgcccgctgctgcaccggctgcccagcagcccattgatgagctggacgcactgatcaaccgtgccgtcagcggccatgccccctactacaccccgcaggaggtcagtgccgagacaacccttgaactgcctgtgcctgcagagtttgagaccccgctgaccccggtgccgcaggagccgcgctttgacacaccgcttatccctgtggaggaggagccggagcagacccccgtgcagctgccgcagctcgacatgaccgggcgggtacagggtgataccgtagtgctctctccggcggatcttgccgccggtatggctgcaaaggatatgcccccgctgggtacgcccgctcccgcagccccggcggcccccatcgccgcaccgattccgacgctgggcggcagcttcagtgatacaggcagcgcagtcagtgccgcctgggaatctggtcgctcagtatccgagatgctggacgctatggcggcagagcctgcagcgactcccgctgccaacagcacacccgcagcgcagcccatgatccgcccggctgccgagacgacccagagcagctttaccgtaccccagcaggggcaggctgcccgcgtgcaggtcagcacggccgttggcaactcggccggtgcgccggtccatacaccgctctgtgtggccaaggcggacccgaacgccatgcacctgcctacctctgtggagcagccgcctgagccctactgctatccat

SEQ ID NO: 14249 - DNA, 552 bp, Unknown
  gut microbiota DNA sequence
ccctccttaggatgacgcatggcacagatatcagcatagcaggaaataaccctgatagtatctgaaacgctctcgccctttgacgcagatgacgaatcagcactgtggaaacctaacaccgagcctcccagattaagcatggcagcctcaaagctaagcctggttctcgtgcttggctcgtaaaaacaggttgcaagcttctttccatcgcacttgtgtgcatatttctcaggatgagcctctatatcatttgcaagatccagaagcttgtccaactcttctacagaaaaatccaacggactcattaagtgacgcataatttgcctccattctttttcgcgtaacaatttttattacattttttctatcatataataacttagcgcaatattcaagttggcttttacacttttttgttgtaaaatatatgacagaatataactgttctgaacgcttagcaattgtagcaaagttttcatacaattatgacaattcaaacatcaaaaaggagaataatatgtctgtaaatgaatcacaaatcaaaaacaccac

SEQ ID NO: 14250 - DNA, 173 bp, Unknown
  gut microbiota DNA sequence
ccacgtaaatcaattccaaatttacaagtaattcatacaggacgcaagcgattgtgtctgagtgattacagagatttaacgcttttaaatggcgattaaataccatttataaagagtttgatcctggctcaggacgaacgctggcggcgcgcctaacacatgcaagtcgaacg

SEQ ID NO: 14251 - DNA, 971 bp, Unknown
  gut microbiota DNA sequence
tactgcttgtgttgaaaaacaggccggttggcggtataatattctccggccggaacaggccggatgaggagaaaatcaagatgacaaacaaaaaacacacttccccgcttgccgccgtgcaggagcttgccattctgaccggggcggttgcgatcattgcggcggcggtctacttctttctggtgccgagccacgcctcggtcagcagcatctcgggccttggcatcgtgctggcaaactttgtgccgctgccgctgtcggccatcacgatgatcctgaatgtcgtgctgctcatcatcggctttttgacctgcgggcgggagtttggcgccaagaccgtctacaccagcatcctgctgccgctctttctcgccctactggagcggcttttccccggcatcggctcgctgactgacagtcaggaactggatgtgctgtgctacattctggtggtcagcgtggggctgagcatcctgttcaaccgcaacgcctcgtccggcgggctggacatcgtggcgaagatcctgaacaaatacctgcatattgagttgggccgcgcaatgtcgctgtccggcatctgcgtagcgctctcagccgcgctggtctacgacaaaaagaccgtagtgctgagtgtgctgggcacctactttaacggtctggtgctggaccactttatctttgaccacaacatcaagcggcgggtctgcatcatcaccaaaaaagaggaggtgctgcgccgcttcattctggacgatctgcacagcggtgcaacggtgtatgaatcctacggcgcatacaacatggaaaagcgccgcgagatcatcaccattgtggataaggccgagtaccagcggctgatgaactttatgaaccgcgaggacccgcaggcgttcatcaccgtctacaccgtgtcggacatgcggtatcagcccaaggcataaccccgcacagcgcccccgcatcgtgaggat

SEQ ID NO: 14252 - DNA, 471 bp, Unknown
  gut microbiota DNA sequence
ctcgtccgattgggcggtctttcttttcagctttaaaaaatacaacgatatatctacatattatatttttgccaaatattgacaatactgtaaacaactcgtataataggggtacaagcttcgacaggtctatccgtcgagcatcgtttttcgacacgctgtgccggaatacaaaacaggaggtaccaaaatgatttctaccggtatcgttcgcagcattgacagtctgggccgcgtggtcctgccgaaggaactgcgcaatacctacggcattacgccggacaccccgctggagatttttaccgacggggaggccatcgttctgcgcaagtaccacgcacagggcagctgcgtattctgcggcgacatttcgcccgatgcagtgctgctgcacggcaagtatatctgccccgcctgccgcaaggcgctgtcgaaataagcggccgcgttcttaaaaagagagcgtaccag

SEQ ID NO: 14253 - DNA, 3421 bp, Unknown
  gut microbiota DNA sequence
ggcgggggtcactcgccctttttcaggccgcgcatcgattcctcggcatttttgacgaggttgaacaggcttgtcgcgtggcgcggatagtcccgtgccagctgatcggtgctgagggccagcgtggcaggctcaagactgtcgcgggtgccgtcctccccggtcagggcggcggacagatcaccctccgccacgctcatggcagcatcggcgctgctgctccaccgcgccgagccaatgcggaacataccgctgacattcttgggcgaggcctcgtacatctggcggaacatcttgtagacggccagcatcaggtactcgctgacgcccacaacaagctgcttgtcgcggctttcctgcagcttgtcatagaggatgtcaagcgagttttcgataagctttttgtacatcgtgggcagcacgctgccgcggtagacgctgccgccggtggcggagttcccctctggcagttcctcgactgagatggtctgcccgctgcgctctgcactgcggcccagcagataatcacagctgacatcgtaatagtccgccacctgcaccacaaaggcaaggccgcactcacggatgcccttttcatagtgggagagctgtgcctgactgatgccaagatcctgtgccgcctgcttctgggtgatgccgcgctccttgcgcagcagcgtaatgatgcgattgaattcgatccccatgatccgtatatcctgttccggggcagtgccggcattgctgccgggccgcagtggtgcccctgccgtattttctacacgctgtatattataacgggtggaaaacactttgtaaaccagaattttcgacagattttgtgctgccttggttgtcaaaacgccgaactgcgcgttttttcctacatttagtcattctacagcgggtacagctataaatattgtggccaaaatttggaagttcggtgtgccttgtctcagttgtaaccaaattgtaaccttttgcggttgcacaggggctgattttagggtatgctgataatgcagtattgtgcagccgcgcagcactgccataggtgaaaccatgaggaaagcgagaacataccgtgaaatattataagcttcacttgatccggcacggcctgacggagggcaacctgcaggggctttacatcggcagcggcagtgatctgccgctctgcgccgagggccgcgcccagctgaaaacgctgaagaaggatttcgactacccgcaggtgccgctggtgttcaccagcccgatgaagcgcgccaccgagacggcggagattttgttcccgggcgtgcggcagatcgagctggacgacctgcgtgagatggcctttggcaagtttgagggccgcgccgtgcaggagttggtaaaggacccggagtttgcccagtggatggacccaacgagccgcacggtgcccgagggtgccgaggaccggcagatgtttttcaaccgcacctcgtcgatgctgatgaagatgtttgagtacatgctgcgcacccacaccgaggaggctgcctgcgtgacccacggcggcgtcattatgaatatgctgtcccagcatgccctgcccttccgcaagccggaggagtggatgaccgacccgggcgcgggctacagcgtgcggctggacgccgagatgtggatgcgtgaccatctggccgaggcttacgatgttgtaccgcacggctatctggacgggatggaataacgcggggggttgttccttctttacaaagaaggaagcagaaattccaaacaaaaatgcacctgctttgggtaaagcgggtgcatttttatttgcaggtgagacggcgtcctcggcaccacttgcaagttgtttttattctgccggttgttcttcctcggcgggtgcctccggggccggggtctctgcgggggcggcgtccagaatggcctgcttttcggcgatggtctggttcagctcgtccacgcgggtctgggcggcatcgcgggcggcaagcaggtccgcgttttcgctgtcggcgtccagcgcggtctgggcctgttccagtgcgctctgggcctcggccagatccgcgtttgcctgatccacagccgcctgcgcgtcaatgcgctcctgtgcgccgcgcagctcggcttcggcggccgctgcggcgtcatcggggacaccgctctccagcagggcgggcttttcgggcagggtctgtgcgctgccatcggcggcagtcaggctcaggctctggccataatagccgccccagatggcgataaagctcttgccgggggccacggtcagcggcgtgccatcggcagccgtcaggctgaacgggccggtggcatcttccttggtccagtggatctgctcccacgcgccgccctgcaggtagaggccggtgccgccggtcatatcgtactggcgggtgtagccgtcgtccttgatgccgctggacgcatacagcacgaacacattggtgaaggccgcctgctggccgttgtcggcatcggtcatcggggagccatcgctgttcagcttttcatacaggccggtgccggtgttgtagttcagctgctcgctgtccgacggcgagaaggttacggtcaggttcatgccgttgcggttctcgggggtgacctcgggccggagaccgaagcggaagagcggcgtgttgctgccctccggcgcggcgccgtagctcgtcagcccggcgcggatcaactctccggtggtgtagaagcagttttcctcgcggtagcccgcgtcctgacggccctgatcaaaggcgaaggccgccttgccgatgtgatagccgtccagatcctgatacgaaagggtgttcagcaggttggaagcatagatgttcttgtcgatgtggatcggcacggcgttgagcggcagggccacctgcagaaacagatcccggccggggccgaccggccctgccttgctgatgcggtccacatccgcgtagagtgccatcagccctgcggtattgccctcggtcacaccctcaaccagcacatcggcggcagccacaccccactggggctgggcaccgtccagcgtgcgcagcgtcacggcgaccgggcgcttgccggtatagtctccgtcctccagaccggtcagcgggttgcccgccggggccggaacgggggtcggctctgccgtagccgcggggggcgtggccgcctgctccggcgtggccgctgcctgctgcccgctgcagccccccagcagcagtgccgccagcagcgccgcagcgctgcccaatgcctgccattttctcatagtgtacctctctcataaaaacaacgcggcccgccgggcgagccgcgttgtcgatggattcttagccttggctgccctcagtgttttcctgctggtcgggggcctgctggtcgggagcctgctccggtgcgggagccg

SEQ ID NO: 14254 - DNA, 4583 bp, Unknown
  gut microbiota DNA sequence
tctcggcctcaccgctgccggtggcggcggcggtcagatcatcggtggaggagcccagcgtctcgccggccttggcggtatcctccacatagctcttttcataagtctgggtcgtggcggtcgtcagatcgacattgtccagcgtggtgtgggtaaagttctcggcaaagtcgatgtcggtcacagccacatagctcttgccggtgttgatctccagcggggtgtcgctgcaggtgccgtcctcgttcagatagtacaggcgcagggcctccagcggggtgcccttctgccaataaatcttctcgcacttgccgccgtagcagtagtagccgatgccgccccaggcgtactcaacatactgcaggtccgttttctcatggccggggtaggtgtggatgtcggtgtagagcacgatgacattggggaaggtcagcaccttgttgtcggcggcctcgtccacggtatcgcgccactggccgtccgagtagttctgctgcatcttgtactggttcgtggcctcgtcatagatgaagcgggtcttgtaggactggctgtggacgatctcgacatactggccgtcagagacaacggggccatacttatcgctgtaggcactgtcgacgctgttggacaggtcgcgggtggtgccgaggcggtaatccacaaagttgaagaaggtggagttgtaggtgcggttcatgtccacattctggctgctgatatagtttgcgatgttgtcggagttggtgtacatcgtgtgctccagcgccagagaaccggcgttgtagctcttgccggcccagtttacgcggccgtagtcgcggtagccgttggcgccgtcattgttgttgagcttgccgtaatcaaagtcgatagcgtactgctgcatgacaacggactggccctcgtggatatacagggcctgccagggcaaaatcaggcggaagaactggtcacggccggagcggacggggccgacctcgccgatcgtcttataatcggtaaagacaggcataaagcgggtgatgccgccctcgaccttgatctcaaacaaaatgtctgctttggacaggccgcgctgggggcgggccgccacaatattgttgaccataacagccgtgatgcgctgcccctcggggtagtcggcacccttgggctcaccggtcaggacattggcctcataggggggcagctcggtgggggcgggggtggcctgtgcagcggtgctgtccgatgcagcgggtgtcgagatcgtatcgccgtcctttttacaggccgtcatcagcaccgtcagggagagcagcgccgcgattacaagcagaagacgtttcataccatttctccttttttcggatttcctgttaagaagtataaattacttattattgtagtcgttttccacccgtttgtaaagctaaagcggggaattttacaaatgcaaattttcgctttccccgcggggctgcgcccgcaggcgcgtgtcggagcgcaaccgccgaaggcggctcttagcgcgtagactgaaggcttgcttattttcgtgtctgcagccagtattcgcccatgctgctgccgggcttgccggtgcattcctcgtgcaggtagtcggccagaccgcagtcggcagggtcccatgcaagggcctgggcctcggtctcaaactcgacctccgcataccagaaggcggtgggcaggtcagggtctacgcagttgacctccagcgtcagcccgccgggcagctgatagccgcggcgctccttatggatcaggggtcggccgatcagatgctcaagccgcgcaaacagtgcggcgtcgatctcggtctcgatctcctcgcggctcaggccgccctcgcccttgaagcagagcaccagcgccgtggggccgccctgcagggcctcgcgccggatgcgcaccgtagggcgcacactgatgtagccctgatccatactatagacggaggtctgctccagccccaccggccagcctgcgaccatccatttgcgttcgatctccatggtattcctccccatacgactcatatcacaaattataccacaatccgtccctcgcgcacagttcacagtgttgccagatttccactgaaaattcagggttggtttcgtcagattgccacttgcattttgcgggcttaccccgtataataaaggcataacagcaagggcgctgcgaatgtgttttcgcagcgtcctttttctgtaaatagaggtaacaaaggagtacgaagtatggcagcaaccgttatggagctttacggcagcaaggttttcaacgagcatgagatgcgtgagcgtctgcccagctctacttacaaaagcctgaaggcaacgatcgagaagggtcagccgcttgaccttgaggtcgccaatgtcgtggccagcgtgatgaagcgctgggccatcgagcagggcgcaacccactacacccactggttccagccgctgaccggcatcaccagtgagaagcatgacggctttgtcagcccccagccggacggcactgccatcatggagttctccggcaaggagctgatcaagggcgagcccgatgcctcctccttcccctccggcggtctgcgcgccacggccgaggcccgcggctacaccgcatgggaccccaccagctacgcctttgtcaaggatgatacgctgtgcatccccaccgcgttctgctcctacaccggcgaggcactggacaaaaagaccccgctgcttcgctcgatgcaggccatctctgaccaggcctgcaaggtgctgcacctgttcggcaaggatgttgaccgcgttcacaccacggttggccccgagcaggagtatttcctgatcaagaaagaggactacttaaagcgccttgatctggtgctgtgcggccgcacgctgttcggctctgccccgtccaagggtcaggagctggaggagcactacttcggcacccttcgccccatcgtttcccagtttatgaaggagctggacgccgagctgtggaagctgggcatccccgccaagaccaagcacaacgaggtcgccccctgccagcatgagctggcccccatctatgacaccaccaatgtcgccatcgaccacaacctgctgacgatggagatgatgaagaagctcgccgacaagcacggccttgtctgcctgctgcatgagaagccgttcgagggcgtcaacggcagcggcaagcacaacaactggtccctcagcaccaccagtgagaacctgcttgatcccggtgacaccccgatggagaacctgcagttcatggtgttcctgaccgccgtcatcaaggcagtcgatgagtacgccgacctgctgcgcaccagcgttgccacccccggcaacgaccatcgtctgggcgccaacgaggcacccccggccatcatctcgatctttgtgggtgaggagctggaggccgtcatcgacgccatctgctcggattctccctacgccggccccgtcaagatgaagatggacctcggcgttgatgtcctgcccaagttcagcaaggacaccaccgaccgcaaccgtacctcccccttcgccttcaccggcaacaagtttgagttccgtatgcccggctctgccgagaacctgtcggactgcaacaccatcctgaacaccgccgttgccaaggcgctgaaggagttcgttgccgagaccagcggcgctgccgactttgagtgcgctgccgccgcgtgggtcaaaaagacgctgaacgagcatcgccgcgttgtctttaacggcaacggctataccgaggcatgggaggctgaggccgagcgccgcggcctgcccaaccgcaagaacacccccgatgcaatggttgccctcacggaggacaagaatgttgctctgatggaggagttcggcgtcctgaccaagactgagatgttcagccgccacgaggtcgagatggagcattactccaagatcctcaacatcgaggcccgcacgatgctcaagattgccaacaagcagctgatccccgctgcgaccgcctatatgggcgaggttgccggcagcgccgccgccaagaccgccgctgtcgagggcatctccaccaaggctgagaccaaggtgctgaccgcgctgacccagtatgccgatgagatgtctgacgccgccgatgccctcaagaccgtgaccgacaaggtcaccgccatgacggacgagtgcgccaaggcacacgccttccacgatgaggtcatccccgcaatggatgcgctgcgcgccgccgccgacaaggccgaggagatcatcgacgaggagtactggccgctgccctgctacagccgcatgctgttctataccgagtaatgtaagggcattctccgcgcggctctgtaggggcggattccatatccgcccgcaaggggctgcctgttgacgggcgcatatagaatgcgcccctacgggatgggctgtttccccgcaagcagcagcccgcccacatcacgccattttccttttcctatttcttacaccagctcgaaaggcccgcccgctcaaggtgggcctttcgagtatgtgtggcttcccccttgggggggaagctgtcag

SEQ ID NO: 14255 - DNA, 859 bp, Unknown
  gut microbiota DNA sequence
gcccatcgttacctctgcacccaagctgccctcaatcaacaataaacaagccacggttgaagcaatcagccgtggcgttcactatatcgcggcgaagatcaaagccctgctctcccaaatagtgcgccgcgccgcgcaatcgctgctggcgctgcttggcgcgggcggcgtggtgttggtgctggcgatggtcattggcgcagccgcagcggtgattggctcacccatgggcatcctgtttgcggacgaatccaacgaccccaacagcatccctattgccgaaatcgtagccgaaaccaacgctgacttcggcgcagccatcaacgacatcgtatccgcgcacccggagtgcagcgaaaccaccattacctacgactacgagggcggtcacacatgggcaagttattggccggaggtgctggcagtctttgcggtgtataccaacctcaactctgacagcgacgtgatcgttatcaatgccgcccaaaagcagcgcatccaagataccttttgggctatgcacacaatcacctatgaagtcggagaagtagacgtcatccccgaccccaccgaggacgaccctgagccggagcagcaaaccgagtatatcctgcacatcaccgtcagcagcaaaaccgtggacgagttagccgagttgtacaatttcacccaagaccaaaaaaacatattgcgcgaacttctctccgatgaaatgcgccctacgctgcttgccctctgcggcggcagtatcggcatcatcgaggacggcgaactctgctggccgctgcccggtcacacctacatatcctgcaatttcggggatgacgacgcttacggtaactccggccatcgcggaacg

SEQ ID NO: 14256 - DNA, 1779 bp, Unknown
  gut microbiota DNA sequence
ttccaagaagcagcggttttatgttggcgtacacgcgcccaacatatttattataccacaagcagcatatgttattcaatcctgaatatgcacaaatattgcacagcaagattgtagggtctgcgaatagacgaaacactaaggctgtgatatagtatagtcacagaaagaaaacagccggagataaggaactggaagttccaagagatgccactttccagaagtttcttcatcaaagaccgatcgtgaacagatcgacatcttaaagctcaactttaaggactccgatccagcagcacgagggcagaagaagaaaccggaaagaaaccgtaaaggccgccggcagtatttcgtaaggaaggaggctcgagtccaatggcaaacttcaaagatcccattcatcaccggcgggcctgggcctgctaacaaaaaagaaccgcatccgaagccgcaggtcatcacctgtaaaagatttataaaaacgcgatgtccggttacttagctaatgtttagcagactcaggggccgccataacagacccccgcatgagatatagattaggatgaaagaaggctggtagagatgaccgtcaccactccgccgaacaggatttacctgaacttcacctgatcaacaaggagacactccgatgtacaagagttaagaggctttggtcctcggcatcagacccattaccccaggaacgatcttaataaccttaacagcaaactttactccgttccacaaatgcttttcagcaaataacgaacccgagggtaagtccaatgaactgttagtaagatcctgaaagggcaatcaaaattcgcaaacgataggaatgattcccatgacgatgtggaagcagtccgaaaaataacgaaaagggttatgaggctatgactccgaagaagtaagaccgccggggcgaacgaaatgttcgccccggcttttttgtgttgtgcagcaatatgtgcgcacaacccgggagggatgaatccctcccctacggattgaaccgtgaaagggatttggcggcaggcttcggcggggtgggggcaccccgccctacgcatggtttttcaagtggggttgtagggcggccagccctctggccgccgtgcccgtttgcgggagtgagaaactttgcgggttatgcctgtagggggcggcgtccccgacgccccgcaaaggggtcaagccccgccctgcaaatcaaccgcgaaaggggtgcagccgtaaacctgcgggccgggcatgcccgccgccccctacagagcggctttcacagcatacaccgcataacctttgttgcctcgacaaaatcctgcgactcatacaggtgctgcgcgccctcgttctgggccagcacctgcagctccagatattccagccgccggttgcgggcccagcgcttggccgcagccagcagctggctgccaataccctgcccgcgcacacctgcgtccacgaccaaatcccctagacaggcataccggtggggcagcacacagctgaacgccggcgtccagcccgcatagtagaccagcgcaaagcccacggcggtgccgtcctgctccgccagcaaaaaatccgcgtcatcggccctgactgccttgcggatctcgtccacctcacgcggagcctcgcaaaaaaattccggctgcagcgcgaccatggcactgtcaagctggcggtacagcgcaataatggcggggatgtcctcctccgccgccgggcgtatcacggtcttttgcattcttgtctccccctttgccataa

SEQ ID NO: 14257 - DNA, 598 bp, Unknown
  gut microbiota DNA sequence
agagaccctaaccttcagctccatcgtctacccggccaagggtgaccgctatgccacgatcaccgtctccggcaccaatgtggacgcccctgtcttttacggcgatacaaacaagatcctaaatcagggcgtgggcacctacgcagacaatggcggtgtcggcatccccggtgagggcaagaccatcctgctggcgggccacaacaacaccttcttcaatgacctgcagcacgccgaggtcggcgcgaccgtcacgatcacgacccactacggcgtctacacctacgaggtcaccgagatgaaggtcatggattatcaggacgagacttcctatgacttctcccgcaccgatgaaaacctgatcctgtacacctgctacccctttgatgcgctcggctttaccccgaaccgctatttcgtctatgccaaatatgtatccggccccgtgctggacaagaacagctaagggggtgttgaatatgcataagaatgtctccgcgcgcccccgttccaagggcaacaccgtttgggccatggtgctttcctggctgtccagcctgctgctcacgctgctggctctctgccttgtgctgctgac

SEQ ID NO: 14258 - DNA, 2626 bp, Unknown
  gut microbiota DNA sequence
accgctgccccagcaggggtcacggctgatgaagcccgcaagggcaccattgcctacggcatcctgaaagcccataacacaagcgattccatgcaggagctgcgcatgaaattcgactcgatgaccagccacgacattacctatgtcggcatcatccagacggcccgcgcctccggcatgaaggaatttccgctgccctatgtcatgacgaactgccacaacagcctctgcgccgtgggcggcactatcaacgaggacgaccaccagtttgccctgtccgccgcgcacaagtacggcggcatctatgtcccgccgaacatggcggtcatccacagctataaccgggaaatgatgtccggctgcgggcggatgatcctcggctctgactcccacacccgctacggtgcgctgggcacgatggccgttggcgagggcggcggcgagctggccaagcagctggtcggccgtacctacgacatggcctaccccggcgtggttgccatctatctgaccggcaagcccaaccccggtgtcggcccccacgatgtcgcgctggcgctggtggctgccacctacgccaacggctatgtgaagaacagggtcatggaatttgtcggccccggtgttgccaatctttccgccgactaccgcaacggcattgatgttatgaccaccgagacaacctgctggtcctccatctggcagacagacgataccacgaagcagtattttgagcagcacaaccgccccgaggcctataaggaactgaagcccgccgatgtggcgtactatgacggctgtattgagctggatctgtctgcggtcgagtgcatgatcgcactgccgatgcacccgagctatgcctatccgatccgtgagctgaaggccaacgcgaaggagatcctgcaggctgcacagacgcaggccaacaagcagctgggcggcaaggtcgagatggaccttgtcggcaagatttgcgaggatggccgcatctatgtggatcagggggttgtggccggctgctccggcggcacctatgagaatatctgcgcggtcgcggatattatccgcggcaaaagctgcggcaacggtgaatttaagctcagtgtctaccccgacagcatgccgacctatctggagctggtcaaaaacggcgcagtggccgacattgtttccgccggcggcatcttccgcgagtgcttctgcggcccctgcttcggcgcgggcgatacccccgccaacggcgaattctcgatccgccacacgacccgcaacttccccaaccgtgagggctcgaagcccggcgagggtcagatcagcgctgtggcgctgatggatgcccgctccattgcggccaccgccgccaacggcggctacctgaccgccgccagtgagctgaccgatgcagagtacaccctgcccgaataccactttgagcagggcgtctacgataagcgcgtctacaacggctggggccgccccgagccggagtacgcgctgaaattcggcccgaacatcaaggactggcccgagcagcccgccctgaccgaggacctgcttgtcaggatcgtcagctacatcaccgaccctgtcaccacgaccgatgagctgatcccctcgggcgagacatcgtccttccgctcaaacccgctgcgtctggcggagttcaccctctcccgcaaggacccggcctatgtgccgaacgccaaggccgtcaaggcgctggacgccgagcgccgcgcaggcgctctgcccgctgagatcgcgcgtgtctacgatgatttgaagaaactgggctacacgcccgatgcggcaaataccaacatcggctcggccatcttcgccaacaagcccggtgacggctccgcccgcgagcaggccgccagctgccagcgcgtgctgggcggcgcagccaactttgcctgcgagtacgccaccaagcgttaccgctccaactgcatcaactggggcatgctgcccttccttgtgaaggaccccgctgtgctggacaatcgggattatgtctacctgcccggcgtgcgcaaggcgctgctgaatgccgatgacgagctgattgccatcgccgtcaagccggacggcagcgtggttcgctttacggtcagcctcggtgccatgactgacgccgagcggcagattctggccgatggctgcctgatcaattattacaagaataactaaagaaaagctgcccgctgggaaaaaatcccggcgggccgtttctgtaggggccgatgcttgcatcggcccgcggaggggtcaagacccctccctacaatgcaattcaaagggggtgctgtaggggcgaacattgttcgcccgcggcacatggcggcggtcacaacgcttccggagcgatgacgagcattgccccctgcaccgtaggggcggattccatatccgcccgtagtgtccggcggatcgctgcaaaaattcttgcataccgtcgaaatttctgctataatacaaaaaccgcctgtttcaacaggcggcaaggcgctgcacacaacggcaggcggttggccccacccccgaaaggaggtgagaccatgcgatttacatttacgttctatatcggtcgcaagacctttactttgagcttagttgt

SEQ ID NO: 14259 - DNA, 5583 bp, Unknown
  gut microbiota DNA sequence
cacaccgcaggttaagtcaagcccattgcacccgcgcaaatttcgtgctacaatagccttatcattaaacagcaaaggacgaaaagcaatgagtgcgattttagcagtgtgcggtgacggcttctgcgccatggtcagcgatggccgctttgtcgaggagcctatcaccggcgatacaccccatgtcatcaaaaacgacctgcccaaggtccgcaagatcaaccgcaatgtggtggtcggctttgcgggcgatacgctggccgccgtacagatcatcaatgccgtggacgagtaccagacccagtacctgacgctggaaaaggtcgtcaagatcctgcgtgagaaggccgccgaggttcaggtacagcctgtgggcgtccggctcatcgtgggcgggcgcaaccgcaagggcgagttcgttatgacgatgctgggcagcgccgatggctacgagccgcagacccaggccgcccgtccgggtgcctacctcatcgagggtgcctgctcccacaccgatgtggccccttggctcgaggaggaggtcaagcctcaggctgccgactggcgcagccttgacgatgtggcccgcacgctggacggctgcattgccaagatggccaagaacgacaagagcatcaataccacatatttccgccagcttgtccgctgatatacaacgataaaaggagaaaaaattatgaaaatcgctttgatcaatgaaaatagtcaggccgccaagaacgcactgatcgaatcgacgctgcgcaaggtcgttgagccgatgggccatgaggtcgtaaactacggtatgtacaccgccgaggatgccgcccagctgacctatgtccagaacggtattctggccgctgtgctgctcaactccggcgcagccgactatgtcatcaccggctgcggcaccggcgagggtgccatgctggcactgaacagcttccccggtgtgatctgcggccatgttgaggaccctgtggatgcctacacctttgcccatgtcaacgacggcaacgccgtggcgctgccctttgccaagggcttcggctggggcggcgagctgaatctcgagtacatcttcgagaagctgttcggcttcggccatggtcagggctacccgaaggagcgcgttgtgcccgagcagcgcaacaagaagattctggacggcgtgcgcaccgttgcgttccgcgacctgtccgacatcctgaaggatctcgaccgcgacctcgtcaagggcgccttcgccggtgagcacttcgccgagtatttcttccccgcctgcaaggacgagaagctcgccgccaccgtcaaggaactgatggcgtaaatcctaaaataaaaacagccgactcccggtacgatgcaggggtcgatgcttgtcatcgacccgcgggcggatgcaagcatccgcccctacaacctgccgggcgtcggtttttctgttttttacgcaaattaccgaaatttaccgttgactaatgccgtgccagatggtaaagtaaatataggtgcgaatagcgccgctttgtaaaaattcaaacaaaggtgaggtggttgttgcaatggatacccccagtcccagtcctgtgtaccgatgtatcttgaataaggcagccaccatgtttataccgggcaatctgaggcaaactgcgcgttaaaaaacgcacggtattgctgtgctttgcattgcctaaggcaacaccgcacaattcccgcctgacggcttaagcgccgctccggcggctgcggcacggcatctgcgttgccaaaatgctcgataatacacaaagtattatctgcgcttttggcttagcagctgccgtacctcgctcgccgtatcggcacttagaattatgcggtattgcctaaaattaaatgtgctcggctgccgcctgaaaaggaggcagcttttttatgtccgacaccacgatcgcaaccctgcgcgccatgctcgccaatctggatgatgccaaaaagtaccagagcctgcgggatgttatgtccaccctgcccgcgcccgatctggccgccgtgtttgaggatctcccgccggagaagctcccggtgctgttccgcctgtgtcccaaggatctggcggccgagatctttgccgagctgacgaccgaaacccagcaaaacctgatcgacggcctgaccgataaggaattgaaggccgttgtagatgatttgttcgtcgatgatgcgacggatcttgtcgaggaaatgcctgccaatgtagtcaagcgtattctgggtcaggccgatcctgcgacccgccgcatgatcaacgaactgcttaaatatcccgaggactccgccggcggcgtcatgaccaccgagctgatggagctgcgccccgactggacggtggcgcaggcgatgagcgccatccgcaagaacggctttgacaaggagaccatcaacaactgctatgtcaccgaccgcgaccgcacgctgatcggcgttgtatcgctgcgcgcactcgtcctctccaaggatccggacaatgagctgatccgcgacatgatggatgacaatgtggtcagcgtcaacaccacgaccgatcaggaagatgtctcccagatgttcgagaagtacggctatctggccatccccgttgtggacaacgagaagcgtctggtcggtatcgtcacgatcgacgatgctatctcgatcatgcaggacgaggccagcgaggatatcgccaagatgaacgctatcggcccgtccgacaagccgtattttaaacagtctatgctggatctgtacaaaagccgtgcgccgtggctgttgttcctgatgatctcgtccaccttctccagcatggtcatccgcgggtatgaggatgccctcgccgccgtgacggtgctgaccgcctacattccgatgctgaccgacgcgggcggcaacgcgggcagccagagtacctccaccatcatccgcggcatggcggtcggcgacattgagccgcacgacctgccgaagattctgtggcgcgagttccgcgtggcgatcctctgcggcggcacgctggcgctctgcaactttgcaaagctcatctttctggacggcatcctgcccccggtcgcagcggtcgtctgcctgacactgctctgcacggtcatcctctcccagctgatcggcggtctgctgccggtcgttgccgagaagctcaagatggaccccgccgtcatggcatcgccgctcatcaccaccattgtcgataccacgacgctgctcgtctacttcaacatcgcacggacgctgctgaaaatctaattttagacaccgtgttcaatattgtaggttgtaccacacccccgggtgtggtacaatttttttagagaaaaagccttcccctgagggggaaggtggccgagcaaagcgaggccggatgaggggcagacttcccgcggcagcccctttaccgggctatgacggaaccgccgcccctcatcagtcagcagtcggggccgctgacagcttccccccaagggggaagccatccttacaatcaggagttttcatcatgaacatgcaggatttttacaccggccgcgcctttgatgcgtataagtttttcggtgcgcatacctacttcggcggcacacattttgcagtgtgggcaccgtccgcccagcatatcgcggtcgagaccgaggccggcacctttgacatgcaccgcacccagcccggtgtgtgggagtgcgatgcccccggcgtcaacgcgggcattgtctaccagtattatgtccggggcgccaacggccagaccgtggcccactgcgacccctacggcaccgccatgacgctgcgccccgacggccgcagcatcatcaccgatacgccccggggcttcagcgatgacaaatggatgcagagccgcacaaaatgctttgataagccgatgaatatctatgaggtccacgccggaagctggcggcagaaggaggacggcagctggtacacctacgccgagctggccgagctgctgcccgcctactgcaaagagaacggcttcacccatatcgagctgatgccgctggccgagcatccgtttgacggcagctggggctaccagatcaccggcttttttgcgccgaccagccgctacggcacgccggacgagctggccgaatttgtcaacgcctgccacaagcaggacatcggcgttattctggattttgtaccggttcactttgccgtggacgcctacggcctgaaggaatttgacggtacaccgctgtatgagtacccggccgccgccgtgggccagagcgagtggggcagctgcaactttatgcattcccgcggggagatccgctgctttatccagtcctgcgccgattactggctgcgggtgttccatgcggacggtctgcgcatggacgcagtctcccgcctgatctactggcagggcgaccccaaccgcggcgtgaacggctcaacgctggaatttttgaaggggatgaatcaggggctgcagcagcgccatcccacggcgatcctcatcgccgaggactcgaccagcttccccaaggtcactgcccctgtggagtacggcggcctcggctttgactacaagtgggatctcggctggatgaacgacacgctggactactttaaaaagaccagcgaggagcgccgggaaaaccttggcaagctgaccttctcgatgatgtatgcatggaacgagcattacatcctgccgttcagccatgatgagaatgtccacggcaaggcgaccatcgtacagaagatgtacggcgactacgagggcaagttcccgcaggcgcgggcgctgtatctgtatatggcaatccaccccggcaagatgctcgactttatgggcaacgaatttgcgcagctgcgtgaatttgacgaaagccgcgagcaggactggatggtgctgcagtaccccaaccacgatgatttccaccgctaccgcaaagcgctgaacgaggcctactgcaaaaacgaggccttctggagccgcgagtatgacccggctgcgttccagtggcttgactgcgcccaccccgagctggacgcctgtgccatctggcgcgaggggaacgagggggctgtgctggctgcgttcaactttggcgataccgcgctggaggattacaccctgaccctgccccgcaccggcaagctgaccctgcttttggacactgactggcagtgcttcggcggcaagaccgaaaagccgaagcgggctgtgggcaaggcgtgcgatggcgcgctgaaggtgacgctggccccgttcagcggccggctgtataagttggtctgattttacaaggatagggaacacccctgcgccgttttgggatgacgcaagggtgtttttgctgtgctgcaggggccgggcctgcccggcccgtaactttgccgttgcaaccccttttgcggtagatttgtagggaggggtcttgacccctccgcggcggccagagggctggccgccctacttcacagccacaaacgggtaaagcccttccggcctcgttttactcggccacctccccactgcgtggggagatgtcgcggagcgacagaggggtccgg

SEQ ID NO: 14260 - DNA, 34858 bp, Unknown
  gut microbiota DNA sequence
ggactggccgagcttgcgaggcctgaggggctttgcaaccttgcctttatatcttcttcacctcccaatactcctccacaatctccctttccacaaacggctccctgaccccgttgcgttctatggttgtctcgtggcccttgcctaaaatcgcaataatatccccgggctgggcgtggtcgagggcgtaatagatcgcctgccgccggtcgggaatctctgcaaacggtgtggccgggttgcctaagcgcagccccgcgcggatgtcggccaggatctgctcaacaggctcggtgcggctgttatcctcagtgatgacgcagaaatccgccagccgcgcgcagacgctgcccatcccgaaccggcgcagtcggctgcggtcgccgccgcagccgaacacggcaatcagccgcgcgggcttgtaggcccgcagcgtgcgcagcaggctctcggcggcggcctcgttgtgggcgtagtcaatcagcaccgtgaacggcgcgtccagcggcacaggctccacacggccccgcaccacagcgcgggccatcccctgccgaatggcattctcgcccgcccccagctgccttgccgcagtcagcgcggccaaggcgttctgcacgctgaatgcccccggcattcccacggtgtagggtacgccgtccaccgtgaaggccgcccccagccgcccgccggtgcgcagcagggtgaagtctgccccggcccgcacatcggcgggatgtgtgatgccgtaggttatcatttggcaggtgcatccggccgtgattttccccacacaggggtcatcgttgttgaaaactcctacgcggcattgccggaagagggagcttttccagtagagatattccgcaaaatcggcatgctcgccggggccgatgtggtcgggggagagattggtgaacaccccggtatcaaatgctatcccggctgtgcggtcggctttcatgccgaggctggacacctccatgatgcaggtgtcgcagccgtcatcggccatccggcgcagcagcgcctgcaggtcacagctctcgggcgtggtgtggttcagatcgtggcggtgccccggccagcaggcaccgtttgtgccaatcagccccacctgccgtccgtccgcctgcaggatggccgccagcaggtgggcggtggtcgtcttgcccttggtgccggtgatgcccaccagcgtcatccgcccgccggggtcgccgtacagccgcgccgaaagcacggccatcatgcggcgcgggtcgtctgcctgcaaaacggcgcagcggtcgggcagatcgcgcccggcatagcccggtccgcacagcacggccgccgccccggctgcggcggcctgtgcggcgtagacgctgccgtcagtgcggcggccgggcagacagacaaaaagcgcccccggctccgcactgcgggagtcgcagcagacgcaggtgatctcggtcagggcatccccccgcaaaagccggcagccggtatcccggataaggcggcgcagatccattcggcatcacgctccaaaaaattgctcataccagatcagaaaactgtagacgcaccagatctgccgccagcagtcgccgccgtgcaggtgccggtttaacatactatgcagcacctgcggccgaaagaactgcgcagccgccgggcgggcaaaggcggcgcgcacccggctggtgtagggctcctgccgcagccagtcccgcaccggcacaggaaagcccagctttttgcgggcggcgctggccgggggcagtgtgcgtgcagccgcctgccgcagggcaatcttcgtcatgcgggcatcggccttggcggcggcgggcagggcggcggccagggcaaacacctccctgtccagaaacggcacccgcagctcaaggctgtgggccatgctcatcttgtccgccttgagcaggatgtccccggccagccagaggtttatgtccacctgctgcatccggctcaccgggtccagcccctcggtgctgtcccacagggcctccgtcaggaacatcgggtcgccgtccccctcatagtcggccagcaggcggcgcttttcccgctcggtcatcagggcggtggggccaaaataccgctcctccagcgggcagccgcgccgcaccagaaagttcacccccggcccgggcggcagaagcccggccgccgcgcccagaccgccgcgcagccagggcggcagacggttgtaccactgcgcggtaaaggggtcgcggtagatgttgtacccgccgaacagctcatctgcgccctcgcccgacaggcagaccttgacctcccgcgcggcctcgcggttcaggaagtagagcgccacggcggcggcatcggccagcggctcgtccatgtggtactgcacggcgggcacggcgtcccagaactccccggggctgatgcgccgcacccggttgcgcacgccgaggctgcgcgccagcgtccgggcggggaaggactcgtcatagcgcggctcggcatagctgatcgtgtaggtgcggccggggcgcgccagcgccgttatgtaggcggaatccaccccgccggagagaaagcctgcgacctcaacatcggcgatcttgtgggcggcggcgctgtcctgcagaacagcctccagctcggacggcgggaccggcgtctccccgggcagaaaggcgggctgcacccaccgcgttgtgcgcacgatgccgtcagagaagataagaaaatgcccgggcagcagcttctccaccccggcaaaaaaggtgtcccgccccggcgaatactggcaggataagtagagcggcagctgcgccgcgttcagtcgcttttcaaaggacgggtgatccagaaatgccttgatctcgctggcaaacagcagcgtgccgtccgcacagcggcagtagtacagcggcttgatgccgaacatgtcccgcgcgcagaacagcgtcccggcccggcggtcccacagcgcaaaggcaaacatgccgcgcagccggggcaaaagctcgcggccccactgctcccatccgtgcagcaggacctcggtgtcggtgcgggtcgcaaagcagtggcccagcgccgtcagctcggcggtcagggccttgtagttgtagatctcgccgttgaaaacgatgaccagatttttatcctcgctgtacagcggctgggcaccgcccgcaaggtcgatgatcgccagccggcagtggccaagggcggcaggcccctccacaaaggtgccctgaccgtccgggccgcggtgggcgatgcgcgccagcatgggggcaagcgccccggcatcggccgcgccctgcccggcgatgaatcccgcaattccgcacatgagatcattgtcctttcccggcagagcaacctgccgttaccgttttgtacactcgacttgctggcattttaccacaggctgtggtaaaatcttgtcagaacaaagcggaaagagggcgagacaatgacactgggacagaacatccagaccgcgcgcaaggcaaagggaatgagtcaggaggcgctggccgaaaaaatcggcgtcagccggcaggcgctgggtaagtgggagaaggacaccgccctgcccgggctggacaatttgcaggcgctggcggcggagctgggcaccggcgtggacgcgctgctgggcgcacaggccgaaagccccgaagcccccgccgtgacgctggacgccctgcgggacctgctggccgcccgcgatgccgaggaaaagcgccgccgccggctgtggggcggtgccgcgggcgcggccttccttgtgctggcggggctgctggccggaacggcgctgcagtatgagcggcagatcgatgcgctgaaccagaattacgccgcgatccaatccagctacgcggcccagcaggcagacctttcggcgcagatttcggagctgcaggatgccgtccgcatgggggaaaccacggtgctggactggcgctggctgcccgccgataaactgcacagggacgcggcgggcagctggatgcctgtgcaggtgcaggtcacgccgcgcacagccgccgagggcacgagcgcacggctggccgtgcgctgcggcgatgatacgcagctgtatgagatgaccgccgcgccggacggcagctttgcggcggacggtattgtttttacggtgggcagcacctatgaattgagcgtgcagtggaccgccgacagtatgaccaccagtgagggcttaggcacggtggacttcaacgacgaaatgaccgagccaacgattgtctggggtgcggcgggcagcagtctggactttgggtattccgtgcggcgggtcggcaataagcagtaccgcctgaccctgacctgctaccctgtggaggtgcaggtggacgccccgccgtggatgcagcttgcgcaggtggaaatcgacctgcgcctgaacggcgacgccggggagccgacagccaccgccgtactggattgcgagggtgagtacagctatggcaattcctcccgcaccgagagcgtctggaacggcacgttttacgatgatgccgttatcaacggctgggagtacgatggcgagacgctgccgaagtacgttgtgcgtgtgacagacacgaatggaaatgtctggacggaggaaatgccgctgacggagaaataatgtgccttcccccttgggggaaggtgcccgaggccccgcccgagggcggatgaggggcagccttgccaacagaacccatttgccgggcggctgtggtatacctgcccctcatccggccctgcggggccaccttctccctatgggagaaggcaaaaagaataaacgcccccttgcggcatatactgccacaggggggatttttatgccgcagattctgccggtgctgctgggcggggatgccaatgtctacggcatggcccgcagcttttatgaaacctgcggcgtccgcagccttgccgtctgccgccgcgcgctgccggcgctggcctgcagccgccttgtccgcgttgctgtgcaggacccggcgtttgcgcaggacaccgtgttcaccgccacgctgctcggtctggccgcacagcatcccggcaaaacgcggctgctcgtcccctgtgcggacggctacacccgcctgctggcacgccatgccgatgccctgcgcggggcctaccgctttgcctgcccgccgcctgatgctgtcgaagcgctcagcgacaagcagcgctttgccgccgcctgccgcgctgccgggctgcgcacgccccaaacggcggtgttctgccccggcggcgcggtgccggacctgccgttcggctggccggtcatcgtcaagccggcggactccgatgcgtgggcgcgctgccgctttcccgggaaacgcaaggtgtatctggcaggggacgccgccgcgctgggcgctgttctggacgcagtctgccgcagcagctactgcggcgctatgctcctgcaggagtacatccccggcccggatacctgtctgggggtcgtgaatgcctactgtgcgcgggatggcagtgtgccgtggcttgtgcaggggcagccccttttgcaggagcgcacgcccgagggcaccggcaactatgccgccgtgctggtggagcctgcccggcaggacaccgccctgctggacaccctgcgggggctgctgcaggcggcgggctggcgcggctacgccaactttgacctgaagtacgaccacagcgggacgccggttctgtttgagctgaacccccgcccgggccgcgcatcgttttactgcgatgccgcgggtgcgccgctggcagggccgctggtggaggatctgctctgccgcagccctgttacaccgccgcggctgcgccccgctgtctggcacactgcgccgtggtgcgtggtgcggcggcactgccccagcaggctgctgctgcaccgcgccgctctcctgcgccgccgcggcagagccagcgcccatctgctggcggcaggggagggcgcgccccggcggatctggtttgtgatgcggcaatgcgggtatgcccgcaagctgcaggggcagcgaaaacgattggaaaaggggtgacagcagccatgtgcggcatcgtcggttttacggcagaataccttgaccctgcatcggcccggcaaacggccaaggcaatggcggagcttatccgccaccgcgggccggacggcgagggctattacgccgacacgcgcgctgcgctgggccaccgccgtctgtcgatcatagatgtgaacggcggcggccagccgatgttcaatgaggacggcacccttgtggtggtgttcaacggcgagctctacaactataagccgctgcgcgcagagctgcgccggttgggccacacctttgccaccgactccgacaccgaggtcctgctgcacgggtatgaggcctggggcgcggcgctgccccggcatctgcgcgggatgttcgcgtttgccctgtgggaccgcaccgccggcaccctgttctgcgcgcgggatcttttcggcatcaagccgctgtactattaccaaaagggggcgtgcctgctttttgccagcgagatcaaggcgtttctggcgcacccggcctttgaaaagcggctgaatgaggcccgcctgcccgactggctcagcatggagtacctgcccgaccgggaaacactgtttgcgggcgtgtatgagctgccgcctgcccatacgctgtgctggcagaacggccgcgtgagtctgcagcgctacgccgcgccgcgctttcgggtacagcggggccgcagcctgcgcagctgggcgcaagcgatcggcgatgctctggcggacagcgccgccgcccaccgcatcgcagatgtggaggtcgggtgctttctctccggcggggtggattcctcgctggtcgtgcgggagacggcgcgcaaccagcctgcggtgcagtgcttttcggtcggctatcaggaggaaaaatattccgagctgcccgccgcccgcgcggctgcggcggcgctgggcgtgcccctgaccgaaacgaccgttacggccgaggcgttctttgacgccaaccgcgcgatccagtggtatcttgacgagccgatgcccaacccggcggaggtgccgctgtattttctgtgcaaaaccgcgcggcagcgtgtaaaagtggcgctgtcgggcgagggggcagatgagctgttcggcggctacccgctgtaccggcaggccgtatgggccgagggctggcagcggctgccgcgccctgtgcgccgcgcgttggccaccctgctgccggggtgcggccttctgcgccggggcgtacagccacgctggcagcgctgcgcccgggccaactatgtgtttgagaccccgcaggagcgcgaccgatacctcaagcgcccctgcgctgcgcccgacccggcccgccgctgcaagccgtattttgataaggtgcgcagtctggatgagccgacggccctgcagtgggtggatttgcagacatggctgccgcgggatattttgcgcaaggcagaccggatgagcatggcccacagtcttgagctgcgggtgccgtttttggaccggcgggtgctggctgtggcgctggggctgccccggcggtaccgctgcaccgcgcggcggggcaagatcgccctgcgcgccgctgcggcacgccgcctgccccgggcgctggccacaaaccctaagcgcgggttccccgtgccgctggccgactggctgcggcaggacgaatactatgcgcgggtgaaggctaaattcaccggcccggcggccgagcgcttttttgacaccggggcgctctgcgccctgctggatgaccaccgggcaggaaaaacaaacgctatgacgaagatatgggcgttttactgctttatagaatggtatgaggtgtactttgtagagcaaaaaccgccgattttgtaaaaaacttaccgaaaaagcttgacaaagaccgattgcgttgctataataacttacgcagtatgtcccttgtgggcagaacccgcaataagcgcccgtagctcagctggatagagcaactgccttctaagcagtgggccgggggttcgagtcccttcgggcgcattatgtggtgcctatggcgcagttggttagcgcgccagattgtggctctggaggccgagagttcgaatctctctaggcaccccaccaaagaccgttcaggcccgttcctgcgcggtcttttctttttataatgggccgtcgccaagcggtaaggcagaggactttgactcctccatccgtcggttcaaatccggccggcccaaccaaatccccttagaaaatgacgcagccaagttggtttgcggcattcttctggggggctttttttgtggcaaggcggcgcgccgtgccgcagccgccggagcggtgcttaagccgtaaggcgggaattatgcggtgctgccttaaaagccggatggcagacccgcagtatgaggctctattgcaaatccctgcaggaccgactgcacttttttgaacaaaaatccaccttttaaaacagcaggcactggtcggcggccgcgctgtctggtataataaaggcacgatactggcggcagaaggcccgcctgcaaaacagacagaatttggcaaggagtgataccatgctcgacctcagacagtgcgcactcggtattgaattcggctcgacccgtatcaaggcagtgctggtggacggcagccatgccccggtggcgcagggggacttcacctgggaaaaccagctgaaggacggcgtctggacctacccgctggaggccgtgcataccggcctgcagcacgcctacgccgcgctggccgccgatgtgcaggcaaaatacgggcagccccttacaacggtgggctgcatcgggatctctgcaatgatgcacggctatctggcctttgacggggccggccaactgctggtgcccttccgcacatggcgcaatacgatgaccggcccggcagcggccgagctgaccgaggcgctcggcttcaacattccccagaggtggagcatcgcgcatttttatcaggcgcttctcaatggggagggacatctgggcgagttggccttctttacaacgctggcgggctatgtccattggcagctcaccgggcaaaaggtgctgggcgtgggcgatgccagcggcatgttccccatcgacagcgccaccggcggctatgatgccgaaatgctcaggacctgcagccgactgatcgccggtcacggattcgggcgtgagctggccgaactgctgcccgcagtgctgcccgccggtgccgatgccggtgcgctgactgcggagggcgcccgcctgctggaccccacggggacactgcagcccggcgtgccgttctgcccgccggagggggacgccgggaccggcatggtcgccacgaacagcgtggccccgcgcaccggcaatgtcagcgccggcaccagcatctttgcaatggtcgtgctggaaaagccgctctcccgcgtctaccccgagatcgacatggtcacgacccccagcggcgaggctgtggccatggtccactgcaacaactgcacaagcgatctgaacgcatgggtcagcctgctggccgagagcgcggctctctgcggggcgcaggtcgatcagggaacgcttttcacaaagctgttccatgagtcgctcaggggcgcacccgactgcggcggcgtgaccccggtgaactacttctccggcgagagcgtgacccattttgacgcgggtctgccgctgctgctgcgccgccccgatgccgattttacgctggccaacttcatgcgggccaacatctactcggcctttgccacgctggctatggggctggagattttgaagaacgaggatgtggccgtggataccctgctgggccacggcgggctgttcaagacgccgggcgttgcccagcggtatctggcagcggcggcgggcgcacccgtcacctgcatggagacggcgggcgagggcggcccctacggcatggccctgcttgcggcctaccgcctgcaccgcaccgagggtgagacactggccgactacctcaagacccgcgtctttgccggggcccgcagcacgaccctgacccccgatgccgctgatgtggccgggtttgccgccttcctccgagagtatgagcgggcactcaaggcagagcgggcggtagtctgaggtaagcgcccttttgaacgaatgtccctgcataaacacctccgtccctgcgcatactgtcggtacggaggtgtttagctatgaactatcttgactgtgcgcagtatgactgctgccataataaggcgggctgctgctgcctgaacagcattcaggtccgccacaccggccccggggatgctgtctgcggcagctaccgcaacagcgagggctgcggcaatgtcgccaccgacaacccgcccgcctcgccggaaaccgacatccactgtgacgacaagggctgccgctatctggagggacgctgctgctgcgcggaccatgtgagcattgacgagtgcagctgcggccacgagtgcgccacccgcgccccgaaggaaaacaacgaataaactagggcaccgcttattttgggcggtgccctcttttgtgttgcgaaagggtacattttgttgtataataagacgatatagtaggtcgtgtacgcccttttgcggggtaaacgcggcggtgcgggtgccgtgcggggcggatgccatatccgcctgcatcgctgacgcaggctgcacgggcgcatataaaatgcgcccctacgataaatttgctgtttaaaatgaggtgtcactctatgtccgagatccctgtcacggtgccgtttgtctctttccgcccgatggagcgggagctggatgccgagctgcgcggggcgtttgcccgcgtgctggacaacagctggtacatcggcggccgcgaggatgccgcctttgaaaaggcatttgccgcctattgcggcgtcaggcactgcatcggctgcggcaacggactggacgcgctggtgctgatcctcaaggcgatgggcatcggcccgggcgatgaggtcatcgccccctccaacacctttattgcgacggtgctggccatcagctacgccggggcgacccccgtgctggtcgagcccacgcttgcaagctataacatcgaccccgcccgcatcgaggccgccgtcacgccgcgcacaaaggccatcatggcggtgcatctctacggccagtgtgccccgatggatgaaatcaacgccattgcaaaaaaacatggtctcaaggtcattgaggatgcggcacaggcccacggcgcagtctacaagggccgccgggcgggcagcctcggcgatgccgccgggttcagcttctacccgggcaagaatctgggggcgctgggcgatgcgggctgcgtgacaacgaatgatgatgcgctggccgagaagatccgcgccttgggcaactacggcagcgactacaaataccaccatatttataagggacagaactcccgtctggacgagctgcaggccgcttttctggcggccaagctgccgcatctcgatgccatgaacgccgagcgccgccgcatcgccgcgcgctatctggccgggatacacaaccccgccgtggcgctgcccgccgtgcagcccggctgtgagcatgtctggcatatctttgccgtgcgctgcaagacccgcgatgcgctggaaaagcatctggcagaccgcggcatcggtacaaacaagcactacccgacaccgatccatctgcagggagcctaccgggagctgggccttgcgcagggcgcactgccgctggcagaggaaatctccgccaccgagctgagcctgccgatgtattacggcatgaccgaggcgcaggtgcaggcagtcattgacgccgtgaacgagtatgaggggtaagccatgccgaaggtcggaatcatcatctccaattacaacggctggcaggacacgctggtctgtctggaaagcctgcagcggcagacctttaccgattttgagatcatcctgatcgacgatgcctcgcccaatgattcggtggcgcagctgcaggacaaactgccgccgaacacagtgtttctgccgcagcagcagaatgtcggctttgcggcggccaacaacatcgggatccgccgcgcgctggccgatggctgtgattttgcgctgctgctcaacaatgacacggccgcacggccggattttctcgaaaagctgctggccgaaaccccggcgggggcggtcagctgcccgaagatgctgtttatggacccgccggacgagatctggtttgcgggcggcgcgctggacacaaagaccggcagggtgaagcatttgggcggccatgaaaaggacggcccgcgctttgcggagaaaaagcaggtcagctttatcaccttctgctgcgtgctgctgccgcgcgcggtcattgaacatgtcggctatcttgatgaaacgctgtttatgtactgcgaggatgtcgattactgcctgcggctgacccgcgcgggcgtgccgctgtggtttttgcccgatgccgtcatccaccataaggccggcggcagcgccggcggtatgctgtcggtgtattacatcacgcgcaacacactgtatttgacctgcaagggcagaagcaccgcctatgcaagactgaaaacgatcctgccgctcatcaccggcgcggcccgctacgcgctgaccaaggcgcttggacgaaaaaagggacgcagctacggcgcgttcagaggcgctgtggatttctggaacgggaagatggggcggatggaaggataagcagcggcaaacctgatggggtgttggggacgccgccccctacgggtgactgttgtaggggtcggcgtcctcgacgacccgtaccacgctgcctttagtacatttgtgaagccgaaaggaggcccactgtgccgcaactcaccatcgtcatcctgcaataccgcccggacgccggggcgctgcggcgcacactggcggcactggccatgcaggacacccgcgatttcgccgtggtgctgggggatgacggttcaccgcaggattattttgccgagagccgcgcatatcttgcagcccacggcatcaccgatgtgcagaccgtcaagctgatgccgaacggcggcactgtgaaaaacatgcaaaacgccctgcgcgcagtcaccacccggtgggtgctgaccctttcgccgggggatttcctctatgacagtgaaacattgcgctggtggctcggccgcctgcaggcagatgcgccgcgcgtggccttcggccgacaggcctactttgcgccgggcagcgacccgcacccgatcccgggcgaaaccccctttgaccgcaccccctacgacccggcgcactacgatgcaaggaccgtccgccgcaatctgctgctctacgatgacggcatcagcggcgcgggccttgtgtatgagcgggcgctgctgcaggctgccatggataccatggccgggcgcgtccgtctggcggaggatttttcgctgcggatgttcgccgtgcagggaatacagatcacccgctatgaccgcctgaccgtctggtacgagtacggcggcggtgtttcgaccgatgcctgcgcccgtgagcggatgctgggcgaatggcgcgccatgcttgcgctgctgcgggagaaattcccccgcgacctcacggtgcggctggcctatgaatactacttcaacgaccgccggaaatcccggctggtccgggggctggtcgggcggctcatcgtgccgcagagcgcccccttcaaaaaagcgcagcgtgcatggactccgcccacaaacggcgacataaccatcctgcgcgccatctgcgcatttgcggaaaagtgagaaaggcgtccactatgattatccagacaatccatatgaaaagcgtcacggcggaaggacagggaacgctctcggtctttgagggcagccgcgatgtgccgtttgacatcaagcgcatctactatatccacggtgcgccgcagggcacccagcgcggcggccatgcccacaaggcgctgcggcaggtgctgtggtgcccctacggcagcatcctgatccgcctggacgatggtcacgaaaagagtgaagtcctgctcaacgaccccgccaaggggctgatcgtcgagcataatatgtggcgggaaatgatctggcagcaggaaaactccgtgctttgtgttgccgcagactcctactacgaggccgaggattatatccgggattatgatgagtttatccggtgggtggaagaagaatgatgcagcttcgttgtttacagccgcaggatgcccccctcatgctggaatggatgcatgatccggacgcggtgcggtatatgcgtgctgatttttccagcatgacgcttgcggattgtgagcgctttattgctgcggcacagcaggatacccccagtctccaccgcgcggtggcagacggggcgggtgtttatcagggaacggtaagcctgaaaaactgcgatgcagaccggggagaggctgagtttgccattgcggtgcggcgctgtgccatgggtcatggtgtggccgcatggggaatgcaggcaattttgcagcttggcttttcgcagctgggactgcgccgtatctactggtgcgttgccccgcagaatgtgcgtgcctgccgtttttatgcaaagcagggatatacccccctcaagccggagccggacgaaaacggcctgctctggtttgaggtgttgaacggataaggagtttgtcatgcagcagccaaaggtcagtgtactgatctcgttctacaatttggcaccgtatgtggatcagaccatggaaagcgtccttgcccagaaaaccgacttcccggtcgagatcctctgcgcggatgatggctccgaggacgggaccgtagagctcctgcgcggttgggaaaaaagataccccgaccgtgtgcgggtattcgttatggaccgcataccgggcaaaaaatatgagggcaatgagcgcatccagcggatgaacgcgatccgtgggcggcttttctatgaggcaaaggggcagtatgtctgctatctggacggcgatgacttttatacagatgaccgtaagctgcagaagcaggcggatattctggatgcagacactgcgcacaaatatgtggcctgcggccacaacggctgctattactgggagagcaccggcaggacacagcccatcgaaaagcctgtccgggagtgtgcgctgacggccagagagtattggagctttttctatatccacaccaatgccatgatgttccgcaatgtcgggctgcaggggatagatccctacaccagcggcgtgcagatcattgacaatatgctgacctatatgttcctgccttacggcggggtctactatctgccggactgcatgttcaactaccgccagatcgagggcagcacctaccaccgccgcagcgtctatcagaactatatcttaaatgcgctgatgctttaccagcaaaagaccatactgcgcgggcttttcggtgcgggactggtgcggactgtgtacgagtacacccagctgtttgaaaaccgccgcgatcccaagctgacggaggaggccaagacctatctgccgaacattgaccgctactgtgcaggccggctcagacgcattgtgaactataacaatgaaaatgcgctgtctcgcctttggtgtgagatcgagaatccgttctggttctttgtgacaaaagtctgccgccattatatttggaagccgcatgttcgcgcattgctggaggaagcacgcgcaaaaaccgaaaaaggggagtgctgaagcatggaagatatgaaggaactgaccgcggaggagcaggtcggcatcctgcgccatgagctggaggctgtctacggctcgtcatcgtacaagatcggccgtgccgtgacatggctgccccgcaatgcaaagcgcggcctgaaatatcttttgcacaacggcccgattatcagcgcaaaatatatctatacctacgcaaagtatcataagatcgccaacaaagactatgcctactgggcctgcctgcaggaaaaggactatccggaggcgttgaaaaagtggtttctggaaacgaattacacccatacgccgctgaatctggagcacccgaaaaccttcagtgagaagacccagtggctcaaactttacggcgggtttgaggatgtgtatcctctggtggacaagtacactgtccgtgagtgggtcaaggaaaaaatcggcgaggaatatctgatcccgctgttgggcgtctgggatcactttgatgacattgactttgacaagctgcctgataagtttatgctcaaaacaaaccacggtgctggttggaacattgccgttatggacaaatccaagctggacaaggccgacgccaagcagaagatggaaacgtggctcaagctgaactactgctacctgatgggcgggctggatacccagtatatcaagataaagccgcgcattatcgcagaaaaattcatcgaaaatgatggcggagatttgtacgattataaattcttctgcttcaatggtgagcccaaaatcatcctgcacattgaggaacgctacacagacaaggaggaacggatgttcttcctggatacagactggaatcagctgcctttcaatatcaatgtgcccttggagttggatgttccgctgcctcgcccgaaaaatctggacaaaatgctggaaatcgcccgcacattgagccggggctacacagcggtgcgtgtggacttgtattccctcaatgatggtagcatcaagttcggtgagatgactttcacaaccgagagtggcatctcccgctggcaccccgagagcgccaacgaatatatgggcagtctgattcatctgcccggcgtcgatgatgaaggagacaagtaaatgccgactgtcagcattgtagtgccggtctacaaggcggaaaaaacgctggacgcctgtgtggagagcatactcgctcagaccttttctgactttgagctgctgctcattgacgatgccagccctgaccgctgcccgcagatctgcgatgcgtgggcaaaaaaagacccccgcgtccatgcgctgcacccggccaagaccggtccgggtccgtccggcgcacgcaatgcggggctggatgccgcagcggcgccctggatcacgatggtggacagcgatgacacggttgcgccggacctgctggaaacacttctggcaggtgcagagcgcaccggcgcggagctggtgctttgcaactgttgccctgtgacagaggacggcgcacggcacccgttgccggagaacgagcgttttacagaggaaacgctgctcggggtggaagccttctgggacgccttcggcacgccgtggatcaaccagttcaccggcacggcgcacaggctgtacgccgcccggctgtttgcgcatgcccgctacccgctgggcatgctgcatgaggattactacctgctgcctgaccttatcgcgggctgcacaaggattgcctgcctgccctacacgggctactatgtcctgcgccatgcaggcagcatcacggacggtgccagacacgaggtgcgtctggcgatgacccggggggatatccaccgggcggagtattttctggcgaacggctggtacgaccgcgccgagggggcgctgactgatgcggcgcttttcctgcacagcaataagcgcgcctacgacttgacaaagcccggccaccgggcggagtttgccgaaaccagacgggagctgtgccgtgtctatgacgcgctggcggcgcaaaagggtgcagcatcgctgaagctgcgcgctgccgccctgcacatcggcctgccggtgtttgcgggctatctgaaagcacggcggtaaacgccgaccaacaaaaaggagcttcccatgccgactgtcagcgtcattatcccggtctataaggtggagcgctatctggatgcctgcgttgaaagcgtcatcggccagacctacatggatcttgagatactgctggtcgatgatggaagccccgaccgctgcccggcgatgtgcgatgcatgggcagaaaaagacccccgcatcagggtcatacaccgcaaaaacggcggcctttccgctgcgcgcaacaccggcattaaggcggcaagcggcgcatttctgatttttgcggacagtgatgaccggatggagccggatgccgtccgccgcgcggtggaggcccagcggcaatatgacgctgacctcgtgctgtacaatctgacctatgtggacgaggaaaaccgtccgctcccgcagccggatttcagcggcttccgggatgaggtcctgtgcgaggacgaggtctgggcgcgctattttgcgctggccgaaacacggatctactatgtggtcgcatggaataagctgtaccgccgcagccttttccgcacgctgcgctatgcgcccggcaagcggtatgaggatcagtttctgctgccgtatctgctcgggcagtgcgggaccatcgtctgccttgcctatccgggctaccgttatgtgcagcgcaagggcagcatcatggccgcggggtcaagccgtaactatctggatcggcctgaatttctgctggaatggacagcttgctttgcccggcggggggactgcctgcgggcagaaggcctgctgaacgatgccatcgacaatctggcggaaaagcagcgctttgatttgactaccccggcccagcaggcccgctaccgcgcagcctgccgcggctgtgcggatgcctaccgcctgctggcccgcactacagggcagcgcagcatgtggctgcgggccgcgttgctgcgcatcggtctgccggtgtacaaggcctttctgcggcataagggcaaggcggcatcgcctaaaaactaaaggagctttcgcgcatggaaaaatcacaactggaaaattatcatgttcactacggcccggctcagggctggagtcaggtggacctgcatgagctgtggcgctacaaggacttgatctggctgtttgtcaagcgcgacttcaatgtcatgtataagcagaccgtgttgggcccggcgtggattctgatcaacccgctgctgtccacggctatgtactgcgttatgttcggcgttatcgcccagctgtccacggacggtgtgccgcagatccttttctatctggccggcacggcgctgtggggcttttttgcggcctgcatcaacaaggtgtcagggacctttacaacgaactccaacatcttcagcaaggtgtattttccgcggctggcgatgccgctctccacgatgctgtcaggactgatcaactttcttgtgcagtttgtcctgttttttgccctgctgcttgtctatcttgccaagggcgaggtcagcccgcagtgggcgctgatgccgctggcagtgccgctggtgctgcaggtcggtctgctggggctgggctgcggcgttatcgtgtcgagcctgaccacccgctaccgcgatctgatggtcgtggtgaccttcggcgtgcagctctggatgtacggctcgccggtggtctatccgctgtcgatgatcgaaaacccgctgctgcgcggcgtcatgatcgccaaccccatgaccgcaccgatggagaccttccggtatatcttcttcggcagcgggcaggtgacgggcgtgatgtgggcggcatcgctggcatggacggcggtgctgctggtgctgggcctgtcgcttttcagcaaggtcgaaaagacctttgtcgataccgtataagggggcgcgtgtgatgagtgaaaataaactgatgatccgcgtccgggatgtcaaaaagcagtaccggctcggccagatcggcggcggtacgctgcgcggcgatctgcagagctggtgggcccgcaagcgcggcaaggaggaccccaacaccctgatcggcaccgaccagcgcctgatcggcacgacctttatggcgcttaacggcgtcagctttacagtcaacaaaggcgaggccgtgggcatcatcggctcgaacggtgcgggcaaatccacgctgctcaagctgctgacccatgtcactgcgcccacggagggcgacattgacctgtacggccgtgtggcctcaatgctggaagtcggcaccggcttccaccccgagatgaccggccgtgagaatgtctatctgaacggcgcgatcctcggcatgacccgggccgagatcgacgccaaaatggatgagatcatcgaattttccgaggtgcgggacttcatcgacacgccggtcaagcgctattccagcggtatgtttgtcaagctggccttcagcgtggcggcccatctggacagcgagatcatgatcatggacgaggttctggctgtcggcgatatgaagttccagaaaaaatgtctgacgaagatgcgtcaggccgcccagcgcgacggcaagaccgtgctgtatgtcagccacaacatggccacgatccgcgacctgtgtgaccgctgcattgttttggacaagggcaaggtcgtctttgacggcggcgtcgatgagggtattgcactgtatctgtcaacgcgctcacaggcttcggaatttgtggattacagcgcattcaagcgagacaactggttcaagcgcgacaatatccggctgcaaaatgtccatctgcttgtgcccacagtggaggccatcgagcgcagtcagcccgtgaggatgcggtttgttatcaaggcgcaggagtctgccggggcggtggggttgcgctttgaggtgcgggatgaggtaggaaccccattggctacctcctgcttgtatgggctgcagctgcagccgggagataatacgtttaccgtatcctatgatttgagtgtgctttcccccggcaagtacagcaactattttacactctttacagcgggtgagggcggcacccacatagtcgaggactgggtacccggtattcagttccgtatggtggataccttttcgggaaatcaactggaatggaacgccaaggattggggagccatccgtctgccggaggctgtactctgtcaggaggatgcctaatgaaaaaaattgcggcgctctatatctgcaccgggaaatatgcgcgcctgtggccgggttttctggaaagtgcagaaaaatatctgttgaaaagctgcgaggtacactacttcgtttttaccgatgcggagcatctggaaggtgaaacggagaatccgcgcatccatcgcattgaacaggagccaatgccgtggccctacacaacgctgctgcgttttgaaattttcctgaaaattgaggagcagctcaaggcatttgactatatctatttctttaatgccaactgtgcgttcatgcagcccattacagaggaaatgttgctgccccgtccggaaaagcacgagcatatggtgttcgttttgcacccggcgttctattggcgctataactatgagtacacttacgaccgtaaccctaagtgcaaggcttatatcccaatgggcatggggcgggactatgtctgcgggggtatcaacggcggcgagcgcgaagcctatctgaaattctgccatatgctgcaaatgcgtatacagcaggataaagataagggcattattgccaagtggcatgatgaatcccatatcaactggtatgcctttacccacccgcattaccgcctgctggatgccagctactgcttcttccctggctggaaaactgtgaagccgtgctatatctatgtccgaccgaaagaggactactttgacgtggataccttcaaaaaagatccgccgatgacgcagctttccccgatggtggaaaaatacaatgcctttatgctgaaggttgcccgcaagattcagcgccatatcccgtggctgccccgcagaaaaagggaataaaataacaccagccgcacggcgttacaaaaccgtgcggctggtgatttattttaccgataatcaataggcagtgtcggcaggccgttcagggtccaatcggcaaggttgccgtcccggaactcgtagtagccctgggcggcgatcatggcgccgttgtcgccgcagtatttcagctccggcaaaaagacacgggcacccagcttctgcgcgccgtcattgacaagctggcgcaggcggccgttggcggccacgccgcccgctaaaaccacctgttgggcgtttgtgtcggctgcggcggccagcagctttttcgccaaaatctggtcgatgcgctcctgaaagctggcggccatgtcagctacattcacgccctgccccttctgctcggcgttgtgtacctcattgatgacggcggtcttgaggccactgaagctgacattgtacttgccctccacatggggaacgggcagcttgtatgccttggggtcgccgccgcgggcagcggccgccacgctggggccgccggggtagggcagacccagcgtgcgggctaccttgtcataggcctcgcccgcagcatcatcgacggtgcggcccaaaattttatagcggcaccagtcctcgaccagtacgatgtggctgtggccgccgctggcgacaaggcacaaaaacggcggcttcagctcggggtgggtcagatagttcgcggcgatatgcccccgcagatgatgcacaggcaccagcggcttgcctgccgcataggccagccccttggcaaagttgacgccgaccagcaccgcgccgatcagtcccggcgcaaaggtcacggccacagcgtccacatcgcggatcgtcatgcccgcatcggaaagcgccttgtccacggtggcgctgatatattccgcatggcggcggctggcgatctccggcacaacaccgccgtaaagggcctgctccctgacgctggtggagattacattggagatgacctttctgccatcctccacaatcgccgccgcggtctcatcgcaggtggactcgattcctaaaacatacataccataaacctctatgcagggggcgggcatgcccgccccgcagcgttttctcgattgctattttcccggaaaagtgcagcagccgtcaggcccggcccttgcggtcgtgctgctgttttaatgggcggcaagccatgtcttgccggtgcctacctcagtcgtcagagggacgctgtagtgtactacattttccatttcttctttcaggatgcgctttaccgcatcgcactctgcctcgggtgcctcgacaatcagctcatcgtggacctgcaaaagcaggcgggcctgcagcttttccgcgcgcaggcgctgccagacatggaccatcgccagcttgatgatgtcggcggctgtgccctgaatcggcgtgttgcgggccatccgctccccgctggcgcgcacctgaaagttggagctggcaagctccggcagggcgcggcggcggccgaacagcgtttccacatagcccttgtccttggcgtgggcaatgcagtccttcatatagccgtccaccttcgggaaggtgtcgaggtaggtctttaagaagctgtccgcctctttgaccgggatacccagatccttgcttagcgagtacgcgcccttgccgtacatgatgccgaagttgatcgccttgctggcgctgcgcagctgcggcgtgacctcgctctccgggatatggtagatcttggcggcggtcgagcggtggatgtccgcaccgttcaaaaacgcctgctgcatgtgctcatcgccggtgatgtgggcaaggatgcgcagctcgatctgggagtagtcggcgtccaccagcgtttcaccctcgcccgccacaaagtagccgcgcagccggctgcccagctcggtgcggatggggatgttctgcaggttcggctcggtcgaggagatgcgcccggtgcgggcctcggtctggataaaggtcgagtgtacccggccgtcggcagcctcggcgttcagcagtccgtccacataggtggagagcagcttcgagtaggtgcggtattttaagatctcgtcaatgaccgggctgtaggggcgcaggctctccagcgtttcggcatcggtggagtagccgcgcgccgtctttttgcgcggcggcaggcccagcttgtcgaacagcgcctcgcccagctgcttggggctgtttacgttgaacggataaccgacggctgtataaatattgtttaagatcccgtccagctcgccccgcaggctgtccccgaaggcgcggataccggcggcgtcgatcgcaaagccgatgcgctccatgtccgccagtacccgggccagcggcagctccatctcgtccagcagcttgcgctggccgctctcgtccagcgcggcggcaagggtatcgcaaaggccggccaacgcgcccgcatcgggggcgtcctcacagtggaaggcggcgtgtacgccgtactcggcggccagagacttgacctcatagccgctggcggacggattcagcaggtaggcggccagcttgccgtcaaagcgcagcgccctgccgatgccgccgtgtgcaagcgccagccggtagaggggcttggcgtcaaaggcccagatctcggcatcgccgtccagcagggcggccagccggtcggtgtcgggcaggtagacctcgctgccctgcacgagataccagctgccgtccccggctttggtgaggctctgcgcggcataaaagcggccctccagcagcagcggcaggggcgcaggctccaccgtctgtaccgggtcggcgttggcggccgcagcgggggcagcgccgctttccagcccccagcggtccaccagcttgtgcatttccagcgcggccagcagctgcgcggcggcagccgggtcaccggggcggcggatataggcgctggggtcggtctcaatgggggcatccctgcggatggtgcccagcatataggacaggtcagccttgtcgcggttggcggtcagcttggcgcgctggccgggcttgacggccttgtcctcaaggttgtcgtacacgccctgcaggctgccgaatttcgagatcagtgccagcgcggttttttcgccgatgcccggcacgccgggaatgttgtccgacgagtcacccatcaggctttttacatcaatgagctggggcggctcgatgccgtatttttcccggatggcggcggggtccatggggatggtctccttgttggtcgccagcagaacggtcgtggcatcgtccaccagctgcaggctgtcccggtcgccggtcgccagcagcgtggtgccgccggcggcctcacacgcggcggccagcgtgcccaaaatatcgtcagcctcccagccgggcttgctgacctgcacaaagccgaggtcagtcagcagctccttcaggaccggcatctgctgggccagctcctccggcatgccgtggcgggtggccttgtagccatcgtaggcattgtggcgaaaggtgggggcgcgctcatcccatgcgatggccacggcatcgggcttgtgggccgccagcagattcagcagaatattctggaagccgtagatggcgttggtgtagcggccatccttggttgtcagcagcttgatgccgaagaaggcgcggttgacaaggctgttgccgtccagaaccatgagtttcataaagctattctccttacagacaatctatatttcagtataccacatttgcggaaaatatggtagaatagattacaaaataaaaagccttcccccaagggggaaggtggcgcaaagcgccggatgaggggcgaacttgctgtgataacccgtgaacgggttgcggtgggaacgtcagcggggcgtcgaggacgccgccccctacacccgtaggggcgcattccatatgcgcccgaagacttagccttgccgcaactctgcacgggcggagcagagccccgcccctacaacgcgatttttatagaaagggcatatttttatgcagctacgcaacctacaaatccccgcaggcgcggtttttgcgccgatggcggggctgaccgatgcggcgtgccgccacctgatggcggatcacggcgcggcctggaccgtcagcgagatggcaagcgccaaggcgctgaccttcggtgaccgcaaatctctggaacttttgcaggacaagcacccccacggcctgtatgcgatccagcttttcggcgcagagccggaaacactggaaaaggcgatactctttgtccgggaaaagggcgtccggtttgatatgctcgacatcaatatgggctgcccggcacccaaaatcaccggcggcggcgcgggcagcaagctgctgctcgacccgccgctctgcgggcggatggttgccgccgcccgccgggcgctgggcgaggataccccgctgaccgtcaagatgcgcatcggctgggacgccgaccacctgaccggcgcagaggttgcaaagcaggtcgaggccaacggcgcggatctcatcgccgtacacggccgcacgcgggagcagatgtatatcccgcccatcgacacggcggcgatcgcggccatcaagcaggcggtcacgatcccggtgctggccaacggcgatgtgaccaccgccaacggtgcgctcaccttattaaaagaaaccggctgtgacggcgttatgatcggccgcggcgcgctgggcgacccatggctgtttgagcaggtccgcgcggcgattttgggcgaggagcgcccgcccgagccaacgctgaaccagcgcatgagcaccctgcgcgcgcagatctatgaaatgtgcgaggaaaagggcgagtgggccgccatgccgcaggcccgcagccaggccatgcactatatgaaggggctgcgcggggccgccgccctgcggcgctactgctcgatgctggagcattttaccgatgtggacacattgatcgatgcggtgtacaaattacagtaggggagggattcatccctcccgtgcgtgttcccgctgccgcaagcggcctgggaggcataaatgcctcccctacaaaccatcttgtaggggggcggcgtccctgacgacccgcaggcagtcagaaccgtcctcttgtcaattcgtccagattctgctcataacagggcagcatgtgcgcgataaaatattctgcctcggggcagttcatggcgtgcagggcgtccatctgctgggtgcgggcggcctcaaactcgcggttgccgccgcggccctcctcaatgcacttgatgatggccgacagtcggtctgccgccttcaggatcttgcgctcggcatcgttcagcacgctgccggtcagccaggcctgcgtctcggcctgcagctcagcaggctgcaggctggccataacgcgggcgctctcatgctccacagccttgtaggcggtgcgcagggcatcgtttttgtacttgacgggcgtgggcatgtcgccggtcagaatctccggcgcatcgtggtagacagccgctgtggccacaacctcgggccgcagggctgcgccggtgccggtgcagcttttgccgatcaggcagagtgtgtgcgccagcatcgccgtatcggcggtatgctcgctcagcgattcggcccgggtgctgcgcatcaggctccaccgtgtaatgtatttcatgcggctgaacagcgcactgaacggataggttttcatcttcacttgacctccggtttgtggtatactggggttgctttcagtataccacaactttttgaaatgtgaggccccataaagggtactatgaaaaaatctgatacaaaatcgaattactggcgggtgttcgttctctgctttttaacggctgtgctgctgtttttgccgcactgcatcatagatgcggctgcgggcggcgggtatttccactatgcaggggactttaacgaccagcagatcaacttttaccagtacgccaacgcctttgtcaagcagggcggcaccttcagctgggctaccgatctgggcagcgggtttgtgaactcctactcgttctatcttttgggcagcccgtttttctggctgtcgctggcggtgcctgcgcggctcatgccgtgggcgatggtgccgctgctctgcctgaaaatggcggtggccggcggcggtgcctacctctgggcgcgccgctgggtgcgggtggaaggctggtcgatgctggccggctgcctgtatgcgttttcggggttcagcatctacaacatcttcttcaaccactttctggatgttgtggcgctctttccctatttgctggctgcgctggatgacgccgccatcgacggcaaaaaggggcgcttcccgttctgggtcgcgctcaacctgctcaacaactatttcttctttgccgggcaggcagtgttccttatcatctatttcttctgtatggtcgcagggcggcggtacaggatcggcctgcgccgctttgccgcccttgcgtgggagacagcgctcggctgcgcgtgcggctgtctgctgctgctgcccgccgggctttcgcttttgcagaacccgcgcaccatcgacccgtttaccgggtacggctacctgttctacggcaaatcccagcagtacggcgctattttttacagcccctttctgatgccggacgcgccctatttcaaggatatgtttcaggagggcatcctcaagcatacaagcctgacggcctatctgccgctggtgggcgctgcgggcgggctggccttctgccgcacgcaggaccgccaccccttcacccgcattttaaaggtctgcgtggtctgtgcctttgtgccggtgctgaacagcgcgttctacgcccttaattccagcttttacgctcgttggtactatatgccgatccttgtgctgtgcggcgccacctgctgcctgctctcccgcccggcactggctgagcgcagcctgccgcgcgcctttgggctgacgaccttcatcacgctgacggcggcggtctttgccgtgctgcccaacaaggacagtgacggcagcttctgccttggcgtgctggaggagcctgcccggttctgggcactgttcggcgtgacggtgctgggcatcgtcctttttgggctgctctggcatttctgccgccgcaagcggcagtggagccggattctgctggccggtgtgctgggcttcagccttgtgtacggctcgctgcatctctccctgacgaaatacgcccagtgggatgtggacggcaaccttattgctgagacatatgactccgccgatgcggtcgcggccgctctgccggacgatgccttctaccggatcgatgcctacggcgcgcacaacaatctggggctgtggttcgaccgcagctgcctgcagttcttcaactcgaccgtagccccgagcatcatggagttttaccccgctgtgggcgtcaagcgcgatgtcaattccaagccggacgctgccaactacgcgctgcgcggcctgctcagcgtgcgctacacgctgaccgcccgggacaaggtgagcgactgggaggcacaggccctgcccggctggacaaaatacgccgagaccgatgcctatctgatctatgagaatgaaaactgggtgccgatgggctttacctatgactactatgtgaccgccgaccagctggagcgggtgggggaggaggagcgcgcccagatcctttgccgcgccctgctgctggatgaggatcagatctcggccttcggcggcctgctgcgccccctgcccgatgaggagctgacccgccgcagcgaggaggcctacgccgccgactgtaccgcccgccgcgaggccaccgtggcggagtttaccgccacaagaaccggctttaccgccaaaactgcctatgataccgatgcgctggtgtttttcagcgtgccctatgacgatggctttaccgccgctgtcaacggcgagcctgccgccatcgaaaaggtcgataacggcatgatggccgtgtatgtgcccgccggggagaatgaggtggagttcacctaccatacgccggggctgaaggtatcggcggcagtcagtgccgcggcacttgcagtgtatggagtgtatttgggaattttgcggaagaaaaagagggcataacagcaaatgcggcgcgaaagggaagtttgcaatagaggcaaacgacccggggcgtcgaggacgccgccccctacaactaagggataaaggagttctaaaggcacagtgcggcggcctgagggcaggccgccctacaactgtaggcatacgggggcaagggagggctgcagccttcccctgacggcgcgggcggagcagagccccgcccctacgcacatcccattcccactgcgggggttcgggggcgcttggcggcgcacaacgagcgccgccagccagcaaagctggcccgctcgtgcggttgtttgccccgcaggggcaaacattgctcgctccccagtttcgctccgctcaactgtggccccgcgctcgcaaccccgcaacccccgactcaaaagtggagcaaggcccgtaggcgttaagcgcgaacagtaatactgcgttcgcgtagccggagggccttgcgacttcctctttgggggtcttgggggcgtgcagcccccaaggcgcgggtcccgcttgacggcgctcaacgagcgccgtcagtttgcttcgcaaacccgcttttgcggttgattgccccacggggcaatcattgtgcgctccccagtttcgctgcgctcaactgtggccccacgcgcacaagcccgcaccgcgtcgcaacagcggcaattttctttggttctttcttttgttggcaaaagaaagaataacctcccgggagactgccgttaaaactttagccgagaaaggaaaaaacatgccaaaccatgctgaacaattagcacaagaactgaacctgagcgtcaaaaatgtgcagggcgcgatcgagctgatcgatcagggcaataccattccgttcatcgcccgctaccgcaaggaggccaccggctcgatggacgatcaggtgctgcgcgatctgggcgaccgtctggaatatctgcgcggcctcgataagcgcaaggcggaggtcacctcctccatcaccgagcagggtgccatgacgcccgagctgaccgctgccctgaccaaggccaaaacgctggccgaggtcgaggacctttaccgcccctacaagcccaagcgcaagacccgcgccagcattgccaaggcgcgcggcctgcagccgctggccgatgcgattttcaagcaggatgccgcgttcgaccccgaaaaggccgccgccgcgtacctgaatgatgaggtgcccgatgccgccgccgcgctggcaggtgcgcaggacatcattgccgaggctgtctccgacgatgccgcctgccgcgccgagctgcgccgctactaccgcgcgtttggccgcatcgccagcgccaaggccaaggacgaggacagcgtctacgcccagtattacgactttgccgagccgctgaacaagatccccggtcaccgtgtgctggcgctggaccgcggcgagcgcgagggctttctgaaggtcggcattcaggtcgatgccgagcgcgcagcgggcatcgtcagctggatgtttgcccgcaaaaagaccggcggtgccagcgcggcggttgtggatgccgccgcccgcgatgcctacagccgcctgatccaccccagccttgaaaacgagctgcgcggtgagctgtcggccgctgccgccgagggtgcgatcaaggtctttggcgataacctgcgccagctgctgctgcagccgcccatccgcggcaaaacggtcatggggctggaccccggctaccgcatgggctgcaaggtggcggtcgtggacccgaccggcaaggtgctggatacgaatgtcgtttaccccgtgcccgagttcaagcgggtggatcaggccaaaaagaccatcaaggcgatggttttgaagaacggtgtcgaggtcatggccattggcaacggcacggccggccatgagaccgaggagtttgccgccgaggtcatccgcgagctggccgaggaaaagaacctgcacctgcagtatatggtcgtcagcgaggccggggcctcggtctattcggcgtccaagctggctgccgaggagttcccgcagtatgatgtcaacctgcgcagcgccgtgtcgatcgcccgccgcctgcaggacccgttggccgagctggtcaagatcgaccccaaggcggtcggcgtcggccagtaccagcacgacatgccccagaagcggctgaacgagacactggacggcgtggtcgaggactgcgtgaacagtgtcggcgtggacctgaacaccgcctctgcgccgctgctgcgccgcgtggcgggtgtcagcgcggccacggccaaaaacatcgtggcatggcgcgaggaggagggagcgttcacctcccgcgcccagctgaaaaaggtcaagggcctcggccccaaggcgtatgagcagtgcgcgggcttcctgcggctgcccgaggctaagaaccgtctggatgcgaccgccgtccaccccgaaagctacgcggccgccaaggcgctgctggatgcctgcggctacacggccgcggagatcggcaccgaccgtctggcggggctgcccggcgccgtcaaggccaagggcgccggaaccctctgcgcgctgctgggtgtgggcgagccgaccctgaacgatattgtggccgaactgtgcaagccgggccgcgatgtccgcgacagcctgcccaagcccctgctgcgcagcgatgtcatggggctggacgacctcaagcccggcatggagctgaccggcaccgtgcgcaatgtcatcgacttcggtgcctttgtcgatctcggcgtgcatcaggacggccttgtccatgtgtcccagatcagcgataaattcatcaagcacccgcgcgagctgctcaaggtgggcgacatcgtgcgcgtcaaagtgctgagcgtggataccggcaaaaagcgcattgccctgaccatgaagggcgtgccccagcaaaactgatactaaaccggcataaacatatacaattgttgcacgcgaatttgcacggtgtctgaattgttgcgggatatgtcatacattggcatcagaaaacgacaaatactttcagaaaacataaaaaaatgacttcaaaaacataaacaatgtgaacaaacgacccctggcacagccaaaagctgtcattctgaccaaaagccaaaaatgaaggattttctcttttgtgcaggaaatggaaaaaatttgctttgtgcattatgaacaaagcggaggcacataattgtgctataatgcacaatgtaaggagcggatagagcatggtggctcacctccttaccgcagggctgcacgcccggttccgccccggacaccggtgctgaagatgcagcctgttgtgcgggaatgattcggaggtcatttattatggtgaaacaagtcaaggtttccaattttactgaggtcaagggaatcgtgtctgctgccgccaagtgctataacgatgtcggcgtgcatgacatgaagggcagcattgccgatgcaaagagcattctgggcatgatgagcctggattacagccaccccgtcaagatcgtctgcgaggacgagcatgacctgaatcgcgttgtcaatgcgatcaagcagtaaaagcaaaccaaccgccctgcagccgcagggcggctttttgttggtgcaaaaaggcttcccccgcggggggaaggcaaggagcgcatcacgccgctgcgtaaaaatttctgaaaataggaactttgaaaacgagagaaaacaagagcatttgcgagcatttgcgagcaagcgcggaataaattaaaattcttgccaaaaaccgttgactctgcacggcttttctgctataatcacacttgcgcgaaaaagcgccccgccgggcgctgttaaataccgttacaagacggacgtgttaatttatcaatggaggtccctactatgagcacgactctcgctaagcccgctgaaatggctgaccgcaagtggtatgtgatcgacgccgccggcaagcccctcggccgcgttgctgccaaggctgctgtcatcctgcgcggcaagaacaagaccactttcacccccaatgttgactgcggtgacaatgtcatcatcatcaactgcgatgaggctgtcctgaccggcaagaagctggagaagaagttccatcgcactcattccggctggatcggcggcctgaaggagacccagtacaagaccctgatggctgagaacagcgacaaggccatgacctacgctgtcaagggcatgatcccctctaacaccatcggcgccaaggctatgacccgcctgcactgctacaaggctgctgaccatgcccatgctgctcagaagcccgaagctgttgagatttgagtgaggaggcaatagaagatgtacgaaaccaaaccttatttctacggcaccggccgtcgtaagcattccgttgcccgcgttcgcgtttacaacggcaccggcaagatgaccatcaatggtcgtgacatcaacgattacttcggtctggagaccctgaagctgctcgctaacagccccctggtcctgaccgagaacgagggcaagttcgatgtcgtcgtcaacgtggttggcggcggctgcgcaggccaggctggcgctatccgccacggcctgtcccgtgccctgctgcagttcaaccctgagctgcgcgccaccctgaagaaggctggcttcctgacccgcgatcctcgtatgaaggagcgtaagaagtacggcctcaaagccgctcgtcgcgcacctcagttcagcaagcgataatctacagcttaat

SEQ ID NO: 14261 - DNA, 931 bp, Unknown
  gut microbiota DNA sequence
catcaatattaaatagttatcatcaaaaactccgggggtgtttgctcccggagtttgcttttattggggctgcatcggcttgctgcaatccatacacaggatgcggctttcacgcagcatttctttctgcaaagcgtggtacgattgcggtacacagcaaggggtaaaagaaaaagtccttaatttctaacgatttttcgttaaaacctaaggactacatttggtgaccctcccgtccatctcccgcgccctaaaaacagtccgcaggactgtttttgccccgcgggacgctgacgcggggctgcgacttgcggttaccgcatcaggctgcgccccttgggcggggcttgccttctgcgaccgctgcgcctgctccggcttcctgtttccgccgcaggctgcggtcgcctccgcagcgggctgttcgattcccgtacgggtcaccatttacgcccgacacctgttgaaaagtaaatataaaggaaaaagcactacctaaaatgaagtagtgctttttggtgacccgtacgggaatcgaacccatgttacagccgtgaaagggccgtgtcttaaccgcttgaccaacgggccttataatacaagatttcgctaaaacagcaagcaccttatcggccactattgcaaccgacccccaagtattttagcgaaatcctgtatcatgtggtagcggtaactggatttgaaccggtgacacttcgggtatgaaccgaatgctctagccaactgagctataccgccacatttgtctgtgcgctctcgagaacgctatattattatagccgacagtgccccctatgtcaagtagttttccccgaaaaatttcaaaaaatacaaaaaaatcccgcattgcgagtgcaatgcggggaaaaggctctaaaggcttccccctcgggggaagctgtccgcaaag

SEQ ID NO: 14262 - DNA, 7687 bp, Unknown
  gut microbiota DNA sequence
ttctgccaaattatttcttcggggtcagcacggccttgccgcccatgtaggggcgcaggacctcggggatggtgacgctgccatcggcctgcaggtggttttccaggaaggcgatcagcatacgcggcggggccacgcaggtgttgttgagggtgtgggccagctgggtcttgccgttctcatccttaaagcggatgtgcaggcggcgggcctgagcatcgccgaggttggagcaggagcagacctcaaagtacttctgctggcgggggctccatgcctcaatatcgcagctcttgaccttcagatcggccagatcgccggagcagcactccagctggcggacagggatctccatcgagcggaacagctcgacagagtttttccacagcttttcgtaccagtccatgctgtcctcgggcttgcagacgacgatcatctcctgcttctcgaactggtggatgcggtagatgccgcgctcctcgatgccgtgggcgcccttctccttgcggaagcaggggctgtagctggtcagggtcaggggcagcttggcgccgtccagcgtctggtcgataaagcggccgatcatggtatgctcgctggttccgatcaggtagagatcctcaccctcgattttgtacatcatagcgtccatttccgggaaggacataacacccttgaccacatcgccgtgcatcatgaacggcgggatgacataggtaaagcccttgtcgatcatgaaatcgcgggcataggccagcacagcctcatgcaggcgggcaatatcgccgagcaggtagtagaagccgttgccggagacgcggccggcggcgtcaaggtcaatgccgtcaaagcgctccataatgtcaacatggtacgggatgggatagtcaggcacaaccggctcgccgaagcgctgaacctcgacattgtggctgtcatcggggccgatgggcacgctggggtcgatcatctgggggatcgtgtacatgatctcctgaatcttggcctgcagctcgccctccttggcttccagctccttcaggcggtcagcctgcgcggtgacctgcttcttgatttcctcggcctcggcagccttgctggggtccttcttggcctgacccatcagggcaccgatctgtttggacagcttattgcggtttgcgcgcaggtcgctggcctcgccgatggcggcgcggtactcggcgtcaagccggatgacctcatcaacgaggggcagcttggcgtcctggaacttcttcttgatgttttccttgacggcgtccgggttttcacggacaaagcgaatgtctaacataatggtactcctctattaaaatttcaataatagatacattaaaagcgttgtaggggcgaacattgttcgcccgctgcagctttgcggctgcgggtactttgcgggtcgatgacgagcatcgacccctacatgtaggggcggattccatatccgcccgcgaaatcgtgcggttgccgcagcttttccgggcgaacaatgttcgcccctacaaatccaacctgcattacccctccgggtcatacattcccagcaggctgacgaacttttgcagcatggcatcgctgtagaagtcgatcttcagcgagcccttgccgtccttgtaatcgacatggacctcgctgccggtgacctccttcagcgcggcctccacctcaatggctcgcttggggcgggtgaagttatcctttaccttggggggcttggcgggcttggccagctttttgcagagcgcctcggtctggcggacattcaggctctgcgcaatgacctcggcagcggcctgccgcatcagctcctcatcgggcagccccagcaggaccttagcgtggccaaagcttagcttgccctcgctgaccagacggcgcacatcctcgggcagggccagcaggcgcaggctgttcgccacggcactgcggcttttgcccagccgcttagcggcgctctcctgcgtcaggccgtatttgtcgataagctggcggcagccctcggcgacctcgatggggtccaaatcctcgcgctgcaggttctcgatcagggccagcgcggcggcctgctcatcggtgacatccttgatgatgaccggcacctcgacaaggctggccagacgggcggcacgccagcggcgctcgcccgcaatgatgatgtagccggggccgacctttttggggcggacggcgatgggctgcagcaggccgttttccgcaatgctgtcggcaagctggttcagggcatcgtcgtcaaaccgtttgcggggctgctccgggtcaggctcgatctcgcgcagcagcagggtggaaccggacgcttcacttccggtatcgtcggacagatcggcaaacagactgtcgagtcctttgcccaagccgcccatcttcttcttggccatcggcgtccctccttatcgctcattgtttgctaaaaattcccgcgccagctccatataagcctcgcagcccttgccgttcggctcatagaagttgatcggcataccgaagctgggtgcctcgctcaggcgcacggtgcggggaatgacagcccggtataccttgtcgccaaagtactttttcacctgcgccacgacctgcatcgtcaggttcagccgcccggaatacattgtgaacagcacgccctcaatgtcgaggtggcggttgtacttctggcgcacggtctttagggtgcccatcagctcgctcagaccctccagcgcgaaaaattcacactgcatcgggatcacaacggtgtccgctgcacagagcgcattgacggtcagcagatcgagcgacggtgcgcagtcgatgaagatgtagtcatacagcggcacgaccggtgccagcaccgtgcgcaggcgcatctcacgccggggcaccgagaccagctcaatgggtgcgcccgccagctgcgtgttggatggcagcacatctgcgttgtactcgctcttgatgatggcctcgcggacatcatcatcgtcgatcaggcaggtgtaggtgtcggcctcgaccttattttttgcgatgccgtaggcggatgtcgtgtttccctgcgggtccagatctacgatcaggacctttttgcccagcgccgccacacaggcgctcaggttgacggcggtcgtggtcttgccaacgccgcccttctggtttgctattgcgatgacttttgctgccacgccgtacctcccctgttttctttgcaattttcagcggcagaggccgcttatatctattatagcacaatggtttgcgataaaaaaggggtcgaatacaaaaagtacccccggaatgttccacatggaacattccgggggcaggttggctataaaggcaaagctgcaaagcccctcaggcctcgtaaactcggccagctcccccatagggggtgcctttttgtgcgggcttcgcccgcgggaaaagcctccccttacaggggaggtggccgagcgaagcaaggccggaggggcggccttggctctactgccctctttaccgggcgacacccttacgcgcccctcatccggcctttggccaccttccccctaagggggaaggcttttctttctcacagcttcaccgcaaactcgctgtcctccttcttggggtcgttgtcctgcttgcctgccgtcccgtcactgctcacggggatgcgcactatgtactcaaggcagccgtcatgcttgtcacagtgcgtggtggcagctatccccttttgggtcatcagatcgactgcgtgctgcagcgtgttcacaaagaaccgtacatcccgcaccatcgggatcgtgcggcggcaggggctggggctgcccggggccgccaacatctggtccaccagcctgtcggcctgccgcacgctcagcttgtcgcgggccatcttctccagcgccggggtgcggcggctctccggcaggcgcagcgctgcgcgggcatggcgctcgctcaggtggttggccgtgcaaagctgctgctgctcagctgtcagggtcaaaaggcgcagcttgttggccagcgcgggctggctcagtcccagacggcgggcagcctcggcctgggtgcagccccacagccggatgacctccttgatgccgcgcgccgtgtcaaacgggtccagctggctgcgctgcagattttcaagcagtcccagcgcagcggattcgctgtcgtcatagtcggcaaggatagcgggtaccttttccagcttggccagccggcaggcacgcagccggcgctcccctgccacaagctgatatttgcggatgccgacccgccgcacgctgatgggctgcagcagcccgttctgcaagatgctgaccgccagcgcagcaatctccggctcatcaaaggcggtgcgcgcctgatagggcgacggctcgatgcaatccacaggcagcatcaggatgcgcccctgcttctgtatatcattcttcggcaatttcgtttcctccccctgggtttactgcgtgtctgccgcaaaggcggcccacaaaaatagctatgctttttctacaaaaagcatagcatattttatacgcccgggaaagaaaaatcgttcgcccggttatcctgtttttcgcgttgttacaacggtttttttgcgatttttccgccgtttcgggggtaaacggtcggagtctgcgatatttttctgcagaataccagcccgcgtgcgctgccgtccggcagggtgaactggcgcgtttcctcgtactgaccgcccagctttttcagggcgttggccgcggccttcgcctcggcgtctgcctcggggcctttcatggcgatgaagctgccgccgaccttgacaagcggcaggcagtactcgctcaggaccggcagcgccgccaccgcgcgggcggatgcaacatcaaactgctcgcgccagattttgcgggcagcctcctcggcgcgctccttggcaaattctacgccggtcagccccagctcggcgcaggcatatttcaaaaagtccacccgcttgccggtcggctccatcagggtcagcgccagatcgggcttgtagattttggccacgatgccgggaaagcccgcaccggtgccgacatccaccagcttgccctgcacctcgggctgagccgcaaacagcagactgtccgcaaagtggcggtcctcaatgccctcagggctggtgatggcggtcaggttgaccttttcgttatagctgacaagcagctcggcatatttgtccagcaggtccagctgggtgccggtcagggcaatgttccatgtggaacatttagcttgtaatctgtttttatcaatcatatcgtctccttggcttccccctcgggggaagctgccgcccgcaggcggctgatgagggcagactgtatgtggctgcccggttgcgggtgaaattgatatactcggccctcatccgccctcgggcggggcctcgggcaccttccccctcgcgggagaaggctcacttcctatccttcaaaatcacaatactcagctgcgccaaatcgctcggggatacgcccgggatgcggcctgcctgcgccagcgtgcgcgggcgaatcttcgccagcttttcgcgggattccagcgtcattgtctcgatcggcgcatagtcgaaatcctccgggatgaccacgctctcatgccgctggatgtcgcggatgatgcgctcctcccttgcgatgtacccggcgtagcggatttccgtttcgatgcgctgcgccatggcaggggtcacgccctcgccgcggccgatgacccttgcgatcaggtcataattgatgtaggggcggcgcatcagctccatcgctgtgccgccgatctcgcccagctcggcgccctcgggggcagcggcgcgcaggtcggccagcttaatgctggttgtttccagccgcttcagctcggcctgcttgcacgcgcggtcacggcagaacaccgcccaccgcgcatcatcgaccagcccgtattcccggccgatgggggtcagccgctcatcggcgttgtcctgacgcagactcagccggtactcgctgcggcttgtcatcatgcggtaggggtccagcacccccttcgtcacaaggtcatcgaccagcgtgccaaggtagcttgtgtgccgcgccagcaccagctcgtccctgcccagcgcatggcgggcggcgttcaagccggccagcagtccctgcgcggcggcctcctcgtagccggaggtgccgttgaactgccctgcaccgtagatgccgcccacgaccttgctttccagcgtgggcttcagcgttgtggggtccacgcagtcgtactcgatggcgtaggccgggcgcatgatttcaaggtgctcaaagccgcgtatcgtgcggtacatctcgttctgcacagcctccggcaggctggaagaaagcccctgcaggtacatttcctcggtatcctcaccgcaggactcgacaaagacgggatggcgctccttctccttaaagcgcacgaccttatcctcgatggacgggcagtaacgcgggccgacgccctgaatatccccgccgtagagcggcgagcggtcgagattgtcgagaatgaccttgtgggtctcggggttggtgtaggcaatgtagcagttgaccttgttgtgcatcggcgcgcgggtcataaagctgaacggctgcagctcgctgtccgggtcaccgggctgacactcaagcttgtcaaagtcgatgctgcggcggtggacgcgggccggtgtgccggtcttgaaccggcgcagcgtaaagccgtgcgcaatcaggtcgcgggtcagcgccgtagcggcatgggtaccatcggggccgctgtcgcagtgcgcatcacccacaaaaatgcggccgcccagatttgtgccggtcgcaaccacgaccgccctgcaggcatagtaagcgtgcaggttggtgtaaacgccgcagacctgcccgtcctgcacatcaatgccgacgatttctccctgatggatgtcaaggttgggggtcttttccagcgcgtgcttcatccagatatggtatcgcttgcggtcggtctgtacccgcaggctgtgtacggccgggcctttgccgcggttgagcatccggctctgcaggtaggtcgcatcggcggcaaggcccatcaggccgcccagtgcatcgacctcacgcacaagatgccccttggccgtgccgccgatggacgggttgcagggcatattgccgatgaaatccagcgacagcgtgaacaccgccgtccttgcccccagccgtgccgccgcgtgggcagcctctattcccgcatgccccgccccgatcacgatgacatcgtaggttccgagtttatccatatactttccttcttaccctatcttttgcagaatatcctcgcagactcctgcgaaatttgtatccagttcattgttgccatagcgcagcacgcggcagccaatgctttgcagatacgccgtgcgatgtgcgtcatactcagcagtctgtggttcggtatgctgtgctccatccagttctattaccagtttacacgatggaaaataaaaatcaactataaaattgccaatcattttttgacggtggacagtttgcgggagatttttcagaaagtcataccacaggtgtctctcctgcggggtcatttccctgcgcagtttttgtgcatttgcgcgcagcggatttgccgtttt

SEQ ID NO: 14263 - DNA, 16092 bp, Unknown
  gut microbiota DNA sequence
gaccccgcgcaccccgctaaattctacatggtatcggccccggcccactgcagctatgagaataagctcatcaccatcgagcaggccgccaagcgccccctcggctctgtggagacctgcaacaagcgcaccatcaaccagtttatccaccccagcgtcctcaagacctgccagctgtcgatgggtatgaccgctctggagccgggcagcaactggaacaccatgcccagccacacccatgagcgccgcatggagatctacacctactttgaggtccccgagggtcaggcggttttccacatgtgcggtgagcctacggagacccgccacatcgtcatgcataactatgatgctgtcatcagcccctcctggagcatccacagcggcgtaggtacatcgaattacacctttatctgggccatgggcggcgagaacatggagttcgatgatatggataatatcgccacaaccgatttgcgctgatcgcaagaaacgcacatattttgcgctggtttgcgcaagatatgcgcaaccattcactttgattctcgcgccccggcaatgggcgctggaatatatgactgttacaaactttaggaggttttgcatcatgtctgtttgcaccccgaaatcctttgacctgaccggcaaggtcgcgctgatcaccggcgcatcctacggcatcggctttgccattgccaccgctatggccaactgcggcgctaccatcgttttcaacgacatcaagcaggagctggtcgataagggtctggctgcctacaaggaggccggcatcgaggcccacggctatgtctgcgatgtcaccaacgaggatgccgtcaatgagatggtcaagaagatcaccgccgaagtcggccacatcaatgtgctggtcaacaacgccggtatcatcaagcgcatcccgatgatcgagatgaccgctgcccagttccgtcaggtcatcgacgtggacctgaacgcaccgttcatcgttgccaaggcggtcattcccgatatgatcgagcagggcggcggcaagatcatcaacatctgctccatgatgagcgagctgggccgtgagacagtctccgcttatgcagctgccaagggcggtctgaagatgctgaccaagaacattgcctccgagtacggcaagtacaacatccagtgcaacggcatcggacccggctacatcgccaccccgcagaccgcgcccctgcgcgagatccagcccgatggctctcgtcatccgttcgaccagttcatcgttgccaagacccctgctgagcgctggggtgaggccgaggatctgggcggccccgctgtgttcctcgcctccgaggcttccgacttcgtcaacggcctgattctctacgttgacggcggcatcctcgcctacatcggcaagcagccggggtaaaccgacataagaccgccatagtttgccaatgtcgcacaccttcagaaatagcttttctgatgcccttcaccttataaaaaagtccgttttggcctgaaaccaaaacggacttttcctttattttagtgtatgtttacaactcaaccgcgccgggtagcattagagatgctttagacacgggtcacaagggtctggcagctgccctgcacggtgtagctgccactgttggcaggcaggaagtagctgtcgcctttcttgacggaaaccgcctcaccgccgcaggtaagtgtcccctccccttccgtgatgagcagcgagacaaagctcttttcgtctaccgtatccgcaaaggcgccctttctggcatccacggtgaaatactcacactgggcaagatgctcgccgaaatcatgcttgacgggcggggtgcgcagggtcacatccagcgcctttgccacatgcagggcacggggcttgccgtccgcaccgacacggccgtagtcgtagacgcggtaggtcacattggaattctgctgcacctcggcaacgacgatgcccttgcagatggcgtgcagcgtgccggacgggataaagaagcagtcccccttatgcaccggcacagcattcagcacctgcgtcagggtgttgtttttaatgcgctcctcaaattccgtcttggaaatctcgtggtcgaagccgtagtaaagatatgcgcccggctcgcagtccagcacataccacatctcggttttgccgtactggtgttcatttttcagtgcgtaatcgttggacggatgcacctgaatggagaggttattcttggcatcaatgaacttcgtcaggatcgggaactgctcaaatttgtcgcagtcggtgccaaggcagccggggtgggcggcaagataggccgccagcgtggtaccgtccggcaggtaactcgggccgtccgggtggcaggaaagcacccacgcctccgccagcggatcaaggtcgctcttgattccgaaatccgtgcgcaggcggctgccgccccacagataatccttgcagctgggagtcagcttgattattgccatattcttcacactttcatcatagccgctgcggcctcggccagtgcggcattcacagcatcagcggcggcctcgctctcgcccacggcggacaggtagaccttgatcttcggctcggtgccggaggggcggaccatcagcttgtggccgcccgcaaggtggtattccagcacattggcgcggggcagccctgtgccatcggtatcgtaatccactgcgctatccaccttgtagccggcgatctcggccggcgtgttggcgcgcaggttcttcatcaggttctgcatcgtgtgcataccggattcaccctcaaaggcaaagctgcacagagcgttgcggtagtagccgaactccttgtacaatgcctcgatagcgtccaacagcgttttaccctgctgggcataccatgcggctgcctcgcagacgagcaaagttgcgttgacggcgtccttgtcgcggacatgcgcgccggacaggtagccatagctctcctcaaagccgaagatatagcggtcagcgcggccctcggcctccagcttgccgatctgctcaccgatgaatttgaagccggtcagagtgcggcgcagctcgacaccgtacttttttgcaaccggcgttgccatatcggtggaaacgatggtcgttaccgccacggggtccgcaggcatcgtaccctgtgcaaggcgggtacggcagatgtagtcgagcaggataatacccatctcgttaccggtgatgagccggtagccgcccttgccgtctggcacggcggtgccgcagcggtcacagtccgggtcggtgcccagcagcagatcggggtggaccttgtcgcacagctccaagcccttctgcatagcctcgcggatctcgggattcgggtaggggcaggtcgggaagtcaccatcgggcttttcctgctcgggcacaacggtcacatgggtaacgccgagcttttggagcagcttgttgacacactcaaggccggtgccgttcagcggggtgtagacgagcttgagcgcgtcaatgcccgcgccgtcaccgacacgctggtcatagacagcctgaacaaagtcgtccagacacttgtcatcaatcatgacgatgctgccatcagccagcgccttgtcataatcggccagcctgacgccgtcaaagcagtcgatcctctcaatcgctgcaaggattttttcggcagcttccagcgtgatctggcagccgtccgcgccgtagaccttgtagccgttgtacttggcggggttatggctggccgtcacgcagacacccgcgccgcagccgagataccgcaccgcccacgaaagcgccggggtcggctcaaggcgggggtacatataggccgtgatgccgttggcggccagcacgcgggccgtctcgcgggcaaacagctcaccattatggcggctgtcgtgggcgatggcaacctttttgggcagattggctgcgttcagatagtccgccagcccctgcgttgccttgcggacggtatagagattcatgcggttggtgcccgcaccaatgacaccgcgcagaccaccggtaccgaattccagatcacgataaaaacgatcggtgatagcctcgtcattcccggccacgctgacaagctccgccttcatggcatcgtccaaatccggctgggccagccagcggttatacagttcttttgcgttgctcatgcttttctcctttacatgacacattacagggcggccactatacggctgtcgctgtgtatccctattatggattacttttccactttttgcaagtaccaaatcttcgccgggacctcaccgaaatccccgggcagcgccagtcccagcgcgcagccgagtaaaaacagaggcataataaatatacacccttccctcctcgtccgcaaccgccccgttggtaaaaacggcattgccattgtacaagctgcgcggcgcaagcggcgcagaatttgactgtttgatgttgcagggagtccggcgtcatggtatactcatggcgtaaggctccttttcaacattctgtgcgcgtaaaagagagtttccctatgaatgggaaacgcacacgccgtctgccctgctatcataagccacacgaaatcaataccctaaaaaaccacacaggaggtaaactgccttgatctacaaaaagcaatatggtcacccatttgatactgagagtgtagtgggtgccttctcacccatgatggaaacgattccgcatctaaccaaggagccggatggcttttcctatgctatggattcgcaggacatcctgtatggtctgggcgagaatatccgcggcattaacaagcgcggttgggtgtacgaaagcaaatgctccgatgaccccaaccacaccgagagtaaatcctcgctgtacggtgcttataattttatgatcgtgtccggcaaagacaccttcggcttttttatcgactaccccggtaaggtcactttcgactgcggctacaccgaccttgacaccctgcgggtcacagtggccgaggaaaattacgatctctacatcatagagggcgaaagcctgaccgacattgtgcaccagttccgccagctggtggggcgcagctacattccgcccaaatgggccttcggcaacacccaaagccgctggagttacatgaccgaggacgaggttcgagaggtagtggccaattaccgctccagcaatatgccgctggatgccgtggtgctggacattgattacatggagcgctacaaggactttacggtggacgaggagcgcttcccgcattttgcagactttaccgccgagatgaaggctcagggcatccgccttgtgcccatcattgatgcgggcatcaagatcgaggacgggtatgatgtgtacgaggaagggctgaaaaacggctacttctgcacgaatcaggatggcaccccctttgtcgccggtgtgtggccggggcgggtacacttccccgatatgctcaacccggatgcccgcgtctggtttggcggcaaatacaaatttctgctggatcaggggatcgagggcttctggaacgacatgaacgagcctgccatcttttactctgaggaaacactgaaaaagacctttgccaaaattgaggagtacagcaggaaaaaccttgacatttccagcttttttgcctttaccggcatggtggcagggctttccaacaacgaaaatgactataagctgttctaccacaacaccagacagggccgtatgcggcacgacaaggtacacaatgtttttggctataacatgacccgcgctgccggcgaggcttttgagcggcttgagccggacaagcgcatcttgatgtactcccgctcggcctgcatcggtatgcaccggtatggcggcatctggaccggcgacaaccagtcctggtggagccacattctgcttgccctgcacatgatgccctccctgaatatgtgcggtttcctgtacgaaggtcccgatattggcggctttggcagcaacgccaccgaggatctggtgctgcgctggtacggtctgggtatcttctctcccctgctgcgcaaccactctgccaacggcacccgcaggcaggagccctaccggtttaagaataaggccgcctttgccggtattttgcagctgcgctacctgctgctgccctatatttacagtgaatacatgaaggccgccctgcacgacggcatgtactgtatgccgctggcctttgccttccctgacgatgactttgcccgccgggtggaggatgaggtgatgattggcgaaagcctgctgattgcgcctgtatatgagcaaaacgcccgcggccgctatgtctacctgccggaggagatgctgcaggtacgggtaaagtgcagcgaaggcaaccgcatcgaaaacagcgtactgcccgcaggccaccactatatcccggtggagctggacgaagtggtgttctttgtgcgcaaggggcacattcttcccattgccaagggcggaaagagcatccggaatgtggctgatgtggattttgcagacctgcgtctgcttgcctacgccccccatggtgcctcttatgaatactataccgatgacggcgagacaaaggattacgacaagccggagcattttgtgcatattacgctggatgcagaaggaaacgcaaagtgcgatggtgctacggtcaaaacggtattgccttaaaaaatccgccggggatgcctcccaaaacgggaaggctccccggcggtattcgtttataggttgtattgcagtctgttggtcgtttttatgtgcgacaaccttctgtgtgcatcaaaggtatttccgcagggtcggcacaagaacattcatattgatcggctttgcgacatggtcgttcattccgacatccagcgccatctgtctatcttcggaaaaggcattggccgtcattgcgatgatggggatattcgctttttgggggtcgtccagcctgcgtatttttcttgccgcatcgtagccgttcatcaccggcatctggacatccataaggatgatctgatatgttccgttcgcagctttttccagcatatccacacattccacaccgtcttttgcgcggtctaccgtacagccttcttcctgcagcaactcggtggcgatctccgcattgaggtcgttgtcctcggtcagcagaatccttgtaccgcacaggcactttttgtccgaggggttgatttctcgttttgcctgtgcttcctcctcggacgcaatgcggcagggaatggtcacggtaaacttggagccagcaccgattttgctctccacctccacagtgccgttcatcagtccgaccagctttttcacgatgcccatcccgatgccgctgccttctaccttgctgacggtggatgtgcgttcccgttcaaacggttcaaagatatgcttctggaactcctgcgacattcctatgccgttatcggcaaccgtgaccaccgtatcgcaccagcccgctttttcgccgggcttctgcgtaacatcgcagcggatcgtgccgccggctcccgtgtatttgacagcgttgctgacaaggtttgtacagacctcagtcatgtgcggaatatccacataaatatacggatactgcagctgtgttgtcactataagcgtctgccccttgctgtctgcctgattccggaacatggcaatgcaattacggaaatccttctcgacatccgaaaccgaatactccatctccgtcttatcgttctcgattcgggcaagatccagaacattgttcagcagcatcagcaggttctgcccgcacacctgaatgttctccatgtattttttcagctttgcagggtcgtccaaatgccgggaggcaaggtctgcgtaaccgataatggcgttcatgggcgtgcggatgtcatgcgacatattgaacaggaaggtggatttggcgcggttcgcgctctcggcgttttctacggcaatctgcagctttgcattcagctcctgcgtatcgtttgcggctttccttgcagcagcttcggctttacgcgccttccggagcagcttcaggatcgtgagcagaatgactgcaaccgcaatgctgctgacctgcagaaccataaagaagttatcccttaaaaactcgctcagggtaaccttccgcgaggcgctcttatacatcgccagagagccggtaagcatattggtcggcatggccttgatcgttttgttcaggatggacagcaggctgcggtttccgctattgaccgcaaagcaggatttggcagggtttggcagcggaacgctgtaaaaaccatagttcttgctgtatttcgcctcgctgctgacccctgtgacaaaacagtctgcctgtccgtccttgaccagctttatcgcatcctcctgtgtatcgcagtccacaatttcccactgcggataataaaacgcaaggtaccttgctagggagatcttgttttggggaacggcaacgcggttcgctttgttttcgttaaaatactctttgttcgtgacagccatcatattggcggtccacgttgtgttggtgcaggcaacgcgatattcttcagccagattaggactctggtcgaaatggaaaaccatgtcgatctcgcctgatttcagcgcattgagttccgcctctttgtcgtcataaccgaccaaatggaattccagctcctgatttcccagacaacctctggcaaactgaacatagtccgttattgtcccggtaatctccccggtggcagggtcataggtgctgacgccgctgtcactcgtcagaaagcccatccggatcgcaccgtgctctttgagccacgccttttcctcacccgtaagggcagggatataatccagcgagaaatactttttatagagatccgccgtataaaaaggatcagcgtcctccaacgcgcgcatcgcattgtccagttcttccttgagatcagaacggtctttgttgatcgcatagtagatgccggagcttcccacgcgggttatggtcgagatgccaagctctgtccagaaggactcttccagtgaaacaaagcagtcgatctcgtggtttgccagcttttgcttcgcatcctcgttgttggcgatgttgacgtgctgcgttttcaggccgtatttttcttcccattcggtcagcatcacctccgactcagctcccatcagaacgccgattgttttgccgttcagcgttttgaagtcggaagcggtgatgtcctcgcgcgagagatcggcgtagaggtaatatttttcctcccccatcggttcgtccgaaaacagcatctcctcagcgcggtcctctgtataagaaatatcgcccatgatgtcgatttcgccgtttttgagtttttcaaagcagtctgaccagtcgcaggtcacatattcgaactgccagcctgtatagccggataaggtctgcagtaattcgtagccgtagccctttcttgcgcccttctcgttgacatagttgaaggtatcctcaaacgaaccaacgcggacgacctttgccggggcggcttctgcggcggccttcacagggagcgcgactgacagcaacagcagcaggcacagcatcgcacagacgcttttccgtgtcaggatctgcatagctttgcacgttccggagttttccattcttttccatctttctccgccccaggcggtcgtattttgacttcatttccgtaccgccgatttcagaaagggcattgcagcattgatcccgtcagcttgtcagcagcttttttgaacagtttatacctatgagtcaatatgtattatagcattgccatggaaatccatcaagaattttttcgctatgcaggtataaagtcacatccaccggcagggcggtaccgtgccttttcacagattttttccgttcgtttcggctaccttggcgtaccagacagcgctgtccttgggggttcgtttgccggttgcgtaatcgagatagatcaggccaaagcgctcgttatagccctcgctccattcaaaattatccagcagcgaccagtggaaatagccgcgcacatccacgccgccgtcaatcgcacggcgcagcgacaaaagatagcggtggatgaagtcgatgcgcgcagggtcatgcaccatgccgtccagatggatgctgtcagtgcaggaaatgccgttctcggtaatatagataggcagaccgtaccgctcccagacaaagcgcgtcccccactccatcgactccggggtgacgggccagccgatggctgtgcgcgggtgccctgcggctcgggggcagaattccggcttgccgtttgcgccggcgcgcaccatgacggagttgtagatgttcatcccgatgaaatccagtcggcccagcggcagagcgtccagctgctcctgcgggatggcgtccaccacacgctgggcctgaccgcccgcgatcacaggccagccgcgcccgcacagcggatcaagtgccggggtataggtgaaggtccagtctccgtccgccagcgcaaaggttgcctcgcgggccgccgcaatatcggcaggatcatctgtcgccggggtgcagatgcgccctgtcggggccatgccgacccgggcatcggggtcagccctgcggatcgcatcggccgcaaggcagtgggcgtagatcgtattgtgccacgctgtaaacaccgcgccgtcatccagacggaagccgggtgcgtgtacgccgctgctgtagcccaaccccacgctgcactgcggctcattgagggtaaaatagtaccgcacccgccccttaaagtgtgcggcgaccgcggcggcatacccggcaaaggcttttgccgtatcggcattcagccagccgcccttgtcctgcagggcctgcggcagatcccagtggtagagcgtgacataaggctcgatccctgccgcaagcagcgcatcgaccagccggtcataccaggcaaggcccgccgggttgattgcccctgtgccctccgggaagatgcgcggccaggcaatcgagaaccggtacgccttcagatgcatctctttcagcagtgcaatatcctctgcccagcgatggtagctgtcgcaggcgatgtccccggtatcgccgttccttgttttgcccggcgtatggctgaaggtatcccagatggacagtcccctgccatcctcctgcactgcgccctcgacctgataggctgcggtcgccgcgccccagacgaaattttcctgaaatgacatcgtgtattcctccgtattctgtcggttgccttttccgcataaacacctaaaaaggtgcagcgcaagcgcactgcacctccgtaagtgtaattttaccctttcacgctgcccaatgcaacgccccgcacgatatattttgagaggagcagatagacgatcataacgggcagaatcgcaatggtgatcatcatatataccttacccatatcgaacttcaaaaagtccgcgctgcgcagctgtgcaaccagaatgggcaccgttttccacttggcatcgttgatgatcagcgccgggataaagtagttgttccacgcgcccacaaagctgaatatcgcctgcaccgccatggctggctttaggataggcagaatgactgtgttaaaggtatggaactcccccgagccgtcaatgcgcgccgcgtcaataatgtcgcgcggcaggctcgaatccatatactgcttcatgaagaagaacaccgtcggcgcggcgatgctcggcaaaatcagcggccaaagggtattggtcagcttcatcttgtccatcaggttcaaaaagccaagcgccgaaacctgagtcggcatcgtcatgatgagcagaataacggtgaatgccagcttgcgcagcttgaagtcatacgcatagatggcgtaggccgtcagtgcgctgaaatagaccgacagcgccgcgcaggcagccgacacgatcaggctgttgcgcagaccggtcaggatcggtacattggcatcatgggtggtgttgaagaagttgacgccaaagctgccgcgtggcagcgggtcaaacccctgctggatggtaaagttgttgtgcgtggcgttgacgatcagcacatagaagaagaacaggcagataaagcagaggacaaacagcacgatataggccactgcacgctgcagggtcagcatagggtcgtgaattttgcttgcctttgcggtagtggtggctgcggtttgggtcttgttcggcatactgttcacgctccttccttagtgatgcttagcggccgctttggctgccttgatgcgggctttctcagccttgcgctgctcacgggtcaggccgtcatcctcctgcgtgagggtaaagtagatgatgacgcaaagcaccgcgcagagcaggaacatcagcaccgagatagcaccggctgtgccgtagtttttgctgtacagatgctggttcaggtacatgataatggtgttggtcgagccgttcgggtcgcccttgccgttggtcaaaacctgcggcacatcaaacatctgcaggccgccgatgagactggtgatcagcgtgtagacaagcagcgggcggatcagcgggatcgtgatgcgccagaacattgtggtcgaggatgcaccgtccagctgggcggcctcatacaggccggggtccacacccatgatggcagccatcagaatgatggtcgtattgccgaaccacatcaggaagttcatcagcccaaccagaccacgcgctgtccagacattggaaagccagcgcaccggctcggccacgatgccgagcttgagcaggatcgagttgatcggccctgtttccgagtttgaaaacagggtaaagaacagcatggcgaacgccgatgccatgataaggttgggcatatagatgaccgtcttgaagaagccctgaaaccgcagcttcaaccgcagatcggtaaaccatgctgccagcaccagtgatacaatgatctgcgggataaagcccatcagccacatgatcatggtattgctgaagtatttcggcacctcccggatcatagcggcatagtttttcagccctacaaagttggggccgatgatctttaagccactgcggaaatattcaaagaaggaatagtagatggtcgttgccagcggccagaactggaagatgaaaaaggtgataaagaacggcgctaagaagatgtagccccacttggcgtagctcatgcctttacgtttggttttcacaggtctcaccctccttatcgggcgttgccccacgaagggcagggcctttacaatacaaaaccgagggcgggcgctgacccgcccccggcgtggcttgtgttataagtatggattccgttttgcggtgcggtcagcgcatcaggcaggccactcgacgctgctcagctcaggatacttgaccttgatctgatcctcaaagttcttcttcgcggtctcaaggtcaaccgtgccgtcaaagtaatccttgaagcagctctggaaggtttcgttgcagccctgatcatacggaccggcgttggacatatcaatggtaggtgcaacctctgcaaagagggcaatgtggttctggccgccgaggaatgcggagccgaaattcgggtcagctgcaatggaatccatagcgctcttgcagttggtgtagtcctgcgtatcctcagtaatcttggtcatgatgtcggcatcacaggtcagagagtacatgacatccttgatcgtggggatgttgtcggtaccggctgctgcgcagatccatgtgccgccccagtaatacggctgagggccctggcagaccgcgtaatcgccgaagataccgttgccgacttcctgtttgcctccctcagactcaggcgtggccagagagttgcccagcagggtgaagttgatgccccaagtggagtagaagaagccgaaaaccttgccggcagggccctgatcggcggcccactggtcgctccacagactggtcttgttgttgtagccgttatcggtgtaggtcttggtctgatcgacccagttcatcatattgggatcgaccttgacggtcatgccgtccacccaaccggcagaaacattgttggagaaggtgcggtaggaatcatcgtagccggaaagcatcttgtagcccttggcagcggccttctccgccacatcgttgaacttatcccaatcgctcagtgcggcctgaacctcggtcggatcatcggtgcccagcacatcctcggcgatggagcggcggtaggcaaacagacccggggttgcctgccatgtggtgcccttctgcacgccatccacggtaacgatgtccttggtgtactggtactgatccttgaggtcatcatcggttaggccgacatccttcttgacatccagcgtatattcggaatccacatacttcagcgcgtagtcggcctcgatcaggaagatgtcgattttatcatcggcagcggcgctgtcctgcttgagcagggcctcgtccagcttattctggtagttgttgttatcgttggggttgatggtccactttacggtgacaccgttatccagcgtcgtggtggacttgtcggcggcgatctccttgacgccggggtaatagtcattgaagcgggactggaattcatcgttccagcaccagatgttcaggaccttgccctcctctgcggccgcatcggcagcaggctctgcggccgtgctgctggcttcggcagaggtcgaatcagcggcaggggctgcggacgagcttgcggcgcctccgccgcagcctgccagcaaggtggctgccattgcagtggcggtcaataaactcattgcctttttcataatgtgttttcctcctttttaaaaagaactcatgtatgaatcagatattgtgacccgcatcccagcgggtttgaacctatggattggggacatcgacggactgccctttcagcaggctgccggagatcagcttctgctccggcaatgccgtgcgcggggattctatctgctcgataagcagctctgctgcggcgcggcccagcgcttcggtgtcctgccggtaggtggtcagctgcggggacatgatctgcgagatcaggttgccgtcatagccggccaccgaaatatcccgcgggatcagaagcccttcctcacggatggtctggatgccgccgatggcggagaagtcatccggaaagagaatcgccgtggggcgctgcggcagcgccagcagctggcgggtcgcagcggcgcagcttttcgcatcgcggtaggtgctcggcacgatgtaggcatccggcaccgtgatcccatgggcggcgcaggcgcggtagaaaccgaccagacgcttctgggtgactgcgctgtgattttctccgtggatataggcgatccgctcatggcctaaggcagcaagctgatccaccagcttgtgaacaccgtcggtgttatcggaaagtacagcagcccggttgttaaagacatggtcgactgtgacgatcggcaggttgctgtaggccagttcaatgacctccgggtcatcgaacttgatgcaggcagcgatcacaccgtcaacgccgcggtagcggcagtgctctaaatagctggagtggccgtggccgatgttgtggttgataaaggtgatatcatagcctctgccctcggcgtggcgtttgaagctgtccagaaccgccgcgaagaattcatgcgtcagaccgctttgtgcctcgtccacgaaaaggacgcccagattataggtacggttcgtttttaaggcccgcgctgcggagtttggcatgtagccgatctgccttgccgcctcgcgcactttttctttggtggcctgactgatatcgttgtgaccgttcagagccttgctcacggtagccaccgagaccccgcatgcctttgcgatgtctttgatggatgccatggtatcgcctccttgcatcttccttaatcgttttcgcatcttcactatacaacatgtcaaccataaaatcaatacctttttgtcattttttgtgcatttcgattcgatttggcgatttgcaaaaagcgaaaacacctgttttggttatttcgtttggagtttcgctgaaaaagggac

SEQ ID NO: 14264 - DNA, 1020 bp, Unknown
  gut microbiota DNA sequence
ttttgaacagcgcggcatcccgacacgggttttgcgctccgaaaagacctatctatcctgcttttaccatgttgtcacacgaggaaaaaccaaggggatgctttcgggattccctctgagtgggcgctgtacaattcagcgggattgcaagctgccgccgatcaaggcatatcagaaggcattgcccccggacacggtgcagtacatcggcatcgccgcagatgaacccaagcgactggcacgattaaagcccggtcagatttctttgctggacaagtaccatgtggccgaaccagaagcgaggtctatgtgcgcagctgaggggctgctgtccccgctgtatgacttcactaaacgcgggggttgttggttttgcccgaacgcatcaatcagcgaactgcggcatctctacagataccaccccgaactctggcagcttttgcttgaattacaggacgtgccgaataaacccaccgaacgttttagttggcggcgaacttttcgtgagatagacgaacgctttcggcaggagggcgaacaactaagtttttatgaggaacggtgaacaatggacgaacagaaaagaccccgcgcgtgggtgtacgcgcgtattcccggtgactatgacggcacaatgaacagctataaagtttgctcaatgcaggctctgcatgacggctgtgatattgtcggtggaagcattgacgagcgcggcggctggctgctgcgtcccggctaccgcgatatgatgcagcagattaagggtggaaaagttgaccgcgtttatatctgccgtatgcggcagatcagcggcaaggagcgccacttgcactcttttttcaagcggcttatgcagcatggggtacaggtcacggccaccgagtacagcttgcgtgaccgggttaatatgtttcggctggctcgtcgtgtcgaacgttatgcgaccagaaaaggtctgcggctgccgtggtgattgtcagcgggcggcgtactgtgcctatggcacagtacgagcaagca

SEQ ID NO: 14265 - DNA, 391 bp, Unknown
  gut microbiota DNA sequence
ttaacccaacatctcacgacacgagctgacgacaaccatgcaccacctgtctctgcgtcccgaaggaaacacatatttctatgtgcgtcgcaggatgtcaagacttggtaaggttcttcgcgttgcgtcgaattaaaccacatactccactgcttgtgcgggcccccgtcaattcctttgagtttcaaccttgcggtcgtactccccaggtggattacttattgtgttaactgcggcactgaaggggtcaatcctccaacacctagtaatcatcgtttacggtgtggactaccagggtatctaatcctgtttgctacccacactttcgagcctcagcgtcagttggtgcccagtaggccgccttcgccactggtgttcctcccgatatcta

SEQ ID NO: 14266 - DNA, 1232 bp, Unknown
  gut microbiota DNA sequence
ggcagtaagtttgattatgggcttcatacgggaaaacggaggatactgctatgaaaaccatctatcttgtcaccggtgctgccggatttatgggcacaaatgtctgcgcacagcttttggagcgcggcgatgccgtgcgcgcttttgtgctgaagggcgaccccgctgtaaaatttgtgcccaaggccgtcgaaatctttgagggcgatctctgcagtgccgaggactgcgagaaattctttgccgtggagccggacgcccagaccgtctgcatccactgcgcgagtatggtgacgatcaacccgaattatagtgaaaagctgatcgccgtcaatgtgggcggcaccgaaaatatgctgaatgccgccaaaaatcaccctgagtgcaaaaagttcgtctatgtttccagcaccggcgccatccctgagctgcctaagggcgagagcatccacgaggtatacagctttgttccctacgatgacgatcgcgtagtcggctggtacagccgcagcaaggcaatggcgacccagaaggtgctggacgccgccgctgacgggctgaatgcctgcgtggtgcatcccagcggtattcttggccccaacgaccccgccatcgggcagacgacccgcacgctgatccagatcctgaacggtgagatgcccatcggtatgcagggaacgttcaatcttgtcgatgtgcgcgacctggctgccggcacgatcgccgccgctgaccgtgggcgtaagggagagtgctacatcctctccaatgatgaggtttcgctgaaggagctgtgtgagatgctcaaagctgaaaccggctgccgtggctgcctgttttacctgccgctgtcgcttgcccattttgccgccaaacagatggaagcccgcgcggccaagaccggcaagcccgctgtgctgacggagtttgccgtttacaatctggagcgcaacaaccactttgactgctccaaggcaaaaaatgagcttggctttgccccgcgtccctacaaggaaacactgcatgatctcgcggtatggctcaagcaggagggaaaaatcgcatgaagaagctgtatgattctatctgcaagcttatgcaaatgaatgaccagcagtgggagtgctatcttcacgctctggattccctgcactgacacagaggataagaggttgtacattatgaaaaaggtatgcgtcatcacaggcggcggcagcggtatggggctttct

SEQ ID NO: 14267 - DNA, 1398 bp, Unknown
  gut microbiota DNA sequence
tttttatcttgcatgtatttatcatttgaaatcactgtcatcctttaccacaaaaaagcagaggtctgcaaattgcaggcctctgccaaaaaatgcttagacatcctcaaagacagacatatcaaacttaaacacgccagatggatctaaagctgcgagcttctgcttgccagccgcgataatcaaagcgctgttttcaaccgtatcattataaacaaccgtgcgataatactgtgcagacttcctttcggttgctttttcaagcaactcggtaaactttacacacagtcccaaggcccatgttttcagcccggcattgtcatgaatgatccggtttaaacaatccagcgtttcctccgcctgatcccgcttattgccatttgtcagaattttagccgtgtatgtgaaaatatcattgcagatatttttctcgttgtccgacagcttatcctcatacgaaagatagtcagctttgtttctgatctctgtagtcgcttttctgtacttcatttccagaatatctgtgccaaacggctctgtaatatgctgcgcagcgttttccgcgttctgggttttcttctttctggaatcccttacaatttcatcatcatgcgtatttctatcgtgataggcgcggacattcttcatttccgctttggtcttatatttgatgaaaatatacaggtattcatatttgcgaacaccgcgcttgcgtgccggggcatagtcaaaccagagatccgtcatctcattgatttctgtcttaactgtctttaaaacattcttttcaaactctgtaaaagtcttgtacttttcagacagcggtttttcccggtcgaactttttcttgtctgcagatgccgggtcctttttctttttgctctttgtggactctctctctgcctctgtgggtgcagaaagcaggcccttaaactcatcaatattgaattttttatacttgtaaccggtcaactcagcacgctttgaggagaacttgttcaaaatctcatcatttaccggctggaatacaaggccgttcgtatagccataatctctgttgccgttgtcataggagagtatgatttcataaacgcgcatcgagtaggtgcttttcatcatcagcagatattctatgctgtaagaggtatagttgctggtaagctgtgcaatatccttccagatatcctggttaaagcgcagtcgaatctctttcttgtcgaaatcgacctcagaacctttttgcagccaggaaatggagcggtacaccttactgcctggctctttctttacccagaaggtacggttttccaaattctcgatagtttccttcagattcagagcataggtagtgtcaaccgtgcgcacgcctgttagcttggcaaaatcgttgaaggtaat

SEQ ID NO: 14268 - DNA, 1717 bp, Unknown
  gut microbiota DNA sequence
cttggatgcatccttatcgtttttctggtcgattttagacatgagcataaagagaaccttttgctcattgcggggcagagagtactttgtccgctggatcaaatcattacttttggtaatgtaagagccaaagccgacaggggagtgctgccatttcgcgattgcttgctttttctcgcggacctcatcatcagaaaggacctctccgactaaagcttcctcgttttcatcaatggacgaatttgttttgttcatatccattatttatagctgtacaagacataaaataatctcgatatacagctatatattcctttcgttagatgttacaattcaaataggtacacaaatatcattatactgataatattactatactatttgctaactgtcaacgaaaaatgtttggagcttttttattttacaagattttgttttttctcttttacaattatttatcttataccttactttttacttatttattataatatgtagaaagagaggtttcaacatgccagccaagaggaaaaaacacttgacgaaagagatttccacaccagaggcaagaggtttaacagtctgtagaaagagattactacagataaattaggcaaaactggcatgtagaaacctcttttttgccgtggaagaatctctgttctcaaagctatttctgcatactgcctgttgcagttactaattgtgcagtgtggaaatctctgttttgcgatagcgggcgtgtttggccgtgcaaacagaggtggaggttatgatagctgctttttccagtgtagaaacctctcttttgctgatcacggtacaaacatgcacccagagaggggaatggataggggagaggaaacggtgcttaaaaatctccggtttttccggtgtagaaacctctctttgctcctgaaatggaaaacgctggcgtctgaagtgggataatatgcatggcgcaggggtgtagagaaaaacaaaaatttcccattctgcaagtgtagaaacctccttttgcttctgcaggcggcatcttggttatgaggtgtacgattttttccggtgtagaaacctccttttagaaattactcatattacactacatattggtgctttagacaagcaaacatacttgttcttgagtaaagcatgctatacagctagaaacaggaaagctaatataggagaaccaagagattgctacatataagcagcgtaagatttttgcacagtaataataaacgatataacgatataaaattgcgccttgaaaaagaagttgagtgcactaaaaagaggtttctacatcaaagaagcggaagaaaacacagccttgtacagaaagacacaaccaaagcatcatagtaatagaaagaggaaaaaacacaatatatagatatagaaaacccaaaaacagggtgagaagaaatgagaaagaggggaaaagcgctattaatataatacaattaggaaatattattgcatagtatactatatgtatacagtgaaaagcgtagattatacagtgaagattcatagtgctgcaaagtatggcataatgcaggcaaagtttttttacggtaatgcgatgtagaaacctctctttgcgctgactccctgaattccagaggaggaaatctcttttttatgggtttatccaatttttcggcagcaatccggcgcaatcatgaaaggagaaaatacggtacattag

SEQ ID NO: 14269 - DNA, 551 bp, Unknown
  gut microbiota DNA sequence
gggggaaaggctatataagattcaattttgtatacgatttggataataaactgttatatatacgatacggactatcaaaactgtgtcaaaaactcaaattttcccgcttgtcaaagtgtagaaacctctcttttgggtaggagtggaaacctacgctatccgaacgaaggtgaatttgagaatggacctgataggtagaaaggcgaatttcgattctgtaggttgtatggcaagagcagaagacaggaaaacaaagcaatgccatcccaaaaaggaagggggatctcaagagggcaggggaggggaccagcagaaggattggctttgcacctgttacaaaaaattatagcatttgagaaaattctgctttgcgatagcagcaaggccaattacattgagagggcaaggtgctgcctggcgaacgcagcaaagaatacaaaaatatggttatagcaacaggaattgacggataatggagagcaaagtacacctagaaaaaaagccgatgaattattgcctgtaaccagtagtcaaagactaagagtgatttg

SEQ ID NO: 14270 - DNA, 1925 bp, Unknown
  gut microbiota DNA sequence
aaaaaggggactgctgtgcgatgaagtacagcagcccttttccattttactacttgcgatgccatactccgggggtgtaaaataaaaggcagaagtaagccgctgcagcggcagggcatataaagacagaggatgtagggtatgaaacgaattttgattattgatgggcagggcggcggcatgggcgcacagcttgcaaagctgctgctgcataagctgcctgcggattgcgaactgctggcggtgggcacgaatgtgctggcaaccagcgccatgctgaaggcgggtgcagtgcgcggcgccaccggggaaaatgcggtggtatataacgccgccagagccgatgttattctgggacccatcggtatcttgatggccaacggcatcatgggtgaggtttcgcccaaaatgtcggtggcgatttccggcagtgaggcagtcaaggtgctgatcccggcgtccggctgcgggatctttgtggcaggcacgcaggactgccgccttgacgagtatctgcaaaatgccgtagctcttacgctgcgtgcgctggacgcatgacgccgctggcaacagccgccgccccgatcctgcacgccgcacagatggccgcagagaacggccctgcgctgctggctattgacgggcgctgcggcagcggaaagtctacactggcggaatatctggcggggcagttgggctgccgggtggtgcataccgatgatttctatctgcctattgccgcgcgctgcgcgaactggcaggagcagcccggtgcgaatatggatttcatccggctgcgaaatgaggtcctgcagccgcttttgcgcggggaaacggcgctctataaggcttacagctgcgcggcggggacctttaagccagctgaaccgtttgccgccgcgccgctgacgattctggagggcagctacagcctgcatccggcgctgcagacccaatttgcggtgcgcgtgtttgttacctgcccgcctgatgtgcagacggcacgcctgcaggcgagagaggacatacgctacgcaaattttgtgcagcggtggatcccgctggaggaaggctattttgctgcccatgatccagccgcacgctgcgattttgtactggacacggcggagatttttgtgtaatatagtaagcggacctatggcatgactgcgtgattcccgctatgacgggtttgaaatgatgcagtaatgcccttatgaaaaagccaggaaggcagcgcccagaagggtgcgcggttcaaactttttgataagggtgatatgttgtgaaaaaccagaataccaaaaaattggcttatgcagcgctgttcttggcgctgtgccttgtgctgcccatgctgacgggtcagattccgcaaatcggcagcatgctgctcccgatgcacattccggtgcctttgtgcggccttgtctgcggctggcagtatggtgcagtggtgggctttgttgcgccgctgctgcggtcggtcctgttcgggatgcctccgatgtacccggtggctattgcgatggcctttgagctgctgacctacggcttggttatcgggctggtataccgccgcatggctcaaaagggcgtggcaggggtatatgcagcgctggttaccgccatggtagcagggcggcttgtctggggcgtggctgaggtcgtgctgctgggcttgggcggcaaggcgtttaccgcccaggcattcttggcgggcgcactgctcaatgccgtgccgggcattatcgtgcagctggttctgattcccgccgtgatggcggctctgcagaaggcaggcgctgtcaaacaatacaccgaataaggccgtttgctgagaggctgcgcaggaagcgcagcctttttgctttgtgcagttgtattgtagttcattatagtcatacggcaacaggaatcgccgg

SEQ ID NO: 14271 - DNA, 414 bp, Unknown
  gut microbiota DNA sequence
ctttaaatccctgtaaatctgaagactcatacctgccttgatatgatcgagcacaaagccctcatgtattccacttatattcagcatattatcctcctttagtcctcagccaggccaagcaatgtcagaataagcgccatacgcacgtaaaccgcatactgtgcctgcctgaaatagcatgctctcgggtcatcatccacatcaacagaaatctcattcacacgtgggagcggatgaagtacaatcatatcatcctttgcaagctccatcttctccttagtcagaatgtagaaatccttcagacgcacatagtcctcctcattgaagaaacgctccttctggacacgtgtcatgtagagcacatcaagctctcccatggcatcctcgagcttttctacctccttgaactcgata

SEQ ID NO: 14272 - DNA, 8509 bp, Unknown
  gut microbiota DNA sequence
ggcgggaattgtgcggtgttgcctaaagaaaaagacccccgcagcgtcaggtgctgcgggggtcggtgctttatgtgggctgcgtttcgccattcccggcgggaacatctgtattggaggtgttctccgggggcgtgggtgtcggctccgcgggggggatggcagtcggttccgcagtcgcctcaggcgtgggggcggcggtcggttcaggcgtgggggcgggtgtcggctctgcagtcggttcgggcgtggggctcggcgttgcagtcggctcgggtgtcgcggtcacctccggctccggggtggcggtggcctcggcctcactgctggccggtgcctcggttgccacaggctcgggggtggcggtttcggccggtacaacgaccggcaccgtgtagaccacggcgtccttatcgccggtatgcttggggatggtggtcagcgcagggcggtcatcctccgtgatatagctgtgggtacggatgtagctgaacagtgcgtccatcgccgtgcgggtcaggtggatgccatcgctcgtctccacatagccggccttggcgtagccggtggtgctgtccttgagggcctcggcgctgttcagaaacttccagcccttttccttgcacatctccacgagagccttgttgaattcgtccacctgtgtctgggtaaggctctggttggaatgctgctggccgatcggcgggatcgcgttgacgatgatgtccgcgctggggtaggcggtgacgaccgcctcaatgccggtctggtagttttttatgaaatcggcggtcttgtagctgggattcagatcgttcgtgccgaaggtcaggatgacccggcggggctgcagcttggccacggcctggggcattgtcaggtagccggacccggtgctgagctgtacgcaggcaaaggtcgcaagcgatttggcgctcatgcctaccgagccgatggcgttgtcatagctgcagtaatcgaacatccggtacatgcgggccgtgttgctgtcccccagaaagagggtctcgtctatgtagctctcgccggcatcggcgctctgctccagaatggtcgaggtgtaggcctgcgtgtcgatggtgttttcttctttgttgtagccgctttcagtcaccatggattcgctgtccacggtcgaaacgctctgcggggcggcgctgccgaacggcagccagccgatgagcgccagcgaaatgccgatgcagaccagcagcatcacactgcacagggccagcaccagatacattttgctgcgcgtatccagcggctgcttttttttcgatttggtttttcctgccatgtagtgggtcctttcgcggtcaagcatagtgtctgctgcaaaacatataaacccattctacaccatttcgccgccgagcgccagtctttttgcaatttttacataatttgacggcaaaaacaaaaacccccgccggggcgggggcaaacagaaaggaggatgttgaattgagaaggcttcccctgaggggctgcgcccgcaggcgcgtgtcggagcgcaaccgccggaggcggctcttagcgcggagactgaagctgtccgcgaagcggactgataagggcggagtttgccagcagtacccgtttacggtctgcatccggcaacttccccctcatccggccctgcggggccaccttccccccagggggaaggctttgggagaatcattcctttggcagcaggtgtgccttttccagcgcggggcgcagtgccagatagagcagcacggcgcagacggtggacagcagcgagttgaccagcgtgacgccgctggcaatcttggtcacaacgctgacaaactcggcaggctggccgaagatatagcggttgcggaagtagccgatgaacgggtcggtaaagacattgaccagcaggccgctgaacgcagaggccgtgaccgcgccgatgtacttgagcttgctgccggtcgggaagctgcgcaggcggatgaccttgtgcgccacgccgccgcagaccagaccgatgatgaatttcagaataaaggtcgtgacggcatagcccgggtcaccggccataatgtcggccagcgccagaccgatggcaccggccagaccgccggaaacgccgtccagcagcagggcggtcagcgccgtgaaggtgttgcccagatgaaagctggacccggtgcccagcacattcgggatgcggaaaaactcatacgcgacaaagctcagcgcggccatgatgccgatgatgctgatcttctgcacggtgaatttggtttttgtcagcgctgcgatgagcagtgccagagccactacgataaacagcagcagccagatcattgcggtagacatgattccttactcctctgttattatattttactattgacattttccttccgggaaggtatgtttttattatactgatttctggctctaaataaatgcccagtttcaaacttttttatggggccagtggaaagggcttgccatgatagaactggacccgagcacaaagacccccctgtatgagcagctgtatgccgccctggccgatgagatccgcaccgggcagcgcgcgcccggcaccccgctgccgggccgccgtacgatggccgcccagcagggggtcagcgttaacacggtggatgccgcctaccagatgctggccgccgaggggctggccgagccgcgcccgcgcagcggcttttatgtgcaaaagacctacggtatgctgcacagccgggtgcgccgcgccgccgcgccgcctgccgctgccgccccggccgagcctgcgccgctgtacgatctttcgaccggcagcgtggatacggcgctttttccggcgcgcagctgggggcgcatccagaaggagctgctctaccagcggcccgagctgctgcagcgcggcgagatgcagggcgatgccccgctgcgcgcgcagatcgcggcgtatctgtcaagctaccgcggtgttgagtgtaccccggagcagatcgtggtgggcgccggcatcgagtatctgctcggctgccttgcgcatctgttcggggacggcatggcggccattgagaaccccggctactcccgcacgcggacggttttgcagaacagcggcatcccctgcacgctggtggacatcgaccgcgagggtctgcccgccgatgcgctggaaaaaagcggcgcaaacctctgctatctgacgccgagccaccatttcccgaccggcgtcacgatgcctgccccccgccgcgcacagcttttggcgtgggcggcggcacagcccgggcggtatatattggaggacgactacgactcggagtttcgctttgacacgcggccgctgcccagcctgcaggggatggcaggcccaaacgggccggtcgtctacctgacgaccttttccaaaagccttgcgccgggcatccgcatcgcctgcatggtgctgccgcaaagcctgctggcgcgctaccggcgggattttgccacctacgccaacacggtcagccggtttgagcagcagaccctctgcgagtttatggcggggggctactttacgcggcatctcgcccggatgcgccttgcctacaagcgccggatggaggcgtttgcggctgcgctgcgggctgcgctgcccggcgcagagctggacggcgtacacagcgggctgcactttctgctgacgctgcccggcgcgggcggcgagcgcgccatggtggagaccgccgcaaagcagggtgtgcggctgcgcggcctgagcgagtattatctgacccgccccgagctatgccggcccgacaccgtggttgcgggctattccgccctgcgcgaggaggatgtggaggccgtagccgccgcgctggcgagggcgtggctttgcgcacccggcaatgggtaaagcccctccgaccttcgcttcgctcggccacctccccgcaaagcgaggaggcttcccgcgggcgaagcccgcgcagaaaggctccccacccgggggagctggccgagcttgcgaggcctgaggggctttgcagccttgcccaaaccacccacaaaaaaaatcccgccggggttcacaccacggcgggacagtttatttatcgctcagaatcactcatacagcgggaacttcgcggtcaaatcagcaacgcgcttggcaatgtcgtccttcttggcggcaaagtcaaagatgcagtcggcgatgcagtcggcgatgatcttcatctcctcaacgcccatgccgcgggtcgtcacggcgggggtgccgatgcgcacgccgctcgtcacaaacgggctgcgcttctcaccggggacggtgttcttgttggcggtgatgtgtacctcgtcaaggttatgctccagctccttgccggtgcagtcctcatcggtcaggtcgatgagcagcagatggttgtcggtgccgccggaaaccagcttcacaccgcgggcggtcagctcggcctccagtgccttcgcattttcaacgatcttgcgggcatactccttgaactcgggcttcagcgcctcgccgaagcagacggcctttgcggcgatgacatgctccagcgggccgccctgcgtgccggggaagatggcggagttgatccgcttgatcaggtactcgttgttcgtcaggatcaggccgccgcgggggccgcgcagcgtcttgtgggtggtggtggtcacgacatcggcgtagggcacagggctctgatgctgaccgcctgcgaccagaccggcaatgtgggccatatcgaccatcagcatggcgccgtagccgtgggcgatctcggccagcttctcaaagtcgatggcgcgcgggtaggcggacgcgcccgccacgatcagcttggggcggaccttcgccacctgcttggccagcgcggcgtagtcaatgcggccgtcctcggccgagacgccgtaggagacgaagttgtagttcttgccgctcatgttcacgggggagccgtgggtcagatggccgccctgagacaggtccatgcccatgacggtatcgcccacattcagcagcgcaaagtagacggcgaggttggcctgtgcgccggagtggggctggacattggcgtacttggcgccgaacagcttgcaggcacggtcgatggcgatctgctcgacctcgtccacaaactggcagccgccgtagtagcggtggccggggtagccttccgcgtacttgttggtcagcacgctgcccatggccgccatcacggcgggggagacaatgttctcgctggcgatcagctcaatgttctggcgctggcggcccagctcacgctccatggctgcgcccagcgcggggtcaaccttttccacatagccgatggtgtcgatgatgtccttgtacatactgcgttccctccattttagaaataaaatcacgccttacatcgtattgtgaacgtaggggcggggctctgctccgcccgtggccgtttgccatgcgcgatacattcccggaaaaggataccgcgcaaggctgccgggcggagcagagccccgcccctacatagatacaatccgtaaggcggattataacgtcccctttgtcgataacaccccgtcgatccgtgcatctctgcgggtggcggcgtccagcgctttggcaaacgccttgaacatggcctccagcttgtggtggtcgttctcaccgtacagcaccttcaggtgcaggttcatcatggcgctgtaggacacggcgtagaaaaactcccgcgccatctgggtgtccatgccgccgcagctttgcccggcaaaggcggcatcgtagacgaaatacggccgcccgcccagatccacggcgcagagcgccagcgtctcgtccatcggcagcatacagctgccgtaccgcacaaggccggccttgtcgcccagcgcctccttgagggcggtgcccagcgcaatgccgatgtcctcgatcgtgtggtggcagtccacatccagatcgccgtggcaggtcacgctcagatcaaacaggccgtggcgggcaaagccgtccagcatatggtcaaaaaagccgatgccggtgtgcaggtcggtcttgccggtgccgtcaaggtcgatggtcagcgtgatctgcgtttcccgcgtgttgcgggtcacagtcgcggtgcgtgccatgagaagccctcctctttagtgctttaaactaactatagcacgttggggcgtgtgcgtcaacattttcttagccttcccccgagggggaagccccgcaggtttataaaattcgccccaatttatttacgaaatcgcaacacttttcggcgcggcaaacgctacaatagaagcaagaatcaaaattgtcttttttgaaaggacaaacaccaccatggcaaaactgatcggaattgatctggggaccacaaacagctgtgtggctgtggtcgagggcggcaagccggtcgtcatccccaatgccgaggggcagcgcacaacaccctctgttgtggcgttcaccaaggcgggggagcggctggtgggtgagcctgccaagcgtcaggccgtgaccaacgccccgcgcactgtggccagcataaagcggcttatgggcagtgaaacgcgggtgcctgtggacggcaaatgctatacgccgcaggagctgagcgcccttatcctgcaaaaactcaagacggacgccgaggcctacctcggcgaggccgtgaccgaggcggtcatcacggtgcccgcctacttcaacgatgcccagcgtcaggccaccaaggatgccgggcgcatcgccgggctgaatgtgcgccgcatcatcaacgagccgaccgccgccgcgctggcctatgggctggataatggccgcacccagaccgttatggtctacgatctgggcggcggcacctttgatgtatcgcttatccgcatcggggacggcatcgtgcaggtgctttccacctgcggggacaactacctcggcggcgatgattttgatgagcggatcgtcagctggatggcagagcagtgcaaggccagccacggcgtggacctgaccgcggaccgcgtggccatgcagcgcctgcgcgaggaggccgagaaggcaaaaaaggagctttccagcgccaagcagaccgagttgagcctgccgttcctcaccacaacggcgcagggcgcgctgcatctgcagctgacgctgacccgcgccaagcttgaggagctgtgcgccgatctcatcgagcggacggcgctgccggtgcgcaatgccctgagcgatgcccatctctctgcaagcgatctggatcaggtgctgctggtcggcggctcgacccgcatcccggccgtgcaggccaaggtcatgcggatgaccgggctggagccgtcccgctcactgaacccggacgagtgtgtggcgctgggcgccgccgtgcaggcggggcgtctgggcggcgtggccctgaccggccccggagagggcctgctgctgatggatgtgaccccgctgaccctctcgattgaaaccgtcggcggcgtggcaacgcatttgatcgagcggaactccacaattccgacacggttcagcaaggtgtttaccaccgcggcaccgttccagaacaccgtggagatcaaggtcctgcagggcgagcgtgagtttgcccgggacaacaagctgttgggcacctttacgctgcggggcatcaagcgggcgtgggcgggcgtgccgaagatcgaggtgacctttgacattgacgccaacggcatcgtgatggtccgggcacgggatatggataccggcaaggagcagagcatcacgatctcgggcacctccaatctgagcgaggccgagatcacccgcgccatgcgggacgccgccgcctttgccgggcaggacagagagcgcaaggctgccttagaggcgctgaatgccggggaggccgcgctctaccgtgtgaacacggcgctgggcagcaaggccggcaaggcgctggaccgtgcgacccgcagcaaaatcaaggacgccgagcgcgtgctggagcgtgtgctgcgccacaaaaaggccgaccgcctgaccccggcggatgtcgccgccatcaccgatgcgcgggaggcgctctccgccgtggcggccccccttgtggcgcagtgggagagtgaaaagtgatttcgccttccccctttgggggaaggcggctccgcagagccggatgaggggcggagttttcgcaattgcccgtgaacgggttatagaggtaaagaccagagttgtaaagccttttggctaaataactctggtctttttgttggggcttgtgcagcagccccctgcatgctttatacattgtataaagcccttacatgctatctgctcttttgtcctgccggagtgagcggcagatgatataccctgccggagcgatcatgatcagaataaaaatgctgatcagttcattcacttcggatggcgcaaagccctgcagcatagtaatgaggttgtttgcgaaatgcacgaggatgggaaacaacaggttccttttcttctcgt

SEQ ID NO: 14273 - DNA, 644 bp, Unknown
  gut microbiota DNA sequence
aagcccttctcatccagatacgcgcggatctccttcaggatctggctacgcttgacgaaggtgtccttgacctcggggttgacgatcaggtcaacatagcgctggcggtagcgcgcctcgcggtcggtcagaccgtggaacttctcgggcaggggcagcaggctcttggagagcagcgtcagctcggtgatgcgcaccgagatctcgcccatcttggtgcggaaaacctcgcccttgacgccgatgatgtcgccgatgtcgagctttttgaaggcggcgtaggcttcctcgcccagcaggtcacgcttgacaaagatctggatgtcacccttctggtcgcgcaaatgggcaaagctggccttgcccataatgcgcttggacatcatgcggccggccagagagacgatcttaccggtctccgcctcggcaggcagctcggcaaattcctgtttgaggtcggccgagtacgcgtcctgcgcatatttggtgatttcaaaggggttgtgaccggcttcgcacaggtcagccagcttctggcggcgcacagcggcctgctgggagagctcctgctcggtctggggcttattctgctccatgagagatcgtcctttcgtgattatttgttctattgagcttggcctttg

SEQ ID NO: 14274 - DNA, 793 bp, Unknown
  gut microbiota DNA sequence
aaaagccatacggaacaggcatacacctgctccgtatggcttctttgttttttccgctgcctgttacggtggttcctgcggcagagtgatggatacaaaaaatgggcgctgcccttgcggacagcgcccatagtattgcttttcagcgcaagaaattacttctcgatcttggaaacaacgccggaaccaacggtgtggccgccctcgcggatagcgaaacgcaggccctcctccatggcaacgggggtgatcagctcaacgtgcatatcaacgttgtcgccgggcatgcacatctcagtgccctcgggcagggtgatgatgccggtaacgtcggtggtacggaagtagaactgaggacgatagttgttgaagaacggggtatgacggccgccctcttccttcttcaggacataaacgtgaccgtcgaaggtggtgtggggatgaacagaaccgggcttgcacaggcactggccgcgctcgatctggtcacggtcaacgccacgcagcagggcaccgatgttgtcgccagcctgagcgaactcgaggctcttgcggaacatctccaggccggtgatggtggtggtcatcttctcttccttgataccaacgatctccatctgatcgccgacgtgagcagtgccacgctcgacacgaccggtagcaacagtgccacggccggagatggtcataacgtcctcaacgggcatcaggaagggcttgtcagcagcacggtcgggagtggggatgtagctgtcaacagcgtccatcagctcccagatgggtgcataagcgg

SEQ ID NO: 14275 - DNA, 7300 bp, Unknown
  gut microbiota DNA sequence
tcgccgtcgaagtcatactcgctcagcagctcacgaatctccatctcaaccagatccagcagctcgtcgtcgtcgaccatgtcgcacttgttcatgaagacaacgatcttgggcacgccgacctgacgggcgagcaggatgtgctcacgggtctggggcatgggaccatcggtagcagcaacgaccaggatagcgccgtccatctgagcagcaccggtgatcatgttcttgatgtagtcagcatggcccgggcagtcaacgtgggcgtagtgacgcttctcggtgtggtactcaacgtgagcagtgttgatcgtgatgccacgagccttctcctcgggagccttgtcgatgctggagtaatccatgaagtcggcatcgcccttcagagccagggtcttggtgatggcagcggtcagagtggtcttgccgtggtcaacgtgaccgatggtaccaatgttgacatgctccaaagagcggtcaaatttttccttttcagccattggaagtgtcctcctttaattaaaacatttggtagtcttgcgtaagactatcatacaaaatttaaagagaaaaagcaagtctattttataaagtatgacttataaaatcaggctttgtgagcgcggtcggccatgatcttgtcggcaacgctcttgggaacctgctgatactcatcaggctccatagagtactggccacggccctgcgtcttggagcgcaggtcggtagcgtagccgaacatctcggacagaggaaccaaagcggtaacacgagccgtgccaccctcggactcctgattgttgatctggccgcgacggctgttcaggtcgccgataacgttgcccatgtactcatcaggcacgataacattgaccttcatgatgggctccataatgacgggatcgcacttcttcatggcatccttgaatgccatagaaccggcgatggagaacgccatttcagaggagtcgacctcatgataagaaccatcccacagggtgaccttgacatccacgacgggataaccggcgagaacaccggacttcatagcgccctgaataccattgtcaacagcggggatatattccttcgggatagcgccgccaacaacaccgttgacgaactcataacccttgccggggttgggctccagcttgatcttaacgtgaccatactggcccttaccgccggactggcgggcgtacttggtctcctgattggcttccttgcgaatggtctcgcggtaagcaacctgcggagcgccaacattggcctcaaccttgaactcgcgcagcagacggtcgacgatgatctccagatggagctcgcccatgccggcgatgatggtctgaccggtctcttcatcggtccaggtacggaaggtcggatcttcctcagcgagctttgccagagcaatgcccatcttctcggagccagccttggtcttgggctcgatagcaacgcggataaccggctccgggaagttcatggactccagaatgatggggtgcttctcgtcgcacagcgtgtcaccggtggtggtattcttcaggccgacagcagccgcgatatcgcccgcgtaaacggtctcgatatccttacggttgttggcgtgcatctgcaggatacggccgatacgctcgttgttatccttgacggagttgtagacggtggtgcctgcgtccagcgtaccggagtacacacggaagaagcagagcttaccgacatacgggtcagtcatgatcttgaaagccagagctgcgaaaggctggtcgtcggaggagatacgatcctcttcctcaccggtctcggggttggtgcccttgatggctgcaacgtcggtaggagccggcatgtagtcaacaatggcatccagcagcttctgaacaccgcggttcttgtaggaggagccacagacaacgggcacgatctcgttggagatggtagccttgcgcagagcagccttgatctcgtccttggtcagctcttcgccttccagatacttcatcatcagctcttcgtcggtctcggcaacagcctcgatcagcttgtcatggtactcctgagccttctcctgcatatcctcaggaataggctcaacgcggacatcgttgcccatatcatcatagtagatgtcagcctgcatatcaatcaggtcgatgatacccttgaaggtatcctcctgaccgacaggcagctggataggcacaccgttggcatgcagacgatcatggagcatctgtacgcagcggtagaaatcggcacccatggtatccatcttgttgacgtagaccatgcggggaaccttgtactcgtcagcctgacgccaaacggtctcagactgcggctcaacgccacccttggcggccagaacggtaacagagccgtccagaacgcgcagggaacgctgaacttcaacagtgaagtcaacgtggcccggggtgtcgatgatgttgatacgatgacggttcttcttgaagagagccggatcgtgctgagtctcggtatggctccaatagcaggtggtagcagcggaggtgatggtgataccacgctcctgctcctgctccatccagtccatcgtagcagcgccgtcatgaacttcaccgatcttatggttaataccggtgtagtacagaatacgctcggtggtggtggtcttacctgcgtcgatgtgagccatgataccgatgttacgggtcatttgcagagatacatctctcggcgtagccatggcttaaacctcctcagacagcttatcaataacgatagtgggcaaaagccttgttggcctcggccatcttgtgcgtatcctcgcgcttcttgacggaaccgccgacaccgttggtggcgtcgatgatctcagcggccagacgagcagacatggtcttctcgccgcgggcgcggctgtaagcagtcagccagcgcaggccgagcgtctcgcggcgggcagggctgacctccaggggaacctggtagttagcgccgccgacacggcgggtcttgcactcgaggttaggcatgatgttctccatagccttctcgaacatatcgagcgggtcgttgccggtcttttccttcacgatgttgaatgcatcgtaaacgatctcctgagcaacacctttcttgccatccagcatgatgtagttgaccagacgggtgacaaccttggaattgtaaataggatcggccagaacttcgcgttttgcgacattacctcttctgggcatctttcttccctccttcacatagaatgatatcatcggtactcgaaagttaagaaactcccgttgtgccacaaaaaaggcgttggcctattttatggcgaaaagatgtttccttacttcttggcaccggccttggggcgcttagcaccgtatttgctgcgggcctggttacggttcgcaacaccctgcgtatccagagtaccacggatgatgtggtaacggacaccgggcagatccttgacacgaccgccacggatcagaacaacgctgtgctcctgcaggttatggccgataccgggaatgtaagaggtgacctcgataccattcgtcaggcggacacgggcaactttacgcagagcagagttgggcttcttgggggtcatggtacgcacagcagtgcagacaccacgcttctgcgggctgttcaggttggtgtactcctttttctgggagttgtagctcttcagaagggcgggtgcagtgctctttttgaccaggacctcacggcctttgcgcacgagctggttaaaagtaggcatttcttttctcctttcttcacttattgacgcgttttttgcggttgctgcgacctttaggccgcactattccccgcaactcacgcaatgattatattacagtattccgaccgaattgtcaagagtattgccaaaaaaatcttgaaaaaatcgtgcaatacagagaattttatttttttaagccagacgcctgtttttactgccttccacaggactgcaggctgcttttggaaggctttgcacgccgatgatccggcagcggtgcggtcggcttttcccgatgcaatgcgccaaagcagcatcttttgtccataattcagacatttttatacatatttcacaatttttgtccgaaagaatcgtaggaatgacaatacggtttttattgcaccgagcacaggtttttgttatactatagttacaggcaaggtaatgacgagcctgccgaaaacctttattcagcatgaaattcaaggaggtattgacaatgaaaaaactgcttgccgttctcatttccctgtgcatggtatccgcattcgctgtacccgtttttgcagacgcaaacagcgattacatcgccgcagtcaaggcctatcaggcgcagattgcagccaaggaagccgcttatgtggccgctgtcgatgcctactctaaaaacgcaaaggcaaaggctgacaccgacagcgccgctatcctgaaggccgctagggccgcacaggcaaaagccgatgcagagtgccttgccgttatcgccgcaggaaaagccgcacaggcccaggctgacgccagagtagccgccgtaattgccgccggcaaggccgcgcaggcttccgccgatcagcgtgaggctgcctacgccaaagccgtaaaggcatatcaggatcagattgcagcccgtgaggccgcctacatcaaggcagttctgggcaagtaacatcgcatacctattataaaagaggagcgcccgcggagggcgctcctctttttggtgtattgcgtctgtaggggccgggcatgcccggcccgctcatgtaaggtgaacaggcgcctgtcggagggttgcgggccgcacatgtgcggtccctacatttctacccgattgcagggacaggcttactgcagcttcgccagtgttgcctcggcgtcatccagaatgcgctcaaacttctcaagagccgcatcgaccggcgcaggggtggccagatccacgccagcatggcgcagctcatccaacggataggcgctgccgcccatcgacaggaactccttgtagcgcttgacggcaggctcgccctccttcaaaataccctcggacagtgccactgccgtggagtagccggtcgcatacttatagacatagaagggacggtagaagtgcgggatgcgggcccactcatactggatctcctcatcaatgaccatatcctcgccgaagtaatccatgaccagacgcttatacagctcgttcagggcggcggcgttcaaggcctcgccgcgctcgaccatcgcatgtgcctcgcgctcaaattcagcaaacatcgtctggcggtagacggtccccttgaagttctcaaggtactggttcagcagatagagacgtgtctgggggtcattctcgttctggagcagctgctcgatgagcaggttctcgtttacggtggaggcaacctccgccacaaagagggtgtagtccgcgtactgcggcggctgatgctggcgggagcgccagctgtggatggtgtggcccatctcatgcgcaagcgtggaaacgctgtccagcgtgccgctgaagttgagcaggatataggggttggagtcatagcaaccgccggagtaagcgccgccgcgcttgccgcggttggggtagacatcgatccagcgctcagcgtaggccttgcggacagtctcctgatagtcctctcccagcggcgcgactgccttcagcaccatctgctgtgccgtctcatagctgtaggtttttttcagatcgccgaccagcggtgcatagacatcgtagaagtgcagtgcgtccacacccagcatcttcttgcgcaggcggacatagcggtgcatggccggcatgtgcttgcgcaccgttgcgaccagattgtcgtagacctcaaccggcacattctcccccgccatcgacatagcacgggaggacggatagctgcgggctgcggcctcggctgccgctgccttgacagcgccggagtaggacgcagcaaaggtgttgatgtgttggcggtagctcttgtaatagctgtggaaggcattctcacgcagggtgcggtcagtgctcatctcaagcggcacaaagttggagccggtgacctccacggtctccccttccccgttcttgactgcatcgaacaccatgtcggcatcctcgagattgtggtagatctcagacggcgcggacatgacctcgccgaagctggccagcagcttttcctcggccttggtcagggtgtgcggcttgctgcgcagcaggtcctccagattgaatttgtactctgcgactgcggggtcgttgacgatggccgtcagcttgtcctcgggcaggctcaggatctcgggctgggcgaaggacagcgccgtgaccatcttgacatatttgctgccgacgcgggcatacatgctctgggcggcgttatcgcgggtgtcctcatcgtggcgctgcgaggcatagcaataaaggcgctccaccttgcggctcacctcggtggaggcatcgagataagccccgatcatgatggcatcgctcagcttgcctgcaaaggcagacaggctctcgatgtcggcatccagactttccagcgcagcctcccatgcagcgtcgctttcatacatcggcgtcagatcccactgaaactgcgggtcgagctcactgcgctctttcaaaatttcggccattggtattctccttattgtaaaatattttgttgtgcagaagatgtcggggtgtgcggtggcatccaccgcgttgccgggccgtcggggacgccagcccctacgcgtagggggcggattccatatccgcccggggacattgcggcaggccaatgttccgcgggcgagcaatgctcgcccctacagattataatagggctttttcccactcggcgggcttgaagccgggcaggacgaaaccatctgccaccagcagcgggcgcttgaccagcataccatcggacgcaagcagcgcgagctgttcttcctcagtcatagtgggcagcttgtccttcagccccagattcttgtacacaagaccgctggtattgaagaaccgcttgatgggcagaccactgcgggctacccattcccgcagctcgtctgcggtggggttatcctctttaatatggcgggcggtgtagacaacgccgtattcatccagccatttcttggctttctgacaggtggagcacggcgggtattgcaggaacagcataggttcacgctccttagtatcagttaacttattataacccagcggagggcgggtgtcaatcacggacggtatgcaaaaaaggattc

SEQ ID NO: 14276 - DNA, 14486 bp, Unknown
  gut microbiota DNA sequence
cggtttatttagtggtcgtaagcagcctcagcggcatcgcgggcgatttccgcctgcacaagctcctcctcgacctccggcagaccagtgccggcggggatgagcttaccgatgatgacattttccttcagacctgccagcgggtcaaccttgcccttgatggcagcctcggtcaggacacgggtggtctcctggaaggaagcagcggacaggaaggagtcggtagccagactggacttggtgatgcccagcaggacctggctggcctgaaccagcttcagatcggtctcaccggcatcaatgcgggcctgaatctcctcgttcttgatcatgacatcgcggcggttcacgatgctgcccatgataaagtcgctggagccggaatcctcgatgcggaccttgcgcatcatctggcggacgatgacctcgatatgcttatcgttgatgtcaacgccctgcagacggtagaccttctggacctcgctgatcaggtagttctgggtggcgatagcgccctgaatcgccagaatatcctgcgggtaggcatggccctcggtcagcagtgcacccttggcaacctcatcgccctccatgaccttgagacgctgaccgaaggggatcagatagctcttggtgatgggtgcgccgttctcgtccacgccgttgatctcggcatggcgggtctttttggtatcgtcaatgtggacggtaccggcgatctcggacatgatggccatcgccttcgggcggcggctctcaaacagctcctcaacgcggggaagaccctgtgtgatatcttcggccgatgcgataccgccggtatggaaggtacgcatggtcagctgggtgccgggctcgccgatggactcagcggcgatgataccgacagactcaccgaccttgacgcactggccgttggacatgttggagccgtagcagcgtgcgcagacgcccacatgggcgcggcaggtcatgacggagcggatctccagctcggtgatgccggcgttgacgaccttctcggcgtcaaacatatccatcatcttatccttgctgacgagcagctcgccggtggcggggtccatcacatcatgcagcgcgtagcggccgttcagacgctccttgaagctctcgacaacggagttgccctcgctgatctcgcggacccagatgccctcggtcgcgtggcagtcctcctcgcggatgatgacctcctgagagacatcaaccagacggcgggtcagataaccggagtccgcagtacgcagagcggtatcggccaggcccttacgggcgcctcgagaggagatgaagtattccagaatattcaggccttcacggtagttggcgcggataggcatttccagcgtcttgccggccgtgttggccagcaggccgcgcataccggccagctgcttgatctggtccatagaaccacgggcaccggaatcggacatcatatagatggggttgcgctggtggttcttcttcaggttgtcgctcagagcctcggagacttcctcggtggcggcctgccagatctcaacggtcttgcggtagcgctcctcatcggagatcaggccgcggttgaagttcttcatgaccttctcgatcttcttatcggcggcagccagaatagcgggcttttcctcgggcatgatagcatcggggacagcgaccgtgatggcggacagggtggagtacttgtagccctgtgccttgatctgatccagcatcatggcgcaggtcttggtgccgtgcttggtcaggcagcggctgatgatgtcgggcaggcccttcttcgtcagcttgtcgctcttgccgccggatgcgatcttgagggtgcgggggttcatctcatagtcgaacttcgtagccgggtcggtacggtcgacatagcccagatcctgcgggatcgggttgttgaagatgatctggcccatcgtggtatcgaccagaccggtctcctccacgccgtcaaaggtcatggtgcggcgcaccttgatgggtgcctgcagggtgatcagaccctcggagtacgccatcatggcctcggcctcatcgcggaataccttgccgtggcccttatcctcggggttgacgagggtcaggtagtagctgcccagaatcatatcctgcgtgggcacggtgacgggctcgccgtcagagggcttgagcaggttgccggaggccagcatcagcatcttggcctcgcgctgggcctcggtggacagcggcagatggacagccatctggtcgccgtcaaagtcagcgttgaagggggtgcagaccagggggtgcagcttgatggcacggccctcgaccagaacaggctcaaaggcctgaatgcccagacggtgcagcgtaggcgcacggttcagcaggacggggtggcccttgatgacagtctcgagagaatcccagacctcggggcgggcacgctcgaccatcttgcgggcggacttgatgttgttggccttttccttctcgaccaggtccttcatgacaaagggcttgaacagctcgagagccatctccttgggcaggccgcactgatacatcttcagctcggggccgacaacgataacggaacggccggagtagtcaacacgcttgcccagcaggttctggcggaagcggccctgcttgcccttgagcatatcggacagggacttcagcgcacggttgttggcaccggtgaccgggcggccgcggcggccgttgtcgatcagggcgtccacagcctcctgcagcatacgcttctcgttgcggacgatgatgtcgggggcacccagctccagcaggcgcttcagacggttgttgcggttgataacgcggcggtacagatcattcaggtcggaggtcgcaaagcggccgccgtccagctgcagcagggggcgcagatccggcggaatgacggggatgaccgtcataatcatccactcggggcgctggttgctctcaaggaagctctccacgcactccagacgcttgagcagacgcacgcgcttctggccgttggcatgctcaagttcctcgcgcagctccttgctgagcttgtcgaggtcgatctcggccagcagcttctggatcgcctcggcgcccatgctggcttcaaacgtatcctcgtacttttcgcgcatctccttgtactcacgctcggtcagcagctgttttttctccagcggggtgaagccggggtcagtgacaatgtagttggcgaaatacaggaccttgtccagctgacgggggctgatgtccagcatcaggccgatgcggctgggaatgcccttgaaataccagatgtgcgagacaggtgcagccagctcgatgtggcccatgcgctcacggcggaccttggcgcgggtgacctcgacgccgcacttgtcgcagatcttacccttgtagcggatgcgcttgtacttgccgcagtggcattcccagtccttggtaggtccaaaaatgcgctcgcagtacaggccgtcgcgctccggcttcagggtgcggtagttgatggtttcgggcttggtgacctcgccgtagctccatgcacggatctggtccggggaggcaaggccgatcttaatcgaatcgaattctttattttccattcagcgaaccctctcaaattcaatatgacacacgatacactcgatcaattcgatcaatcgtcgaaggaatcagactcgatcgcggcgaggtcctcggcgctggggccggcatcctcatccagatcatcgtcaaagccctcgtcggcatccttgacgctgtagtcgtcctgcagctcactctcgaccatgacattatcgcccagatcgtagtcgttgttctcaaagctgctgtcatcgtcgtcaaactcctgacgcatatcgacggcgttgccttccttatcctgcacaacgatatccagaccaaggctctgcagctccttgagcataacgcggaagctctcggggataccggggcgcgggatcggctcgcccttgacgatggcctcgtaggtcttgacacggcccacgacatcgtcggacttgatggtcaggatctcctgcagggtgtaggcggcgccgtaagcttccagcgcccagacttccatctcgccgaagcgctggccgccgaactgcgccttgccgcccagaggctgctgggtgaccatggagtaggggccggtggagcgggcgtggatcttatcatcgaccagatgatgcagcttgaggtagtacatatagcctaccgtgaccttattggggaactgctcgccggtacggccgtcatacacggtggtcttgccgtcatcggtcaggtcgatcttggagaagtcaatgacatggcccttctcgcccatcagacggtcgaggtgggtcgggtactcgggggcgttctcgccgtgccacttctcgcgggcatcggcgaagcagtcgcgcaggtcagactcgtgggcaccgtcaaagacgggggtctggaccttccagcccagcgccttggcaacatagccaaggttgacctccagaacctgaccgatgttcatacgggagggaacgcccaaggggttcagcacgatgtccagcggggtgccatcgggcaggaagggcatatcctcctgcggcaggatgcgggagacaacgcccttgttgccgtgacggcctgccatcttatcgccgacgctgatcttgcgcttctgggcgatatagcagcgcacgcacatgcgcacaccgggctgcagctcatcgctgttctcgggggtaaagaccttgacatcgaccacgatgccgtaggcgccgtggggcacacgcagggaagtgtcgcggacctcgcgggccttctcgccgaagatggcgcgcagcaggcgctcctcagcggtcagctcggtctcgcccttcggggtgaccttgccgacaaggatgtcgccggtcttgacctcggcaccgacgcggatgataccgcggtcgtccagatccttcaatgcgtcatcgccgacattcgggatatcgcgggtgatctcctcaggtccgagcttggtgtcgcgggcctcggtctcatattcttcaatgtggatggaggtgtagacatcctcgcggacgagcttctcgttcagcaggacggcgtcctcgtagttgtagccctcccacgtcatgaagccgaccagagcgttcttgccaaggctgatctcaccgttgcgggtggcggggccatcggccagcacatcgccggtcttgacggcatcgccgacattgacgatggggcgctggttgttgcagttgccctggttggagcgcatgaacttgatcagctcataggtatcggcagagccatcggcgcagcggacaacgatcttgtcggcgtcaacatactcgaccgtgccgtcatgggcagccagcacgcagacaccggagtcggtggcggccttatactccatgccggtagcgacaatgggctgctgggtaaccatcagaggcacagcctgacgctgcatgttggagcccatcagggcacggttacagtcatcgttctcgaggaacgggatgcaggccgtggccacagagaccatcatgcggggagaaacatccataaagtcgacctgagaggcctcaaactcctgaatgtcgttgcggtggcggccggaaacgcggctgcggacaaagcggttgttctcgtccagcggctcgttggcctgcgcaacaatatactcgtcctcctcctcggcagtcatatagacgacctcatcggtgacgatgccggtggccttgtcaatgcggcggtaaggcgcctccacaaagccgtacttgttgatcttggcgtaggtggccagataggagatcagaccgatgttcgggccttcaggcgtctcgatggggcacagacgaccgtagtgggtgtagtgaacgtcgcggacctcgaagcctgcgcggtcacgggacagaccgccggggcccagagcggacagacggcgcttgtgggtcagctcggccagagggttgttctggtccatgaactgagacagcgggctggagccgatgaactccttgatagcggccacgaccgggcggatattgaccaggctctgcggggtgatcttctcgccgttctcctgattctgcagggtcatacgctcacggatgacgcgctccatgcgggagaagccgatgcggaactggttctgcagcagctcaccaacactgcggacacggcggttgcccagatggtcgatctcatcggtcacgccgatgccgtgatccagacccagcaggtagttgacagaagcaaagatgtcgtcaacagtgacggtgcggctgatcagaacatcgtggttctggcgcagcagctccttctgctcctccacatcggaggtggtgtcgaggatcttgcggatctcggcgaagttggcgcgctcgttgatgccggcatcctcctcaacattgaagctgaagaagttctgggcatcgacacagccgttggagataacgatgaagggatgaggctcctcacccttgtgctcgaccagaatgaccacgcgggtaacaccggcagcatcgatctcctcggccttggccatgttgatcttctcgcccttggcggccagcagctcgccggtcaggggggcgatgatatcctcagccgccttgtaaccggcgatgcggcgggtcaggctgagcttattgttcatcttgtagcggccgaagcgggccagatcgtaacggcgcgggtcaaagaacaggttgttcagatgtgcgcgggaattctcgaccgtcggcggctcaccggggcgcagcttgcggtagacctcgagcaggccctcctcggtattgtgggtaatgtccttctcaagagaggcattgatcttcggctcagaatcgccgaagaactgcttgatctggtcatccgtggacaggcccagcgcacgcagcagcgtggtgacgggcagcttgcggttcttatcaatgcggacatagtacacatcggaggaatcggtctcatactccagccatgcgccgcggttggggttcatggtggcggtaaacagatccttgccggtacggtccttgctggagccgtagaaaacgccgggagaacggaccagctgagagacgatcgcgcgctcagcaccgttggagatgaaggtgccggcatcggtcatgagcgggaagtcgcccatgaaaatctcctgctcctgcacctcgccggtctgcttgttcagcaggcgggccgtgacatacaggggtgccgcatatgtggcatcccgctctttgcattctttaatagaatacttggggttcttgtccagccggtaatcgacaaactccagcaccagattgccggtgtagtcctcgatcgcggcaatgtcgtgaaagacctcgtgcaggccctcctccaggaaccagttgtaagagtttttctggatctcgatcagattgggcatgccaatcacttcgttgatgcgggaaaagctcatgcgggtcgttctgccgttttgtacgggcttgaccttaaccataaaacgcgaccactcctattccatagattgacaaagttggcgaaagccgcccgaaaaagcgttgtgaaaggtaggcatattcgtcatttttcacaaactttttgatttcgccatttttgcgaaatccctttagggcgctctattccatttttgtgatactgtaccagtatacagggaaaaaggcttgctgtcaagggtttttcagcttttttatgaagtttttcgctcatgtcgaacgcccggacgggtgtaacaaaatttcagcattttgctgattttgcaccgtccacccgcacttgacaaattcagcaaagccgatatgcacccccgctttcagcagttttcacaaggatcgcctacagtttttagagaggtttacccttgacaagcaggtgttttttacgacatagttatagtactatttctcattctataaagattggatgttttgacatgagcattttggagcagaaaatcagcgcacggcgcatcttaggcatgatcgcgggtgtcgtcatcatcggcatcggcattgcagttttcaagttctcccatctgggcaacgactccatcagcgcactgaatttgcggttggctgaactggtcggcctgccgttcagtattgagaatgtgcttatgaacctgtttttgtttgtaccgcagctgatttgggggcggcggtacattgggcttggcaccatcatcaacagcttttgcatcggcttcattgtcaccctcacgaacaatgcgatggcggcggtattcggttctgccgacaccctgcccgcccagctgttctgggtggctgtcggcgtgttggtcgtggccttcgggtgttcgctgtaccagacagcggatttaggcgttgcgccctatgacgcactttcactgatgatgtccgaccggctgccgctcccctacttcggctgccgcgtgtttaccgatgcgctgtgcgccctgcttgcctacctgctgggcgggctgatcggattgggcacgctgatttgcgcgttcgggctgggaccgtttgtacagtttttcacgaagcatttttcggaaaaggttttgcggtacagcccagcgaaaaagtaagcggctgcggaaacgctcccggggcatcgagaacgccgacccctacaacgagaaaagccttcccctgtgggagaaggcttttttattttcacatcttgataatcccaaacgcgttggcaaccgagcttgccagaatgacagcggcaaaaatcgggcagagccagcggatcatgaatcggaacacctttttgcggcggaagggctgaccgtccagctcaacctcctcctcgatgcgctccacaccgatcacgcgggagaccagcaggcaggtggcaatggccgcgatcggcatcatgaccgagttggtcaggaagtcgaagaagtcgaggaactgcatgccgatgaccgtcacaccggccagcgggccgtagccgaggctggacagcgtgccgagcgcgaccatgatcacgccaaccagcaccgtggagcgcttacggctccagcccagctcatcctcaaaggtcgagacggcgctctcagtcagggcaatcgagctggtaaccgccgcaaacaacaccagcaggaagaacagcacgccgaccagcgtacccagccccatgctggcaaacaccttggggatcgtgatgaacatcagggccgggccggcctgcagcgtatccgggtccccgcccgagaaggcgaacaccgcgggaatgatcatcagacctgccatgatggcgatggccgtgtcaaagatctccacattctgggcagattcttcaatagcaacatcctttttcatgtaggagccaaaggtcacaaggatgcccatggcgatcgagagtgagtagaacatctggcccattgccgcaacgaccgtcatccatgagaagttggccgggttgggcaccagaaagtacttcacaccggcgagcgcgccgggccgcgttaccgagtaggccgcaatcacgaccgacagcacgaccagcaccggcatcattagcttggaaacgcgctccacgccgttgcgcacgcccgcaaagatgatgcccagcgtgaagatcgcaaagagcaaaaagcagagttctgcggaggcaccgtccgcaataaaggcgctgaagtagccatccgcagccaccccctgcgcattgccgcgcaggtactcaaacagatatttgatgacccagccgccgatgaccgagtagtacggcacgatcagcaccggaatgatggcgttgatccagccgccaaagccgagaaagccgtttttgcggcccttgcccgcaaatgaggcatacgcaccgaccgggcttttgccggtcatgcggccgagcgctgtctcggccatgatcatgctgtagccaaaggtcagcgccagcacgatgtagatcagcaggaagatgccgccgccgtatttggctgccagatacggaaagcgccagatgttgcccaagcccaccgatgcaccggccgccgacagcacaaagccgatcttgccggaaaatgaacttctgttttgtttttgttccatgattctcctatttcctccgtgtttttatatttcgcacaagggcaagtgtagcacagtcacggaacatttacaatcaagcatatttcaaggaagtgttgacaagagtgcaacaccccgcaaaatccgcaaacaaaagtcccacgcccaacgccttggcggcgtgggcatgggacctaccggtttactttatgtacccatcaatccaggaaatcgcgcagcttcttgctgcggctggggtggcggagcttgcgcagcgccttggcttcgatctggcggatgcgctcacgggtgacattgaactccttgccgacctcctccagcgtgcgggggcggccgtcctcaaggccgaagcgcaggcgcaggaccttctcctcacgcggggtcagcgtcttgagcacatcggccagctgttccttcagcagggtctggctggcggcctcggcgggcacgggggcgtcatcatcggggatgaagtcacccagatggctgtcctcctcctcgccgatgggcgtctcgaggctgacaggctcctgcgccacacgcatgatctcgcggaccttgtccaccggcatttccagacgctcggcgatttcctcggcgctgggatcgtggccgtactcatgcagcagctggctggagaccttcttgaccttgttgatggtctcgaccatatgaacggggatgcggatggtgcgggcctgatcggcgatggcgcgggtgatggcctgacggatccaccatgtcgcataggtggagaacttgaagcccttggtgtggtcgaacttctcaacagccttgatcaggcccagattgccctcctgaatcagatccagaaactgcatgccgcggccgacatagcgcttggcgatggaaacgaccagacgcaggtttgcctcgctcaggcgctgcttggccttctcgccatcggggccgcccgcctgaatcttgagagccagctcagtctcctcctcgggggtgagcagcggcacgcggccgatttccttcaaatagaccttgacggggtcgtcgatcgtgatgccatcggcggtcaggccgtcctcgtaatcatcggcgccgtcatctgcaccggagaccgtatcatcgacctccacgggggtgtcgtccacgatctcgatgccgctgctctcaagctcctcatagagcttttccattgcctcaacatccagaacgttgccattttcctccattgcatcgctgatctcactgctggtcagcttgccgatgcggcggccggtgtcaatcagcgtgcggatcgagtctttcttctctgccataagtaggttctccttttggttttatattgttgcaacaaatctgtcggaatgtcgttattcttctggttcttcagccttggcgcccttctttttgcccatgttggcaaaaaagtcggagaactggctgtcgtccattttgcggaccttctcgtccagcggtctggcgctttccagccggtcaaggtacatgtcgatgtcctgatgctgcaaaggcgcatcgtggttctgcgccattgcaagcgcgatctgctggaacgccttgtcgtccagcagctgctgcagcgttgtcaggttcagcggctggccgctgtcagcacactgaaagatcgcctgcagaacgctctgcagctccggcaccagcacggtcgccatatcaaggcggcggcgcacatagggaatctcgtccgggttctgcatcagggctgccgccagctggcgggccgctgccgctgcgcccagcgcagactccccgctgctggtgtagggcacccggatgtcggcggcgattccctgcttggacagctcctgctgctgtctgcggcggtcgcggcgcgccgccgtctggactgcgccctgcatctgggacacgatggcctgcttggacacgccggtctcatccgccagccgcccggcgtagacatcccgcgccgtggggctgacgccccgctcggtcaggataccgatggcctcgcggatatagctgagccggccgtcatcgctgcgcaggtcgtacttggccttcgcctttttcagctgaaactccgttgggttagccgtgccgtttaagagcatctcaaaccgctcgcggccgtactttttgataaattcgtccgggtccttggcgccctgataactcagcacgctgaccttcatcggcgtgttggccatgatgcccagactgcgctcggtagctttttggccggcctcgtccgagtcgtagctgagaacgacctcgtccgcgtactcgctcagcagcttggcctgctcagcggtcagcgccgtgccgcaggcacagaccgccgtgtcaaagccggcctcgtgcattgcaatgacatccatgtagccctcgcagaggatgtagcgcttgctcttggactttttggcgatgttgagcgcaaaaagtgtgtgggacttgtggtagaccatcgtttcggggctgttgatgtacttgggcttggaatcatccagcacgcggccgccgaacgcaatgatcgcgccgcgcacatcaatgatcggcaccatgacgcgttggcggaagatcgtgtacaggttgccgcgctcactgcggcgtatcaggccggaatgctccagctcatcgtcctgaaagccgcggcgcttgaggtagttgacaaggccgaagccctcattcggcgcatagcccagcccgaaccggcggatggccgcatcggacagaccgcgcttttccttccagtatttccgggccagcgcagcctccggcgtctgggcgttcagattctcataaaaatagcgggcggcacagcggttgatctccaaaaggcgctggcgcgcgcgggattcacggtcatcctcctcgggcaggggcattccggcgcgggccgccagctgcttgacgctctcgacatacccaaggttattgtatttgcgcacaaagttgatgacatcccccgctgcgccgcagccaaagcagtaaaagctctgggtgtccggatagacaacgaaggacggcgttttttcattgtggaaggggcacagcccgctcagagtgcgcccgcgccggcgcagctgcacatactggccgatgacctcttcaatatcgttgcggcgaacgacctcctgtatgtattcctgagggatcataggttgactgcacctccttgtcagattgtaggggccgggcatgcccggcccgtggtcttcccgcaatgctgcgtctgccaatctgtgcagggccgggcatgcccggcccctacggcgcagcggttacaaaacatgccacttttgcggcacgaacagttcctcaaacaggcgggtggcaaactcatcgctcatgccgctgatatagtcggtcacggcgcggtccaccccctcgttgtaggcgatctgcatgtaaaaattcggcatcagggcgggctcgctgctcaggcggtcatacagctcgctgatgagcttgtccacctttttttcctcgcgcttagcctcccggtccacatagaccgtggcatacataaagtccttcagcaccgcataggcggcatcgacctcaggcgaaaagcagatctggccatcactgctgtgggttaccagatcggtgatcatcgtggtaatgcgctcagactttgtatggcccagcacggccgttgcctcgggcggcaggcggcgcgggtcaagcacccccgccgtgatcgcatcctcaatatcgtggttcaaaaatgcgatgtgatccgcacggcgcacaacacagccctccggtgtgcgggcccaggcgccggtcgtgtgggtcacaatgccgttgcgcacttcccaagtcaggttcaggccctgaccgtcccgctcgagaaaatccacaacgcgcaggctctgccggtaatgggtgaagccccccgggcaaagccggttaagggcgcgctcacccgcatggccaaagggagtgtggcccagatcatgcccaagggcgatggcctcggtcaggtcctcattcagccgcagcgcgcgggagaccgtgcgcgcgatctgggacacctcaagcgtatgggtcagccgggtgcggtagtggtccccctccggcgagagaaatacctgtgttttctgcttcagccggcggaaggccttgctgtggagaatacgatcccggtcgcgctggaagcagggccggatcggatcctccgtcagcggcaggcagcggcccagactgttcgcgctcaaggtcgcgcagctgctcagggtctgccgttcaatggcctcggtctcttcacggatcgtcatagtgcgcccccttttcctgatcctctatctataaatacgacaaaagtatgggaaacactctttttttgtggggatttttttgaaatattttcacggttgcagggggcggcgttcccaacgccccgcgggccgatgcaagcatcggtccctacaattgtaccgtagggcggcc

SEQ ID NO: 14277 - DNA, 635 bp, Unknown
  gut microbiota DNA sequence
aatactgcggctcacctgctccttagcctgcttctttacaggtatcacagtcttaagtgcctgattcatggtagagccgtagttgcgccgtatccatgccgcaagtgcgatgagctttgcctccacagccacagagtctgactttatcccgataagaggctttgtccttgccgggtcgtactcaggctcatccgtgacctcaatcacatagcctgtgatagtgcggctgccaaatggaatatccacgcacacacccgggcggatatcacataaaagctcatccgggatgctgtactgaaaagtcttatccagtttttcgtgggatatatccacaatcacgttggcatacataactgatactatttaactccttcgtatttctcctcgcagtacttgcagcggtagatttcgtttttctcatcggaaagcacgaaaatctggtcaagctcctgctcaattgaagtgatgcatcttgggtttttgcacttgatgacatttttcacctgatgaggcagcttaagctccatcttgtccacaatcttgtcaccctttatcacatttacagtgatattgtggtcgataaatccaaggatatcgaggtctaatgactctatcggacactctaccttgataat

SEQ ID NO: 14278 - DNA, 688 bp, Unknown
  gut microbiota DNA sequence
ttgacaaaatcggcctgttttagcgttctgctaaaaagcagaacgctttttgttgctttcggacattgacaacgaaagaatatcccgttatgctgatatgagatttgttgcgcaatgcattgcaaaggagaaggtttccccaatggctgcaaaagaaaacgaaaaaatgactatcgagcaggtggcggaggcacccggcgtttccaaaacaacggtgtcccgcgcactttccgggaaagggcgcatcagcgagaaaactcgcgccaaggtgttcgcctatatggggcatgcccgcaccgaggctgcgcaaaaagacccaaaggtgcgcaccaacaatattgctatggttgtgccgcggcgctttattacactggatctgccgtttttgcgcaaatgcatgggcggcatctgtaccatggctgatcagcgcggctatgacatgctgctgtgctacgcctccagcacagagtatacccagctgcagcgtcagctggcgagccataaggtggatggtgttattctgacctacgccatggcagacgatccctgcgttgacttgctgcggcagtatgatgtgccgtttgtgctgattggccgcagtgaggataagacgataccgcaggcggataatgatcaggttaccgccgcctgcgagatgacccgtattctgctgcagatgggtgccaag

SEQ ID NO: 14279 - DNA, 887 bp, Unknown
  gut microbiota DNA sequence
accggcaaggtcgcgctgatcaccggcgcatcctacggcatcggctttgccattgccaccgctatggccaactgcggcgccaccatcgttttcaacgacatcaagcaggagctggtcgataaaggtctagctgcctacaaggaggccggcatcgaggcctacggttatgtctgcgatgtcaccaacgaggatgccgtcaatgagatggtcaagaagatcaccgccgaggtcggccacatcaatgtgctggtcaacaacgccggtatcatcaagcgcatcccgatgatcgagatgaccgctgcccagttccgtcaggtcattgatgttgacctgaacgcaccgttcatcgtcgccaaggctgtcattcccgatatgatcgagcagggcggcggcaagatcatcaacatctgctccatgatgagcgagctgggccgcgagactgtctccgcctacgccgctgccaagggcggcctgaagatgctgaccaagaacattgcctccgagtacggcaagtacaacatccagtgcaacggcatcggacccggctacatcgccaccccgcagaccgcacccctgcgcgagatccagcccgatggcagccgtcatccgttcgaccagttcatcgttgccaagacccctgctgagcgctggggcgaggccgaggatctgggcggccccgctgtgttcctcgcctccgaggcttccgacttcgtcaacggcctgatcctctatgttgacggcggcatcctcgcctacatcggcaagcagccgggctgatttactttcttcgagaagaaagtaaacaaagaagctttcaaacaataaaaaggacatccgctcgtgaaagggcggatgtcctttttatgttgcacggtaggggccgggca

SEQ ID NO: 14280 - DNA, 492 bp, Unknown
  gut microbiota DNA sequence
gtgctgactgcgctggaaaaacagtttgcctcctacggcatgaccctgaccgccaaggagggttacccctacctgctggccgtcaacaacgcgggcggaaccgtcaccgtctacaccgtggacgcggccaccggccgctacgccgtgccctttatggccatggtctgcagcggcggcgcggacaccccgaccggctatttttccacccctgtggactacagctggcggctgctgatgggcccgagctacggccagtatgcgacccgcatctacagcagctacctgttccacagcgtaccctactacagccagcacaaggacgatgtggagtatgacgagttcaacaagctgggcacaatcgccagccttggctgcatccggctggcggtcgtggatgtaaagtggatctacgacaactgcccgctgggcacgccggtcgtgatctacaacgacaaggagaaccccggcccgatgggcaagcccggcacgatc

SEQ ID NO: 14281 - DNA, 28042 bp, Unknown
  gut microbiota DNA sequence
aggcgcgccgccagcgttcgtcctgagccaggatcaaactctttataaatggtatttaatcacttacaaagtgttaaatcgctgtaatcactcagacacaatcgcttgcgtcctatatgaattacttgtaaatttggaattgatttacgtgggtttccaaacccacgatcaaggttccacaagtttcagttttgttcaattttcaaggtcctgctgtgccgtccgctctcgctgacagcttgtatattatatatcagaaacgcttgattgtcaagaggttttctgaaagttttttgaagaagttttcttcaaaaaacgcgcacaagctgttggcagaagggcttgccgcggcctccgccgcgggacagcttgattatattatcatacacaacctcggatgtcaacaccttatttcggtttttttgacaaatttcgagggggatttttgggcaaggtgtatgttgcggacgaggggaagtatgattactaaatgtgggtgcggaggggtcaagacccctccctacaggcgggcgggggcggaaagattgcccgataaagggcgttatccgcaaggttgcccctcatccggccctgcggggctaccttccccctcaggggaaggcttgggggcgggcggagcagagccccgcctctacaggggtagcaagacagaaactgcaacaaaaaatagagccaaccatcaggccggctctattatatatagtatgtagattacttcttatggtacatgcggtcatcctcttcgtaggtgggctcgcaggtcagatacatgcctaactttttcagggtgtcggcatcgacactggagaggatgacggtggaatggatatcgcagcccttcaggttggggatctgctccatcgccttggcggcgtattcgttttccgaaaccgagctggagagtgcgatcaggatctcgtcggtatgcaggcgtgggtttttgctgccgaggtaggtcgttttcagcgtctggatcggttcgatcgcacgagcagacacgagatcgatctcctgatcgatgcccgcaagctttttcagtgcattcagcagcgcggaggaggctgcaccaagcagcgggccgtttttacctaccacgatcgtgccgtccgccagctcgatggcggcggcaggctgcccgccggtcccatcggagcaggcatgggcgcgcttctcgaccgcgcgctccccgagcgcaatacctgcctgattcatcagcagttccagcttgaagcgctcctgcttcaccacaccgctcgctttctggtcgcacaggcacttaaaataacggcggacgatctcgttcagcgacgcctctcggcagacctcatcgtcaatgatgcagttgcccgccatattgacgcccatatccgtgggggagcgatacgggctcttgccggcgatcagctcaaacatcgcattgaccaccgggaatatctcgacatcgcggttataattgacggtcgtttttccgtaagcctcaagatggaacggatcgatcatattgacatcgttcagatcggcggtggcggcctcgtaggcaaggttgaccgggtgcttgagcggcaggttccaaatagggaaggtctcaaacttggcataccccgctttgacaccgcgcttatactcatggtacagctgggacaggcagaccgccatcttaccgctgccggggccgggggccgtgatgaccaccagcgggcgctcggtctcgatataatcattcttgccgtagccatcgtcactgacgatgtggttcacatcgttggggtagccggggatcttatagtggcggaaggtgcggatgcccagcctgttgagcttctgctcaaaggccgtgacctcgggtgcatcggtaaactttgtcacgcagacgctgcccacaaacaggccaaccccctgaaaggcatcgatcaggcgcagcacatcaacaccataggtaatgccgtagtcgccgcgcatcttgttggccacgatgtcctcggcactgatgacgatgaccacctcggcctgttctttcagctgcagcagcatctgcagcttggaatccggctgaaagcccggcagcacgcgggacgcatggtagtcatcgaacagcttgccgccaaattccagatagagcttattgtcaaactgggcgatacgctcccggatatgggcagactgcatcgcaagatatttatcgttgtcgaatccgatcctcatctatattcccctttttcctatgctttaaccaatgtcctacatgaacttagtatagcatttttttcgtcagcttgcaacggtcttttgcagcaggggcacaccttcctggccggaggaggccctgcgcgccaacatattggctcagatcagtctggcgctgaaccgcatctggactgagtggtaccccagccgcgggtacagcttcaacataacgggctcgccggggtacgatcaggcctatgtcaaagggcgcaccgtgttcgccgtcatggagcgccttaccgccgaattgttcaacacctatgtgcagcgcagcggtgatgccgaaccctactacaccgaatactgcgatggccgtaccgtcacctgccccggcatgaagcagtggggcacggtcgagcgggctaaggagggcaagaacgccctgcagatcctgcggtattactacggcaagcgggtacagctggtcacaacggaccacattgcatccattccgtccagctatccgggcagtccgctgcgccgcggcagcagcggcaccaatgtgcgcatcctgcaaaagcagctgtcccgcattgcgaaggactacccttccttcggcaagccggtggtgaacggcgtctttgacgaggccaccgagcgcagcgtcaagcgctttcagaagcagttcagcctgaccgccgacggcgtggtgggccgtgcaacatggtataaaattagctttatctatgtgagcgtcaaggatcttgccgagctgaccagtgagggcgagaccgccgagggcacgcagtccaccggcggttggcctggcacagtcctgcggcgcgggtcgagcggcagcgccgtggagcaggtgcagttctggctgtccgaccttgcacagtttgattccgcgctgccgcgcgtcacggtggacggccgctacggggcagtgaccgagcgcgccgtgcaggcgttccagaaaaagcagggcctgacggcggacggcgcagttgggcagcgcacctggaatgcactttacgctgcctgggtggacgcgcagagtgaccttggcggcaccgcatggcccggcacagtgctgcggcggggcgacaagggcatggaggtgcggctggtgcagttctggctgcggctggctgcggacaactaccgcgcactgcacaccatagcggtggacggcagcttcggcgccgccaccgtcagcgctgtgcaggcgtttcagagtgttttcgggctgacagccgatggtgcggtgggccgtgcaacatggaataagctgaaggaggtcggccttgcggtcgcaaacaggctcgtggacgcagacattgccccggggcagttcacggtcaccacgcgggagggcagcagcgggaccgccgtgcgggccgtgcagtattatctgcgccggctcgcggcctactacagcgatattccgtccgtaacagtggatgggcgcttcggcgcagcaacggcgcgggccgtcagggcatggcaggcgcgggccgggctgcccgtggacggcgtggtggggcggctgacatggcaaagcctgtatgacgccgccgcagcactcgacagcagcggccccgtggtgcgcatgatccaactacctgcccctgctgctgcgctgcgccccggtgacagcggcgcagaggtgctgcggctgagccggatgctgctgtttctgggccagtggattcccgagatcgacctgcctaagaccgacacgccgaccagcacctttgaccctgcgctggagaccgccgtgcgcagtgcccaacggtatttcgggctgaccgagacaggcattgtgaccgccgcagactggacggtgctgcgcgaggccgccgagcggctgctggctgccaaccccgccgggcccagcccaaagcccgatggcgtatggcccgccggggcgctagcgctgggcagtgcggggcctgccgtattgcaggtgcagcgctggctgaacatcattgccgccgccaaccagaccgccgattttgtacccgagacaggcatctttgggccggaaactgcgtccgcgctggaaagctaccagctgaccgccgggctgcagacacttggcatcgtggacgccgacacatgggaaagcctgcgtctggctgcgcagggtctttgccgcgaatgtaaggaggaataatccatggcaagagtttacatctatgattcctacgataacaagttcttccgctacaacctgagcgaaaatgacccgatgccctacagcaccggcacgaccctgcgggtgcgggaattccgcggctcgagcaaatccaatgtactgtggaccaccaccgctgccatggaggcatggaacctgacacgccgcacctacggcagcggcatcccggtggggtacgccttcaagcggatctgggagggcggccacggcaccaccagccagcactacgcaggtgtcgcctttgatgtcgggcagcgcagcaccgccgacgagcgccgcaagatctaccgggccgctgttcgcagcggggcatgggggtatgtggagcctatgtcgatgacgccgacctgggtacactttgaccggcggtacggcaagcccgcctgcgcgggcaccacggccggttaccccactttgcggcgcgggagccgcagcacctatgtgctgatcctgcaggatgccctgaacgcactgggctattcgaccaacacgctggacggcatcttcggccatgcaacggaaagcgcactgaaagcctgccagcggcggttcggtctgcgggcggacggcatctgcggctgtgcgacatggaaaaagattgccggtgccacggtgggtatcggccacacggcaaccgtcatcgacaaataaggcattgcgctgcggcagctgcggttgtatactgtaggcaggctctgccctatataaggtaaggaagtgttctgaaatggatatgatggaatttttgcgcacccgccgcacctaccgccgctttgaccaacgccccattgcaccggagatcctgaccgaggccattgatgccgcccggctggcaagctgcggtgccaaccgccagaccgtgcggtatatccttgtgcagagcgcccgtgccgtgtccgccgtgcagccgctggtccattgggccgcctacctgccgcccgagcagggtgtgccaaagtccgaggagcagccgactgccttcatcgccgttttgcaggacacccgtctgccgggctgcagcgatgtggatgtagggctggcactgggcagcctgaccgctgccgcatgggcccacggtgtgggcagctgcatcatgggggccatcgaccgcccggcgctgaccgagctgctggccctgcccgaggggctgcggctctgctatatggtggcgctgggataccccgcccacaaaagccgcgtggtaaatatgcaggacggcagcgtgaaatattatctggacgaaagccgcgactactgcgtgccgaagcgcagcatgggcgaggttctcgtcaaaaccgtctgaccgttttgtaaagtaatacaaacaggataccgccgcacacccggatacacccggctgtgcggcggttttgctgttatgtggggcagcccattcccgcctgtgcagcgctgacactccctccggcttacctgttatgtccgcgcagcttcaacaaattaaactacaatttttctactttttgcagcaaaaatcagcacattgctattttgtgaacaatgtgttgacaaacaaagaacatagcagtaaagtaaagtgcacaagcgattgtaaaatctattaggaaagagggattcattcaaatgaatacgcttgtaatcgttctgattgccgcggtcgttctggtatgtgcgtacgccggatacggtcgttggctcgccaagacatggggtgttgaccccaacgccaagactcctgctgtgcggctggaggatggcaaggattatgttcccaccaagggctggacggtgtttgcacaccagttctcctccattgccggtgccggccctgttaccggtgccattcaggctgcggccttcggctggctgcctgtgctgctctgggtgctgatcggcggcgtctttttcggcgccgtcaccgacttcggcgctctgtatgcttccgtcaagaatgacggcaagtcgatgggcctgctgatcgagaagtacatcggcaagaccggccgcaagctgttcctgctgttctgctggctgttctgcggcatcgtcattgctgcctttgcagacatggttgccggcaccttcaacgcctttgacgctgacggcgcacaggtcgaggccgccttcaccaacggcgcggccggcatggtttccatcatgttcatggtgttcgccgttgtgttcggcttcatccagaagaagttcaacttctccggctggcgcgaggccatcatcggtatcatcttcatcgtcctgtcctttgccatcggcatgaactgcccgctggtgttcggcaagaccgcatggagctacatcaccttcgtttacatcttctttgccgcagttctgccgatgtggatgctcaagcagccccgcgactatatgaccacctttatgttcggcgcaatgatcgccggtgctgtcatcggcctgctggttgcccaccccacgatgaacctgcccgtctttaccggcttcaacaatgccaagctgggcaccatgttccccatcctctttgtcacggtcgcctgcggtgccgtctccggcttccacagtctggtttcctccggcacctcctccaagactgttgagaatgagaaggacatgctgaaggtcggctacggcgccatggttcttgagagcctgctggctgttctggccctgtgtgttgccggtgctgccgccgctgcggacggcacccccgcctccggtaccccgttccagatcttcagccgcggcgttgccggtttctttgagatgttcggcgtgcccgtttcgattgcaactgtctttatgacgatgtgcgtttccgcgctggcactgaccagtctggacgccgtggcccgcatcggccgcatgagctttcaggagctgttcagtgtggacgacatggagcatgccgagggctggcgcaagctgttctgcaatgtctacttctccaccttcatcacgctggtgttcggctttatcctgacccagatcggctatgccaacatctggccgctgttcggctccgccaaccagctgctcagcgcgctggttctggccaccctgtgcgtctttctcaaggtcaccggccgcaacaacaagatgctcttcccgccgctggtcatcatgctctgcgtcaccttcaccgcactggtgcagcgcctgattgcgatggtcaaggccatctccgccgctgcgtccaccgccatccctgccggtgagaccacttggggcgctgtctttatcgccaacggcctgcagctgatccttgcggtgctgctgatcgtgctgggcctgaacatcgtgttccacagcgtcaagagctacaccacctgcgatgcacccgaagcaaaggacaacgccaaggccaccgcaaaagccaacgcctgagggcagccggcacttgacaaaccggtttccatggagtaatatttatacatagccgcaagggcgcggccgcacgctgcgctatccggcaacatcatgtttcaagctccggtatccgcaatcaggacgccggggctttttgcatgaatatgagggaaacacttataaaggtaaaggagagttcaagatgaagctcaaaaaaatgcttgcactgaccatggccggtttgctggccgccggtctgaccgcctgcggttccaccgctgacaccgccgacacctccggtgccccggacggcgacggcgaccccaccaccctgaccgttgcgatggagtgcgcttacgccccctacaactggacccagagcgatgattccaacggtgccgttgcgattcgtggttccagcgactacgcctacggctacgatgtcatgatggccaagaagatcggcgaggcactgggccagaaggtccagatcgtcaagctggactgggacagcctgattcccgccgtcatgaccggcgatgtggactgcgtcattgccggccagtccatcacggctgagcgcgccgcacaggtcgatttcagcgatccctactactacgcctcgatcgtcaccctgacgaagaaggacagcgcctacgccagtgcagcaagcgtggccgatctggccggtgcgaccgccaccagccagctgggcaccatctggtatgacacctgcctgccccagatcgagaacgccaacatcctgcccgcgcaggagagcgcgcccgccatgctggtggccctgaacagcggtgcctgcgacatcgttgtcaccgaccgccccaccgcgcaggccgcgctggttgcctaccccgacttcacgctgctggatttcggcggcggcgacaatgacttcaaggtcagcgaggaggacatcaacatcggcatctcgatgaagaagggcaacaccgccctgcagagcgccatcaacgaggtcctgtccacaatgaccgctgatgattacaacgccatgatggacgatgccatcagcgttcagcccctgagcgagtaattttgcccgcctgcccctgccgttttgtgcggcaggggcttcggtgttggtaaagtgaagaaatcacaaaggagaatctcatgcaagactttttcacaaactgtgccacagtgctgcagaagtacggcttttcgtatctgcgcggcgcgggcacgaccctgctgctggcgctggtcggcacatttttcggctgcctgatcggctttgcggtcggcgcactgcagaccatccccattgacaagcagcgcgacccggcgtggaagcgggtgctgctcaagattttgcacatcttcctgcgctgctatgtggagctgttccgcggcacgccgatgatcgtgcaggccgtgttcatctactacggtcttttgcaggtgttcggcatcaagatgggcatgtggcaggcaggcttcttcatcgtttccatcaacaccggtgcctatatggcggagacggtccgcggcggcatcgtgtccatcgacccgggccagaccgagggtgccaaggccatcggcatgaaccactggcagacgatgctccatgtcattctgccgcaggcgctgcgcaacatcatcccgcagatcggcaacaacttcattatcaacatcaaggacacctcggtgctgtcggtcatctcgatcaccgatttgttctttgtccacaaaagcgtggtcggcgcgctgtacacctattttgagagcgctgccatcgtcatggtcatctacctgacgatgaccctgttcgccagctacctgctgcgcctgtgggagaaagcgctcgacggcccgcagaactatgacctgaacacgaccgactcgctggcctacaccagcggcatgtacaatgccccggacccgaaccatgagtcccagaatctggatatgaagggaggcgcagcccatgtctgagcctgttattgaggtacgccacctctccaagagctttggcacccatgtcgttctgcgcgatgtggatttcaccgtcaaccccggcgatgtcacctgcatcatcggcgcgtccggtagcggcaaatcgaccctgctgcgctgcatcaacctgctggagacccccacgaacggcaaggtgctgttccacggcaacgacatcacggccaagggcagcgacccgtgcgcctaccgcgccaaggtgggcatggtgttccagagctttaaccttttcaacaatatgacggtgctggacaactgcacggcgggtctgcgctatgtgctgcacatggacaaggaggccgccgagcgcaccgcactggacaatctggagaaggtcggcatggccccctatatccatgccaagccgcgccagctttccggcgggcagaagcagcgtgtggcgattgcccgtgcgttggccatgcagcccgaggtgctgctgtttgacgagccgacctccgcgctggacccccagatggtgggcgaggtgctggccgtcatgcgccagctcgcaaaggaggggctgacgatgcttgtcgtcacccatgagatggcctttgcccgcgatgtatctacccatgtagtctacatggcggacggcgtcatctgtgaggagggcacccccgccgacatctttgagcgcccgcagaaccccaagactgttgagttcctgagccgattccggcaggcgtaacagcataaaaaacgaccgatggtgcaaaagccatcggtcgttttttggttatggggctgtaaaaataaggctgcggggcatcgagaatgccgctccttctttagccaagcggcacatcaatctcatctccgatggcaaagctgtagatcgtcagcttcgtcaccggcacgctcagccgctgggcgaacgcccggcggtaaagccgcagctgggcggcgtattcgtcaatataatactgcgcatcgcggctgcggtcggtcttataatcaaggatctcggcatgctcgtcaaacaccagcacaaggtcggcaatgccctgcaccagcacctcggccccggcggcgctcccctgccctgcggcgggggtgatgtcggcggcaggcagggccgtgatgaacggttcctcgcgcaggatgcggcgagccagccggattcgccgccagaccgcactgtcaaagaaggggcgcacggcgtccagatccagcttatccgccagcgcggcgtccagcagctgcagcccggtctgccgctgtacctcggccgtcagatcgggggccgggccgtcaaagggcacgctctgcataaaggcgtggatggcggtgccgcgctcggcgccggtcatgccgcttttttgcagaaaggccgggcgctccagcgcaaccgggcgggcggcgtgggccaccgcgctgacgctgaccttggcggggactctttcgagcgcggcgcgggggctttgccaagcaaagctggcccgcagctgcgccaccagcgcgggatctgccgctgcggcgggcggcgcaggcggctgctccgtctgctcgggcaggggcagcagccgaatgtccagcggcacaccggttttgcggtggtgcggcagaaagttcgtgtgtgcccaaagcgcatcgctgcccgggtgcagcattgcagcggtcagcagccaaccggcccagctgcccatgccgcgcatcgactccgggccggtggcctcggctgcggcgcagagggcgggcagcttcagcgcgctgtcggttcgcttgagcggcaccgtgatgatcagcgcatcctgcgcgcgggtcagcgcaacatacagcacacgcatctcctcgctcaaggtctcggtgcggatggcctgcgccagcgccgcatagggcagcgttttaaaccgcttggccgcccgcggcgcacgcagcatgacgcccacgccgaggcggctgtgggtcagcaccggccgcacagcgtcgctctggttgaactggtgggccgtgtctgccacaaaaacgaccggaaattccagccccttggagcggtgtaccgtcatgatagaaacacagccggggcgggtctgcccgcctgcgctctggttcagtccgccgttgtgggcggcagcgtccatcgcgcgtatcagcgcgggcagccccgcgcgcccggccccggcagcccacgccgtaaagctgagcagatcctcgcggcagcgcaggccgtcaggcagcgcacccacggcggcaagatagcctgtgcgggccagtagctccccgagcagctcctccaccggcagggtacgggcgaggcggcggtactcggccagtgcctcgataaagggggcaaaccgcgcctgctctccgccaaggaccgccccgtacagactgccgttgggccttgcacggcgcagtgcaacaaggtcatccgccgtgtaggggaacatcgggctcagcagcacggctgccagcggaatgtcctgcgccgggttgtcgataacacgcagcagcgccgcaaagggtcggatatgcggctcatcgagcagatcggcggcggaatccgcaaagaccgggatgcccgccgtgcgcagcgcgccctcataatcggcaaagcccttgcggccgcgcagcaggatacagaagtcctcataccggcaggggcgcaccccctccttgccgcgcacggcaaagccggttttgaccatctcggcaatgcgccgggcaatgacagcggcatcccccgcggtatcggccccgtcaatgacatcgatctcgcacaggccctgataggcggcgcttttatccccgcccacaacaagccgctggccgtccccatagggtacgccgcccagcccctgcgtgaaaaacacctcaaacagatagttgattccctcgatcacgccgggtgcgctgcggaagttcgcatccagcgccagcgtggccgggcttggggccggctgcgggtggggcttccactgctgctgcttgcccacaaagataccgggatctgccagacggaaccggtagatgctctgcttgatgtcgcccacgaagaaaaggttgtccgcttcggggcgggccagcgcaaagtagatagcgtcctgcagggcgttcgtgtcctgatactcgtccaccagcaccgccgtgtagcggctgctgaccgtgcggcacagcggcgtgcgctcgttgcgctcattgacgagcagatcgagcgtcagatgctcataatccgcgtagtccagcaccttttcagcacattttgcggcaaagcagttgtcggcaaaggtctgtgtcacccgcacaagggccgccaccagcggcgcagcgcggcggcggtcggcggcaaattcctcggccgtgcagagcagtgcatcccggcgcaggctttcaagctgcttttttgcacggtcgcgcagctcggacgcagcggcagcggactggtttgcgtccttgccgcccttgatgcgccccgccgcacgccagcccgacagaaccagctcaagcgctgacaggcatttgtcccaatcaccctgctccagatggtagcagaggttctcgacccgggcggcatcatcaagcatgacggccgtataggcggtatcggccttttcgtcccgcgctgcgatggctgcgccgctgtccagcagcgccttgacgccctgcgcccgggccagcgcgatgcccagcagctcacggccccattcggtctgctgcggcggggcctcctgctgccacatttcggcaaacgcagtcagcgatgccgccgggtggggcaatgcccgggtaaagtgatagaggtcgaggaccgcatccccggccgtgctgtcggtacggccccggtcgtacaggtcggcaaaggcacggaagtcggcgtcctgataggctgtttccagcgtggcggccaatgtttcctgctcaatgcgggcaaggtcggctgcctcggcggtcgtgaagtcggggggcacatcgagcatggcaaaatgctgctgcacaaaatgcaggcaaaaggcatccaccgtgccgatagacgcccgctgcaaaagcagctgctggcggcgcaggcgggtattgccggggtgggcgcgcacctcctgcgcaaggcgggccgtgatgtcagcccgcagcttggccgccgccgcatttgtgaaggtcatgatcagcagcgtatcggcatccgccgggtgctccgggtctgtgataagccccaccacgcgctcgaccagcacgcgggtcttgcccgagccggctgccgccgacaccagcaggctgccgccccgcgccttgatcgctgccgcctgagccggggtgaattgtatcttgggttgttctggcatggggtgtctcctttatgtagaaaagcttcccctttttgggggaaggcgttctcattccgcaaacgggtcgtccttgatcgaaatcgtccgttcgtgttccccgtcgcggtgggtgcaggcgcagcggaagtcacagtaggtacaggggcttttgccgccgccggggcagagcggctcggcgtcaatgcggccgctgtacaggttttccgccatatcgatgagcaggccgtccagatgatcccggatgcggcccagcttcgcctcatcggccagcgtgcttttgctgttcagcaccttgccggttttggcgctgaagctcagcggcacaaactcaccggtgcctttggtatccatggcacggtagatgctctcgtcatcaagcagcaggccgttcatcgggtaggtcggcgcggggtcggcctcctcggtcagttcgcggcggtcaacgctctcgggtgcagggtcagccagcaggtactctacccccgccgccgtagcaccggggaaagccgcctgcgcgttgcgctccagcgtaaagaggtacagcagcatctggcaatccagaccgtagtagacctccttcagcttgaactccttgccgccggtcttgtagtccacgacccgcagataggtcttgccccgtttttccagcggcatcgcatcgacacggtccaccgtgccgacaatgcgcaccgtatgccccgccccatcggcaagctgcaccgggtcgatgcggggggcgtccgggttttcggcatcggggcggtcgtcaatgcgcagctcaaacgcaacggggcgaaagcccgactgctgaagatcgcgctggataaagcccagcagtcccaccagattgcgccgtatccggccgatcaggtagtccatccgcaccgtcatgccgggcaggttttcggccacatattcgtccaccagcgcatcgacaagggcctccacctcctccggcgtcagcgtcttgaacgcctcgccgcggcggcgcagggcgttttccagcacccagtgggtcagcgtgccgcttatattgggggcaagctcggcctttttgcggggcgcagccttgatgatgtactgcagaaaatagccaaaggggcagctctggtatttttcaacccgggtggggctgatgcgcagcccccgcccaagcaatgcctccagcgcggcagtatcctcgacccgctgctctgccccggcggtgtccaccgcacggcgcacagcggcgtaggcgggggccagcgcagggtcagcgtccagcacggcgcacactgccgcaccggcacactgccggtctgggtcctgactgagcatgcccagcacatcaagcgcagcggccggggcggcagccagctgcaccgccgtgggggtgcggggcggcacctgcagatactgcaaaatcggtgcaagcgcagcactggcgggggcggcatcctcggcatgggccgctgcgggccagctgagccagagatagctgcgtgccacggtcagcgccttgtaaaagcagatcccctcgcgcagcaccttgttggcaaagcagtcgggcagctcggcgccctgctccatcataatgtcgcggtcggcgtgggtcagcaggccctgatcgccgggcgtctgggggaactccccctccagcaggccgaccacaaagacggcatcggtctcgggcaggcgcatacggcccgccgttgtcacgatcacgctgtcaaggctctgggggatatgccccatgtcggtcgtgcgcagcagcagcgtaaaaagctcggcatactcggcagggggcagcttttcactgcccagcagacgggcaagctggtcaagcagccccataacgacattccattcgcgcaggacctcatccgcctcgggcaggcggccctctgcgcgcagcttctctgcaaggctctcaagcgccttctcagctccgagggactgcaaaaacaggaagatctgcttggtcagtgccgctgcgggggcaccggccgccttgggtacaaagtccgccagccgctccataaggaaggcgcgggcgcactcggcatcggccagcacctgccggtcctgctcggagtcatggccgtcataccccgccgcactgcgggtaaagggctcccgccaatcggcggcggtcagctgccatgtgtaggcgtagttttcaagggcacactgctggctttccggcagatcgaccagcccggtcttgagcaggcgcagcacgctgcggctcgacacgccgcgcaaaagctccagcgcggcatggaccgcccgcgccggggcggtgttttcgggggtagtggcctcatcgcagaaaagcggtatgccctgcagacggaactcataccgcagcggggcaaggtactgctccgcattgcggcatatgaccgccatgcggctgtagggggtgccctgccgcgcgcgggccgcgatctcggcggccaccgccttggcctcggcctgacgggatgccgccgcgtggtaggtaatggccggatgcaccgggtctaccacggcctccggcgtataggcagggtccgccagcagcaggcccagctcggccaacgccggggcatcggcatggcggcggtcctcggtcagcagctcggtatgggtgggcacaccggcctctgccgccatccgcttgagggtattgaccacatttttggcaccgctgaacagccccatgccgccgtcccggtcctgctcgccgtcacagcaaaggcagaccgttacatcggccaccggcagcatggccgccagcagggcgcgcttcggcgcattaaaggtatcaaactcgtcaatgtatacggcgcgccccgcaaagaaggccgcgtccagccgctccgctgcgcgctgctggcggtcgccggggtccatggcgctctgggccagcagcccctcatacgcggcatagatcagggccagttcatccagcttttcgcggtcggccccgggggcctttgcatagtccgccagcatttccggcgttacaccggcgcttttcagctcgctgacagtctgggcagccttctcgcaaaaggcggcgctgcgccgctggcggctgtagtacacgaccttgtccaatagcgaatccgccgcccggcgcagcagcagggcacggcccgcctcggtcagggtgggcacggccgccccgccgtagcggcgcagcagggcctccgccagcgaggtgaaggagtagctttcgacataggcggaaaggctgtcccccagcgtgcggtagagctgcccctcggtggaggaggtaaactgctccggcacgatcaggatgctgcgctccccccgcgccgcgcgtgcgcgcagggcggccagcatggtatgcgatttgcccgagccggaggggcccaagatgaagtttagcatggtggtgtcctttctgatagccttctcccttgggagaaggtggcccgaagggccagatgaggagcgcgcgcgtgcagcaagccatttgcgggcggcagcggcaaggccgcccctcatcagtcagcgggcaagccgctgacagcttcccccgcgggggaagccaatctgcctataaagtccgcaactgccagtcttacctcaaaccggccgaacaccagcgcgttttcatcggcactggggtaggcggcggtgctgccggaaatgcagagcgagggatacagcacacagaaccagttgcggccctgcgcggtgcccagctctatgcgcagggcggtgtactccccgccgggcagagaaaagctgccgtaatcgcgggcagaaaagttgtggctctccagccgcagtgcggccgtttgcgggctgtgggcgcggtgcagggcgctgtcggctgcagcctgcaaagcgggcagcgccgtctgcagcgcacggacagcctgctgcgggctttgcgcctgcgtcacggcgggcggcagggcagccagcacggcatcccgcacctgcaatttcagcagctggtcatcccaagtatcactgttggctaagatgtgcagccgcacggtgtctgcacgcacccgtgcggcggtgcgccggtgccaatcggcataggcggtaagtacaacagtcagtgccagcgccagaccggcacccagctccagcacacggcgggtatgcttcatcataacagttctcccctttccaaccggagtatgggcagaaaggggagaaaataatcataaggcaataccgcataattctaagtgccgctacggcgagcgaggtgcggcagctgctaagccaaaagcgcagataatactggatgtattatcgagcattttggcaacgcagatgccgtgccgcagccgccggagcggtgcttaagccgtcaggcgggaattgtgcggtgttgccataagattgtccgcacagcgcgggatcacttttttgcgccgaacagacggcgggccgtcacaaaggggccgccgcgggtcggcttgcagagatagacctgccggtagctgcttttaagggtggccacagccttgcgggcagcgtcctgcctgtcaaagatgccaaagacggccgcaccgctgccggtcatctgggctgtcacggccccctgcgcccgcagcgttttgcagatggcgggcgtttcgtccgcaccggagcaatgctcgagtgcattgccggccgccgcgcagacgccgggcaggtcgtttttgcggatggcctgctcctgtgcctcgcagtcagggtggacagggctgcccatcgtgtcatagcgggcaaaggcctcgggggtggacacgcccacgctgggcatcgccaccacaaaccagcagtccgggcagggcggcagggctttcatcagatcgcccacgccccgcacgcggcaggtgccgcccatcagggcaaacggcacatcagccccgatgcccgcaccgatggcgcacagctcactcatcgaaagctttgcgccgtacagctcgttcagaccgaccagcaccccggcggcatcggcactgccgccggccatgccagcccgcaccggtacccgcttgtagatcgtcatatccacgcccgccagcagaccggtataggcaaagaaagccagcgccgccttgacagcggtgtttttatcgttggccggcacaaagctgccaggcagattcagcgtcaggtcatggctgcggcgcagcgtgattttttcatacaggtcgatggtctgcatgaccatatccagatcatggtagccgttgggcagcgtgcccacgacatccagcgacagattcagcttggccggggccagcaccgtcacagaacggtattgcataggggtcactctcctgttatttgctctgcggatggcagggttacttcgtccagccgttttcgctcaaaaattcgcggatgcgcttcattgcgatctgcagatgatccacgctgtaggcatagctgatgcgggcgtacccctcgccggaggcgccgaacgccgagccggggataatggcaacctctttttcacgcagcagccgctcgcagaattcactgctcgtcaggccgctgatctggatcgaggggaacacatagaacgcgccgcgcggctcaaagcaggtcaggcccatatcgttgagcgccttgaccacataacggcggcggcggttgtactcgtcccgcatcatctcgatctggtcatcacactggcgcagcgccgtgaccgccgcatactggctggtggtcggggccgacatgatgcagctctggtggatcttggtcatgaccttgatgagcggcgcggggcctgcggcatagccgagacgccagccggtcatggcgtaggatttggagaagccgttgacgacaacggtgcgctcggccatgccgggcagcgatgcaatggacacatggcggtcgaggccgtaggtcagctcggaataaatttcatccgacagcaccagcaccttcgactcacgcaggacggcggcgatctgctccatctcgtcggcgctcatgacggcaccggtggggttgttgggatacgggaagatcagcagctttgtccgcggcgtgatggccgcccgcagctggtcggccgtcaggcggaactgatcctcggcgcgggtggcaatatgcaccggcacgccgccggtcagctgggtgatcggctcatagcagacaaagcagggctcgggaatgatgacctcgtccccgggctggaccaccgcgcggatgatcaggtcgatggcctcactgccgccgaccgtgacaaggacattttcctctttatagtgcaggtcaaagcggcggccaaggtagctgcagatctcattgcgcagctccttcaggccggcgttggctgtgtatttggtgcggcccagctcaaggctgcggatgcctgcatcgcggacgctccacggcgttttaaagtccggctcgccaacgcccagagagatgcagtgcggcatttcagccgccagatcaaagaacctgcggatgccggacgggcgcatcgccttggcggcaggggcaagcagttcatcgtagttcatcacaggacggtacactctctttcatcgggttcttcggccagatacagccggccgccgcgcttgtaggggcgcagcacaaagctggtggcggtggagagcacatcgtccagcggggagaggcgcttggccacgaagattgcgatttcctgaaagctgcggcccttgatgatgacctgcaggtcgtagctgccgctcatcagcagcacggtatccacctcgtcaaactgggcgatggtcataccgatgtcatcaaagccgcgggccttgtggggggtcacacgcagctcgatgacagcctccaccagattgacgccggcctgttcccagtccaccagcgtttcatacccgcggatgtagcccttggcggcggcctcgtccatcatggcggcgatctcctcgggggtcttatccagcatcgccgcgatgtcctcgatcggcatgcgggcgttcttttccagaatacggagcaattcttccatagtaccacacctcactcaagtatatgcagctattatagcatattcgcggcaggattgcaccattgttttttgcggcaaagccctgccgcacacaaaaaacagcacccccgtgccttacacagggatgctgctctgtttttttgtcagccctcggcaggctgttcgtctgccgtctggggttcctccggctctgcgggctgttccggctctgcagactcgggcgcaggctctgcagccgcttcgggttcctcggctgtgcccagctcctcgttctgcatttcctccacaagggcatcggtcggcgcaggggcgggtgtgacctccacctgcatctcactctcctgcagggcggtcagataccactggcggttctccccgcgggtaaagacataatccatatacttcgtcggctcggtgggggccgtcagcgaaagctcaccggtggcgttgttcgtggcggtgggcacatagccgaccgtgacgatgcgcttgccatcccggcggctgatcttctcgaccgtcggcgtgtactgcgccacagagctggtgaccggcaccagataggcctgcttttcctcatcatactggtagacgaattcctcggtgctgaaggtcccctccggcaccttatactcagggccgagaaggttggcgatgtaggtatcgacctccagcgcggggatcatggccgagccggtatcggggtcacgctcatactggtcaaggctgccgccgctgttctgcacctgatagacggtgccccagatggcggcctgcttgaacacaccggggtcaacgctgttcacatcgtcaaacgccacggggtccagcatgaccatgccgtacaggcggtcacggtacgccttgcgcaggccgctgtcgtccagcgccgagcgcacaagcccaacgatccagcccagcacggtaaacaggccgatgagcgcaagcagcagcgccacactgcccacgacctgccgtgccagacgacggttattgcgaatatgttcttctctgtaatttgccattgtggatgtgttgctcctttggggggattgaaaagcggtgcggcagacctcttacttattcttgtacatctgctcgtagtatttctggtaatcaccgctggtgacatgggccatccagtcggggtgtgccagataccagtcgatggtaagcacaatgcccttctcgaacggggtctcggggtaccagcccagatcctccttgatcttggtcgggtcgatgccgtagcggcggtcatggccgaggcggtcagcgacatgggtgatcagctcctcgctgataccctcgtccttcaggcggtcatgcagctgggcaatgacggtcttgacgatgaagatgttggggcgctcgttatggccgcccacattgtagacctcgccgtccttgcccccctgggcaaccatgtcgatggccttgcagtgatccatgacatacagccagtcgcggatctgcatgccgtcaccgtagacgggcagcgtcttatgctgcttggcattgttgatgagcagcgggatcagcttctcggggaactgataggggccgtagttgttggagcagcgggtgatgttcatcggcataccgtaggtatcgtggaacgccttgacgaacatgtccgcgctggccttggaggcagagtaggggctgtgcgggcacagcggggtggtctccataaagtagccctcggcacccagtgcgccgtagacctcatcggtggaaacctgcaggtacttcttgccctctttccacgtctttgcggcggcatcataccatgcgtccttgcagcactgcagcaggttcacggtgcccagcacattgctctcgacaaagatctcggggtttttgatgctgcggtcaacatggctttcggctgcaaagttgatgacataatcgggatcgtacttggcgatcaggtcggtgacgagcgccttgtcgcagatgtcgccctgcacaaagatgtgacgggcatcgtcctcgatgtcctgcaggttctcgaggttgccggcataggtcagcttgtcgaggttgatgaggcggatgtcctcatacttttccagcatatagtggacaaagttcgagccgataaagccggcacagccggttacaagataagtcttcatatatcaaagttctccattccagtttgcaaaaaagtccttgagggcgtcctgccagtcgcgcatctcatcgccgaccgtgcagcgcagcatacggttttcgagcgcgctccacgccgggcggttggcgctggccgggttggcggccgcgtactcggcgctggtgacaggctcgacccggcaggaaagccctgccccctgcatgatggcgcaggcaaagtcataccagctgcagatgccgttgccggtgcagtggtagatgccgtaatcgtggctgacggccagcttcaaaatatggtaggccaaatcgacggcgttcgtcgggttgcccagctggtcgttgacaacggtgattttatcgtgggtctgacccagacggaccatcgtcttgacgaagtttttgccgtaggcactgtagagccatgccgtgcgcacgatgaagtgccggcggcagaaccgctcaacatactgctcgcccagcagcttggtctggccgtaggccgagatgggtgcaggcacggcgcactcgtccagcgccacaccaccgttggcggtgccggggaacacatagtcagtcgaaacatggatcagccgtgcgccgatcttctcgcaggcgagcgccagattgcgcgggccgagggcgttgactctgaacgccgcatcgcgggcagtctcgcagccgtccacattcgtgaaggctgcgcagttgatgaccgtatccggctggtggcggcggatatagttgatggtggcctcgcggtcggtgatgtccagctcatcgacatccaccgggataacggtggccttgcgcagacgctcgggcagggggccgatggtgcagccctcctccgcaagctggcgctgcagctcggtacccagctgaccgcggcagccggtaatcaaaattttcatagattctctcccccgctccgatcaatactgcagcttgtcgtctgcgacattcttcaggtgctgaccgtaggggctcttgccgtagcgagctgcgctctcgagcagcttctccttggtgatccagccgtacttgtaggcgatctcctcgggggccgagattttgatgccctgacgctgctcgatggtctgcacaaaggtagcagcctccacaagggagtccatcgtgccggtgtcaagccatgcatagccgcggccgagcagctggacatccagcttgccctgctccagatacatctggttcagggtggtgatctccagctcaccgcgagcgctgggcttgacctgcttggccatctttacgacctcattattgtagaagtaaaggccggtgacagcgtagttgctcttggggttggcgggcttttcctcaatgtcggtggcgtggccgtccttgtcaaaggccacaacgccgaagcgctcggggtcgttgacatagtagccgaaaacggtgctgcgccctgctgcggcgttggcagcagcggccttcagccgcttggagaagccggcgccgtagaagatgttgtcgcccagaaccatcgcgcagcagtcatcgccgatgaactcctcgcccagaataaaggcctgtgccagaccgtccggactgggctggaccttgtactgcaggtgcaggccgtactggctgccgtcccccagcagcgcctcaaagcgcggggtgtccgtgggggtggaaatgatcagaatgtcctggatgcccgccagcatcagcgtagacagcggatagtaaatcatcggcttgtcatagacgggcagcagctgcttggatgtgaccattgtcagcgggtaaagtcgggtgccggcgccgccggccaggataatacctttcatcgtttacaactccttattttattggtgcagtgcgcgccgcccatcccatcggggcataatctcacacaatacgattaaagtcattatacagcatttaagggccacacgcaagggggaaattctctcacccgccccgcattttttgacacgccggccggcataaccgcacccggcgcgcccccgcggaagcggttttccgcccgcctttcgcctcaaattgtttccgttttgttacgatttctttgcagcgtcttgacgtaacgcgccgactgtgctacaatacagaaagtataaatcacgatggcacgttgctgcatcgtttccaatagaagttaaagactgaaattaaggaggcgttttctcgatgaaacgctttttttgtgcggccttttttattgccgtcattaccctgctggccgcctgcggcgctttgaacaccactaccgccgccgcgcaggccaccgcaaccccgaccagctctacctcccgcacccaaaaaacgccgtccaccgtcaaggtgaacgagaccgccgccaaggtggaggttgtcacggcccagagcagcgccacaccggagtccacggcctccgctgcagccgagactccggccaccggggattttcccgtgatgtatctcatcggcgtggtcgggcttatcctgatttgctccgccggtcttttgatgctgcgcaaaatttgagttccgaacgccctgcggggcgttttttgtttttattttgcagagtaccattacaaattgtcaaaccggaaaggagtcccccgctgtgcccaaacgctaccgcaagctgcgcggggaaaccgcgtactacccctttgccgcccgcaccgggctgcgggcgcgccagcgccgccatgcgcgggcgctgcgcaccgccggtgccgccgcgctgattttggccgctgtgctggccctgcggcagggtgttttccgcggcggccagcctgatgcacccgccccgctgcccagcgcagcccccatcgtcaccgctgcaccgggggccgcccatgtgagcgttcagccgctggctgccacgcgggacgcattggctgagacccagcaggccgacacgcaggcccacacaacgccggaaagcgccgcccagccccctgccgcccgcacggctgaggtcctgccccgctaccgcagcctttatgagcagaatcccgatctcatcggctggctgcgcatcgacggcaccgacattgacctgcccgtggtgcagacccccggcgacaacgaatactacctgcggcgcggctttgaccggttttatgccgtgggcggcacgctttttctggacgagcgctgctcggtggagccggacgcacccaccgacaactggctcatctacggccacaatatgcgggacgggtcgatgttcggccagctggtgcgctaccgggacgaggccttctggcaagcccacccgacctttacctttgacacgctgtacgagaccgccacttggcaggtcgcagccgtgctggacaccgcgctgggcgcagatgaactgccctactacaccttttttgacgccgacaataagctggactggcagcgccgtgtagccgccatcaccgaaaaatcgctgtacgacaccggcgtcaccccggcgtacggcacccagctgctgacgctttcgacctgcggggacacccgcatcggcaccgatgcccgctttgccctgctggccgtccgggtagggtgagcggattttcctcttgcattttcgggacgaatccgctattatggtgcttacacaattctatatcaacaaaaggagtctgtatcatggcagaattcacctatgaagttaccgagcgcatcgccgttctttccaccaatgcccgcggctgggagcgccagctgaatatggtcagctggaacggcaacccgccgaagtacgatatccgcgactggtcccccgatggcagccgcatggccaagggcatcagcctgaccgaggacgagctgaaaacgctgaagggcattctggacgacatggaactgtgaggcttgtatgcaggactatcacgccgaatttgtggagatctacaataaaaatatcacccgccccggcgctgaccgcctgctgagctggctggaaaccacggattttttcaccgcgccggcctcgacccggttccacggtgcctgtgagtgcggccttgtcatgcacagcatcaatgtgtacaatgcgatgatgcagcattttttcaccgagggggaaagcgccgagagctatgccatctgcggcctgctgcatgacctgtgcaaggcaaacttctataaagtaagcacccgcaatgtcaaaaacgatgtgaccggccagtgggagaaggttcccttttatcaggtagccgaccagctgccctacggccacggggaaaaaagtgtctatctgatcgagcattttatgcggctgaaaacggccgaggccattgcgatccggtggcacatgggcggctttgacgatgccgtgcgcggcggcagctttgccgtcagcgatgcctacaacacctatcccctcgccgtcaagctgcacattgccgacttgaccgccacctacctgctggagcaaggctccagcgaggtcgagaacgggcacgagaagaaaaagtaaacagcacgcccccgcttatgcgtctgcatgagcgggggcgctttttactgtggattgctgcggctaaaaatgagccccctgaccgggacttcgccggtttattgaattcttatctttaccagaaaccacctgtcttgctttgcaaaaagctgtcatgacttattcagatttctcgcaatgactttggctacctctgccacattaagaggcttggaaatatgaccgttcatgcccgcatccagagaggtctgcacatcctccgcaaaagcgttggccgacagtgcaatgatggggatttcttctgcatccgggcgttccgcctgcatggcgcggatggcttttgctgcctgcagtccgttcattttcggcatcataatgtccatcaggataatatcataggtacc

SEQ ID NO: 14282 - DNA, 493 bp, Unknown
  gut microbiota DNA sequence
aaagcatgcgacatattatggtatcgctatgtcggtcagacgtatctgcgaggtaattatgcgtgatgagaagtctattcttcctgtttcacatatgatgcacggacagtacggcatcgacggtgtggttctctcaatgcctgcaatcgttggagcaaatggagtggagagcgatatcccaatcgagttaaacggtgaggaagctttaaagctcaaggagtctgctgatgcacttaagagcatacttgacgggcttgagctgtaaatatcaggctcttaatattaattttgtaatattaaacttatataaaatactataaattcagtagggtttggggtataatgataactgtcgggctgcatattcttatgtgcctggcagttcttttagttaatgacagataactttagaactacttagagcaaaaaggagtatatataatgagcgaaagaaaacaaatccatcaggagtttctgacaggcgaaagagccc

SEQ ID NO: 14283 - DNA, 568 bp, Unknown
  gut microbiota DNA sequence
acgacaagcaaaacctggatatttccagctttgctgcttttaccggcatggtggcagagctttccaacaacgaaaacgattataagatgttctaccacaacaccaagcaggggcgtatgcggcacgacaaggtacataatctttttggttataacatgacccgtgctgcaggcgaggcttttgagcggctggagccggacaagcgcattttgatgtactcccgttctgcctgcatcgggatgcaccggtatggcggcatctggactggcgacaaccattcttggtggagccacattctgcttgcgctgcacatgatgccctccctgaatatgtgcggcttcctgtacgaaggccccgacattggcggctttggcagcaataccacggaggatctggtgctgcgctggtacggcttgggcatcttctctccgctgctgcggaaccactctgccaacggcacccgccggcaggagccctaccgctttaagaacaaggccgcctttgccggtattttacaactgcgcgacctgctgctgccctacatttacagcgagtacatgaaagctgc

SEQ ID NO: 14284 - DNA, 269 bp, Unknown
  gut microbiota DNA sequence
atttttttcttctttggagaaaccagtttgtgaccggaataaatggacatgcccatacaaagcaatgaagaataggcaaaatatttatgtgcagtcatagattttctgattccagaataaatgcatcccaacatacagaaaagtgctccgagggaccagtatttatgcgatttcatgatttgatacctcctttgatttaactgattctatcataacgcttttttacgaatatgcaaagaaaatcttgaaatatagttctatagaattag

SEQ ID NO: 14285 - DNA, 186 bp, Unknown
  gut microbiota DNA sequence
gttaaatcgctgtaatcactcagacacaatcgcttgcgtcctatatgaattacttgtaaatttggaattgatttacgtgggtttccaaacccacgatcaaggttccacaagtttcagttttgttcaattttcaaggtcctgctgtgctgtctgctctcgctgacagcttgtatattatatatcaga

SEQ ID NO: 14286 - DNA, 8917 bp, Unknown
  gut microbiota DNA sequence
cggtattgccctaaaaaagccccgccttgacggcggggcaaaatttatgaaattactcccccagcgaggcagggtggtcggtcggggtatgcgcgctctggtactgcagcgcggcggcgatgaaacccttgaacaggggatgggcgcggttcgggcggctcttgaactcggggtggaactgtgcgccgaggtggaagtcgcgccccgggatctcgaccgcctcgacaaggcggccgtcggggctggtgccggcaatgacaaggcccttctcctcaaactcggcgcggaacgcattgttgaactcatagcggtggcggtggcgctcatcaatttcagtcgtgccgtagcattcggccattctggtgccgggggtgatggtgcaggggtacttgcccagccgcatcgtgccgcccttcgtctcaacgccctgctggtcgggcatcaggtcaatgacattgtgctggccctcgggggcaaactcgctggagttggcgtctgcgtagcccagcacattgcgggcgtattccatgaccatgatctgcatacccagacagatgccgaagtaggggacatggttctcccgcgcgtactgggcagcctgaatcatcccctcaataccgcggtcgccgaagccgccgggaatgatgatgccgtccgcatcgcccagctcatcggcgcagcagctctggtccaccagatgctcgctgtccacccacttgatctcgaccttgctctcgttctcaaagccggcgtggtacaggctctccataacgctgaggtaggcatcgtgcagcttgacatacttgcccaccagtgcgatggtgcaggtcttgctgcgggtggcgatgcggctgatcagctctttccactcggtcaggtcgctcggcggggtctgcaggtgcagctggcgggccacaacattggtaagccctgcggattccagcatcagcgggcactcataaaggctcggcatcgtcaggttttcaatcacgcagtcggggcgtacattgcagaacatgctgatcttgcgcttgatgtcgttgccgaccgggccgtcggcacgcagcacaatcacattgggggcaatgcccatgccctgcagctccttgcaggagtgctgggccggcttggacttgtactcatcagagccggaaatgtagggcaccagcacgacatggatgtagcagcagttttcaaggccctgttcaagcccgacctgacggatggcctccagaaagggctggctctcgatgtcgccggtcgtgccgccgatctcggtgatgacaacatcagcctcggtgcttttggcaaggttgtagatgtagctcttgatctcgttggtgatgtgggggatgatctgcacggtctggcccagataggcgccctgccgctccttgttcaggacattccagtagaccttgccggtggtcaggttggagtatttgttcaggttttcatcggtaaagcgctcataatggccaaggtcgaggtcggtctcggtgccgtcgtccgtcacaaagacctcaccgtgctgcagggggctcatcgtgcccgggtccacattgatataggggtccagcttttggctggcaaccttcagcccgcgcgttttaagcagccgccccagactggccgccgtgatgcccttgcccagaccggagacaacgccgccggtcacaaaaatatacttcgttcccataattcaccctccatgccgggggcgcagaaacgcccgccgtatcccaaaaaattccttcccattatacatcgggaaaaatcatttttgcaataaggcgggcgtaatttttaatttttgttaaaaaatagaggcaaaaactttagatttttcagcttcggtgggtgtacttgaggatctcgcgcatcaggaccttcatgtcgagcggcttgccgacatggctgttcatgccggaatcaaggcaggcgcgcacatcatcggcaaagacattggctgtcattgcaatgatcggcgtgccctcatcggggccgacaccctcaaaggcgcggatgcagcgggtggcctcaaggccgttcatctcgggcatcatgacatccatcaggacggcgtcataggtgtggggcgcggcgtgctgcatggcctcgaccgcctcgcggccgttggtcacggccgttatcttggcgccctctgcctccagcagggtcacggcaatctcgctgttcagctcattgtcctcagccagcagcaggtgcagccccgcaagggtcggcgtctcctcctgcttggcgggctgctgcgcggccacagggtggggcgtggggtccaccggcagcgacagccgcacgatgaaggtcgagcccttgccgggctcactctcgacatcgagcgagccgtgcatctggtcaacaagcttcttcgtgatggccatgccgaggcccgtgcccttgtagtgggtgcggcttgagcgctgctcctgcgtaaagggctcaaagatatgctgcaggaattcctcgctcatgccgatgccgttgtccgtgatctccatgcgcagatgaacaaggccctcctcatacagggtctccttggcgcagaagcggatcgtgccgccgtccggcgtgtacttgacggcgttggagaggatattgatcagcacctgccggacatgtagctcactgccgacgagataggggtgccagaacgggccgatctgcttggtgaaggtaagcttgcgctcaatgatctgcccctcgacgatgtcgcagcaggcctgcagcagcacgcgcaggtcaaagggattgttgagcagcttcatgctgccggactcgatcttggacatgtccagcacatcgttgacgagcgacagcaggtgggaagccgcgccccgcatcttggtaaggcagtccctgacgcgggcctgatcctcaaagttttcctcggcaatatccagcatgcccatgatgccgttgatgggggtgcggatgtcgtgggacatattggacaaaaactcggtcttggcggtgctggcctcctcggcacggtgcagggcagcctcggtcagatcgcggaagcggcgcgcgcgcatcgaaagcaccacgcagacatttgtgatgatcacgcaaagcacgatgagcaccacaaagagggggtactggtaggccagacgcaccagcgagaatttttgctgacccagattgatgtacttattggtcagcgctacgatatcggcacgggtcaggctatccacgctcttgttcagcacatcgagcagaagtatatcatagtcagcgcgcacaccgatgcagaagctgcggcgttcatcactgagcatcgcgcgcagctcgttatacttgtcgtcaaagatggcacgctcggcctgataggtgtaggtgtagcaggcgtccacatcgccgctgcgcacagccgccagacattcgtcaaaggaggcggcgtatttgacatttgaaatatccggcaggcccggcatctcaagtgaatcggagttgaaattgtcgggcacgatcaccttgtgcagcccgccgctgtggctgcgcagcatgacccatgaaaactctgccgacaggtaggagcttgtcagctgatagccgtaatcctccgccatggagtaatcatcggaaaagtctatgacgaaatcagcatcgccgctgtcaagcatcgtgcggtattcgctgcggctggccggtgccaaaaagctgtagtgcagctgggcgcggtccgccacgagcttaaagaggtctaccatgatgccggtcgggcagccgtccttgtccagataggagtaggggtagaggtccgggttgaccagaacctgaaagttggtgccggctgcgttgtgggcggtgatgtagttttcctcagcggcggtcaggtagagcttgttgctggtgtggatgttcttgttgtacttgtcaaacagggtcgtgcgccaggtggggtcatcgcggtccatcttggtcagggcgtcattgaccagctgcagggtggcgctgtcgtccttgcgcacggcaatgtagcagtcctgcgggtcaaaggtgtcgatgatccactcgttgttggtcttgcgcagccggttggaaacggccgctgtaatcaccccggtgcgcagcgccagcgaaagttcctcgtccgtgtcgaagtagatcggcgtgtaggtaaagccgtgctccgcggcgtaattgataaagctctggttgcggccgttgccgcggcggctcatgccaacggtcatgccgttgtaggtttcgtagttgcctgcaacgatgctgcggttgccggccttgacggtcagcatcgtggccagattggagatcggctcgctggagaaggcgaagcgctcggcgcgctccggcgtctggcgcagcgtgggcagcaggtcgatctcgccgcgctccagcatgtcagcggcctcgttggcatcacagtcgtagccgagatactcaaactttacattctcatactgggcaatccgctgcagtacctcgtaggaatagccgctgcggtggccgtccttgtccatgatatggtagcccgtgtaggcgtaaaagcctacgcgcagggtgcgctggggggtgtcattgctgcccgccgcgctggcgggcatggcaaagcccagtagtgcggccagcagcatactggtaagcagcaggcagcagaccgcgcgccgcagggcgggaaagctctccttattattgtacatggcaggggcactccggtttcctgtgcggcggcagaggcaccgcacatagtattctgcagggccggcctgcaagtgggtgctttacagctcccggaccgccgccagcacttcctcgtgggcggcaaggacgggcggccagaggcttgcatcctccagcggcttggggccgcgcaccgcatcgcagagggcggcggccgccttgtacaggcggtccatgccgaggttctgggccacgcccttgagggtgtggctggcacggaaggccagctcccagtcctgcgcgtccagcgcagcccgcagctgctcaaagctggggtcgccggggtatttcagaataaattttttgatgagcgcctcgctgggcaggcggctgagggtggcgctgtaatcgccgccgacacgggcataaaattcctgtaatgtcatggcaaatcacctttctgacaataaaattatttttcctccgtatattggcggagcaggcagcagtttcttgtctgcttggcatcatgcagcagtgtctcggcctgtacaatggccggctcgatcgggcaggcgccgtacacgccgccgagagagaccgtcaggcgcaggtcggggtagtcggtcagccggatcgcctcgaccgaggcgcggatctcctcggcccgctgcgcaaagatatgcgccgggatatggtggaacagcagcaggaactcgtcatcgccgtagcgcaccagtgcatcgctgctgttgcgcacacaggccgagaccgcgcccaccacggtgcggatcgcaatgtcgccggcctgacggccgtaggtcccgctgaccgcgccgaaatggtcaaggtcaagcatcaggacaccgtccgcctccatcagctgcagcagctggctctcaaaaaagctgcggttgtaggcgtgggtcagcatatcgcgggaaacctcgcggtgatagtcgcaaagctcctccacgggggtggcctgcgccactgcgcccagatagaaggggggatcgtcctcactccagatgctgcgcagggcaatgcggtgccagtgcagctcgccgtcaacgggcagcagcatcgaaagctcggtgttggggtgggcactggtggtcgcgcgcagcgccttctggatgcggtggatatcctcctgcgtgaagccggatttgtcaatatcctcgggcaggtgcagctcggcggggaccttcatatgctcaaccgcccacgggtagaagcggaccagacccgtggtgtcgtcgtaatccatttggatgcagcgggcatttttggcaaaaaagtccgccttggcacgcagcaccgacagcacacgcagaatacggttctgcccgggcagcgcgttctcctccagcagcgtctccgagaggtgctgggcctcggcaagggcgttgcgcggggcatcggctgcggcggaggcacgcagctcggcctgcaggcgcggcgcggcctcctgcaggcactgcagcagcagcggattgaaggcgccgcactcgccgttcaggatcatctgtatggcggtgtcatggctgtaggcttttttgtagcagcgctcactcgtcagcgcgtcatagacatcggccatcgccacgacctgcgcggcaatggggatctgctcctccttcagcccgtccgggtagccgcgcccgtcataccgctcatggtgccagcggcagatggcgtaggccgttttgaccagatcgctctcctgctggaagggcagcttgtccagaatctccgcaccgattgtggtgtgggtcttcatcgtgtcaaattcttccctcgtcagcttgccgggcttgttcaggatggactcgggaatattgatcttaccgatgtcatgcagcgcggacgctgtgctgatcagcgatatatcggcggccgtcagcttgtagcggtcggtctgctgcaccagcgtgtgcagcaggatttcggttgccgtccggatgtgcagcacatgcaggccgctctcgccgttgcggaattccacgatatggctcaggatgttgatcatcgtggaattgcttttttctttttcgtagacctgctcggccaccagccggaccagccgcttctgcttggcgtagagcatcagggtgttgataacgcggcggcggaccacggcggtgtcaaacgggcggctgatatagtcgcttgcgccgaggtcgtaggcgcgctccacaaagctggacgcattctcggcagagatcatgatgacgggaatgtcgtcgatccagtgacatttcttcatcatggccagcacttcaaagccgtccatctcgggcatcataatatcgagcagcagcaggtcgatattctcgtccgactgcatgaccgacacggcctgcaggccgttctccgcctccagaatttcatagccgtcgcccagcatctctgtcagtatggcgcggttcatggcggaatcgtccgcaatcagaattcgctgtttcgcttcacgcatgctttcacctgtgcccttacaaaatttaacctgcacggggaagggggcgcaggcccccatactgcctacattatagtatatgactaccgtcaaaagcaacagatttgtgcaaaatagtcgaaaatagtcgaaaaataaggcaataccgcataattctaagtgccgatacggcgagcgaggtgcggcagctgctaagccaaaagcgcagataatactttgtgtattatcgagcattttggcaacgcagatgccgtaccgcagccgccggagcggtgcttaagccgtcaggcgggaattgtgcggtgttgccttaagcgcaaaaaaccgggcagcccccacggtgggcaggctgcccggtataacgcaacacagcaataagccacggcgggcttgcgggtcagtttctttttttgcgcggtacgatggcggccgctatgctgacagcggctgccgccagggcggggtaaagtaccagacagaatgcctgataccagcttggcacaaaatactgccagaagtgcggcagcgtgtcggcggcgttcagtgtgatgctgctcattgtcagggtcacggccttgttttcctccgggctgcaggggtcgaggcgcagcgcagccagacttgtgcggggcagcgtgtagatgatccgtccttcgcccacactccgggggaacacccggcggtcggcagagtaatcctcgccgacctttgtggtatagtacaggcacatttcccgcgcttcaccgtcaaactgtacagtgtagctgatggtgcgcaccacgcggccgtccacattttccaaaatcatctgggggtcgccgtccacggtggtcagtgtgccgtcctcgttctgggtcagccccaccagctgccagtcggtcacggccattgtctccccggtcaggcggccctgcgcacgggccacactgtcactgccgaggtggaacgcccccagcacgacccagacggccagcgccgccagataggcggtcagcggcagcgcaccgcgccgcccaaaccatttttgcagggccttcatcgggcgctcacctccatctgcatcggggcaaagcccgcatcggtcacgcggtagagcagtgtctcgccgctctgcgccgccgccagattgtcggtgaacagatcggcgtagctttgcataaaaatatcatccagcgtctggatatacagcaccgtgcagccgttgccgcgcacgatgccgtccagctcctcggctgtaaaggcgtggtagtaggtgtttttcacaccctcggcgggctgcagctcgggcaggcccagctcgccgccgccgccgatcatctttgtttcgccggtgtcggggtcagtcgtgactgtgccggagtaatcgaccagaatcgggtagaagtcgaacacggcgctgaaccagccctcgccgttgtcgccctgtccgacatagaacacacggtcgttaggggcaagatagctgcacaccagctcggcctcggcgcgctcggcgcggcggtcggtgaactcgctgtcggcaaagcccagcacactcagctgcggcaaaatcagctggctctggcggaacagcattccgcaggccagcgccagcacaaacaattcaaacacagcgtgcggctggcggcggaccgcagtaaaaactgctgtcgggccatcggccccgcccttgactgtgatctgcggcagcagcgctaccgacaggcaccccagcgcaaggatgaaccagccgatgtaatagctgtaaatgtagcggttgtagtc

SEQ ID NO: 14287 - DNA, 7175 bp, Unknown
  gut microbiota DNA sequence
agcgcaccgatgaccgcaatgcgcgccttgagccgccgcgatgctgccgccagaatcgccacggcaaacacgatggcgatcagcgcgaccacattgcggccctgcccgatcatgctcagcttgccgtcactcgtccagaactggtggcccatgtcagccatcgcagtgcggaactgggcctcgcgctcggcgtaaaagccctcgaccggctggcccagcagaattttgatgccgttgacaacgaccgcagacaacggggcgctcgtctcgccgacgccggaatcactggcgctgcggctgacgagccaaccgacatagcgcacattccacagatagtaaattgccatcggtgcggcaaaacaggcaacgctgaacccggtgcgggggagcagaccggccttgaaatcgccatcatcggcaaacagccactcgtccacagccaccagccccgccgccaccagtgccaatacaaaggtattggccttgatgttggccgacagcgccagaatcggcagcacagcccatttgggggccgaattttggcgcagcgccagccatgcggccaccgccccgccgaatacaaggcccgcgggcacatcgccgtagctggtcatgtaggtggtcgttaaataaatggtgtggttgtagtttgtgaagaagaacggcacgcaccacagcacggcggccatcggcacggccacgcgccacttgctgcgcgggatggcacccacaacagcggcaaaaacggaaaaatacaaaatgtcataaccgacataaattttccaatctgcataattaccgagaaattggaagaaatacgagagcaagggcaggccgggattctgggtcgcagcccacggtgtgcccagctcggcggtcgcgtacaggtcgttattgaccttggtgatcttgacagcggtggcccaaaggctcagctcgtcaaaatcggcggccatcggctggcgcacaaaaaagtagacggtaaacgccagcgccatgccccagaacagcacactgcccggtgtgaacagaatttgcagcgcatctgtgtgctttttgcgggtgagcagcacccaaacgccgcccgccagacacagcgcgtacaccgcccatgcggcggggtacagcacgcccgccatcgcggccagcgtcagcaccgccacaatcagcgacagcgccgtcagcggtgcgactgccgccgggacgcggcatttcagcgtaagcaccgcgcagccgcagaaaagggccgccacggcgaaaagtacgcagagtagttccatagggtagactccttcatatgggttgactgtaggggccgatgcctgcatcggcccgcggggcgtcgaggacgccgccccctacaaatgtgcaggaatgtaggggccgcacatgtgcggcccgcagctttcccacaaaagcgattttgccttttggctgcgggccgggcatgcccggcccctacggtgtgctttattttttccttataaaaagggaaatgaaagcggcggcgatacagggtccaaacgccagcaccagccaccagccggcagagggcacaaaccgcagataccacggccgcgcggggttcagctcgatgccggtgaacagggtcggcacgccgcccacactgtcggggtcgatgcgcagccccgtcacccacttgccgcccaaatcaaaggtgtagacgccgggggctgtcacccgggcaaagaccttctgcgcctcggtgtagtcggtctggccgggtttcaggtaatacagcgctacgccgcccgggggcagccggtgcgccgcgtccaaaaccacggtttcgatatacccctgcccctgccagtagatgcgggggtcgctgtctgtcgaaagataccacgcagggtcatcgtccggcggtgtccaccactcgttggaggaatagggcgcaaagctctcggtcacaaggtccgcagcgtccagatgtgtctgcggcatcttgccctgcagctggtagttcagcatcacgccgcagccgataaggcagcgcaccacccagaacacagccgccagcagataggccagcaccagcagctggcgcggcttgaaaagcggtttcttcatttacgccaccccgctttctgccacagccgccagtgtaaatggtacggcggcgtccgcgccctcaaaatgataaagggtcgcgggcatgtcgttcgtcaggccgccctcaaacagggggctgaactcccgctgcaggtagtcgtcggcccggtcaatcaggatataatcgcagtccttctcggccatgtaggccaccagcgtgtcaggcacgcagacggccttgtagtcgtacagcgtccagttttcgctctcgaccagattcatgaaatcgctgtcccagcggtcctttgtctcacccaggcggccgtaaaagccgccgaagccgttcacgacctgcgcggtcagctcgtaccggtaataataccaccgcgtggcatcatcgccctgactgatgaccagcacccggtcaggccagtccagcacggtgttcatcgtgtttgcgcggctttgcacatcggcgcgcagcgtgtacaggctgtcggccccggtccagaaccccgcagccgggatgccgcgccagcagaacacggaaaggatcaccgccgcagcgccgcccagcgcaaggcggcccagccgctgccgcgcgccgtttgccagcaggcagagcatagccagcatccatgcctgatagtagggggcaaggtaacggtcgtaatccttgagcatcagcccctcaaggtcggaaaaattgtagcagtagaggatcaggtggaacagatacagcgccgcaaagcagaacgcaaacccaaggtgcgccgcaagcacccggcggcgggccgggcctttttccgcagccagccacgcggctgcggccaccatcgtgatagccgccacggcaatgacgccgccgcccaacaggcagatgcgccgggtgaagaacgcgctgcccatggcggtcatgatctgggcaaatttttcggtgcggccgatgcccaaaagctgcttgacgccgcccacgaggaccgcgccgtagctcagcccctcactgccaacgctggcagcggtgtctgccgtgggggtgacggctgccgtatagcggccccagcttaaaaacgccgccagcacaacaacggccagcgcaccggcctgaagcagggctttcgggaaggcttttttgatgggcgcattcgccgcaaacagcaggtccagcccgatcaaaaaagccgcgatcagcccgtaggcaaagcagatatctttggtcagggtcagcacggccagcggcagcgcgaccagccaataggcgtgtttatggcgccccactgcaaaatagaggcagagtgtaccgccgaaaagcatcgccagcggcaggtcggccatcgcgttgacatactgcacggcgtagctgccggcgggtgtggccgaaaagaagtacggcagcagaaaccctgcggcaaacaccagaatgccctcggcccatttcgggcgcggcagcgcggcggcagcggccaggcaggccagcgccagtgtgtcgatggcggccagacaagcccactcagcccagaggccgaacggctggaacaggaaggcgagcaggctggtggcagggtaggtaaagctggccttcaggttgacggggtcggccacataaaacgcgccgcgctccaccaccattttgggggcaaggccccatgccgtgaactcgtcccactgggtaagcatcggctcttgcacacagaacagcacccagataaacgcagcaccgccaaaaaataaggtaaagcccggcgtgcacagggcgttctgccacgctttgcacaccccggcggggcgcaggcgcacaaggcccggcacccatacggcggccagtgccagcagcaccagcaccgccccggcccgcaggatgcccgcaatgccgcagagatacagcacaacgaccgcgccgctcaacaccggcagcggcagcagggcgggggaaagaccggattttttgcccaatatcgcgcaagcaccgcagagcagaagcaaaagcgcaagggcatagagaagatgcagcatgggagcctcctttcgtggaatgccttcccccttgggggaaggtggccgaaggccggatgaggggcgaagtccccgtgataacccttaaatgggctatagaggcaccgccgcccctcatcagtcaccttcggcgacagcttcccccaagggggaagcccttttacttataaatcgtatacaccggccccacaaaatagtgctggaacaagagcaccgcccctgcaaaggcgtaccacccgcacaggggcgcggccagcgcggcggccttttctgcggtcaagcgcggggcaagcgcacggcgggccagcgcggcagcagccaccaccagcagcagccagaccggcaggaaataccgcgtctgcagccccacgatgcgcaccatggccaccggcgtgtaggtgatatacatcgccgtcatcgcgcccaccgcatagatcagcccgaacacgcccagccagccggtgcggcggcggcccagtgcatccgcagcgggtgtgcagagcattgcggccagcagcagcaccagcggtgcggtcaggctgataaacgccacaggcatatccttccagccgaacagacccagctggccgataaagccgtcgttctcatacagtgtgcccagcaaaacagcgatgtaacgcagcggattcttcaaaacaaacaaaagctgcgcgccgccgttgacggctgcgccgccctgccgggcaatcgcgccgtagttgtggcgcaaaagcgtgccgtactgctcaacaccgaaggtcagcgccagcgcacccgccgccgtcagcacggcgtacacggcgcggctgaaccgcactttccactcagatctgcgcaccacaaagggcagcacgacccacaaaagattgaggtagggcttggtgccgttggcaaatacgcaggccagcgcatagcaaagcgccgtcttatcgttccatttctcctgcgtcagcagcgccagcatgagataatagcagcccagcagcgttgcgtcatagctcagggaggcccccatgtagagcgacatcggcataagcatgatgcaccaaaacgcggggcggcatttgtgcgcactgcgcagcgccgcatagcaaagcgccgtgtaggccagcaggttgaccagccgcccggcgtacaggcagcccagcgcccccagcccaaacagccgcgccaacgccatgcccagtgccccgggcaaaaacggcaaaatcaaaaagctgatgggctcagttacggaatctgccgcagaatcgcggctttcccagttgagatactgcgtaaagctgtcccggatgctctcgacccggccgtctttgccatactgttttaaggcgtaacctgcggtgttgtagggctgctcggcatgggtgtcggggtcagtgccgacaccggccgaggtatgggcgttgacccacgcgccgggaaacgccgcgaccagctcgtccacatccatcggatagccgcgcgcggcgtcaaagtcaaagtgccccatcgagatcgcgtaggtgcgcagataatggtctgtctcatcgggggtctgcagcggcggatttgcaaaggcaaacagtatgccgcacagcaaaatgcaggcggcgccccgtttggcaaaatctttgacccggcgcagcagcagcgccgccgcacacgccagcacagccaaccctacacaaaagccggttacggccagcggtgcaaggccccgggcgtccagcccgtaaaatacgcgccagtagtagctgaccaccacgcccagcgcggcgcacagcaccaacacgaaagcccaccgggcggcggggggctgcacggtgggtgaaaatttgcgtttgtttgacgaatttttcatagattacaggatatactgcccgaccttgtactggtccagattgccgcgcaggaactcgatggtcgcggcaaggccctgctcaaaggtgtactgcggtgcccagccggtcagattgcgcagcttggtggaatcgcccagcagacggttgacttcgctcttttcggggcgcaggcgctctgcctcgcagacgatcttggcgttggggttgatctgggcgatcagctcattggccagatcgccgatggaatgttccacgccggtggcaatgttcagctcctgaccgatggcggcatcgcagtcggcaatcgtcataaagccgttggccgtatccttgacatagttgaagtcgcgggtcggggtcaggctgccgagcttgatctcggtctggccggccagcagctgggtgatgatggtcgggatgatggcgcggccgctctggcgcgggccgtaggtgttgaagggccgcacgatcgtgacgggcagatcaaagctgcggtagaagctctcggccagacggtcggcaccgatcttggtggcagagtaggggctctggccttggaacgggtgcttctcgtcgatgggcacatactgcgccgtgccgtagacctcgctggtggaggtgacgagcacgcgctgggtgtccagctcacgcgcggcgttcagcacattcagcgtacccttgatgttggtgtccacatagctgtccgggctatggtaggagaagggaatcgcaatgagagcggcaaggtggaacacccgctcctgcccgcgcatggcggtgcgcacgccgttggggtcgcgcacgtcgcccataaagacatcaatttcattgcggatctccggcggcagggtgtcgatccagcccagcgagccgaaggaattgtacaggcagaatgcgcggaccttttcgccgcgcttgacgagttcttcggtcagatggctgccaataaagccgtctgcaccggtgaccataacggaatgtgccattgtatgctcctttattcaaggggacagtgccccatacttcattttattacaaaacagtataaccgatttcggggaagatttcaactgtaagttacgaatagtgaatgggtggttgcgtggaaagcccctcaggccccgcaggctcggccagctccccgcacagcggggcgccttttctcgcgggcttcgcccgcgcaaacggcctcccctctcaggggaggtggccgagcgtcagcgatggccggaagggctctgg

SEQ ID NO: 14288 - DNA, 1828 bp, Unknown
  gut microbiota DNA sequence
atcttcggcctgccccgcctgctggttgacgccaagagcatcgaccgcttcctgacgatggtcgatgacccgtacaactgcctgacgctctgctccggcagtatgaacgccaaccccaacaacaatgtggccgccattgtgcgcaagcactgcgaccgcatcccgttcgcccatgtgcgcaacatccatcacttcgagaacggtgacttctccgaggctgcccaccgcgattgctgcggcgaaaccggcatcatcgagattctgcgcgcctaccacgactgcggctttgacggctgcatccgccccgaccacggccgccagctgtgggaggaaggccccggcaaatgccgccccggttacggcaagtacgaccgcgccctcggcgttcagtatatgcttggcgtctgggacctgctggatcgtctggacgaagagaagaaccgctgattcctgccatcctctagttgctgtataaaaacaaaaaagccgctgcgcaagcagtggcttttttgttttggggaatgcgcagaccgccacggtaggggccgggcatgcccggcccgcagctttccctgtatcgcaacgttatctttaaaccgtaggggagggattcatccctcccggcagctttgcctcccttgtcaaagggaggtggccgagcctgcgaggccggagggattcccgcagctttgcctttaccgcccttctgccttccttaccccttcacctcattcaccagcttttcccctctcgcaaatgcccgcgcgttctccatcgttgtgatggcaatgctctgcagcgcggtccgggtaaaaaacgcctgatggctcgtcacgaccacattcggaaagctcatcagcaccggcacgatctcattgcgcagcacatcgtcggagaagttttcaaagacctgcccgtcctcgtcctcatagacatccagccccacaccggcaaatttgcggcagcgcagcgcgttgatgagcgcccgcgtgtcgatcagcccgccccggctggtgttgacaagcaccgcgctgtcacgcatcatttggatcgtctctgcgttgatcatgtggtaggtttccgccgtcagcgggcagtgcaggctgaccagatctgcggtgcgcagcaactcctccagccccacataccgcacaatgccgtccagcgcggggttacggtattggtcgcaggccagcaccgtcatgccgaagccgcagcagatacgggccatcgccgcgccgatgcgccccgtgcccacaataccggccgccgagccgtacaggttgtaccccagcagcccatcaagcgaaaaattgttgttgcgcaccttgatatacgccttgcagatgcggcgattcgcggccagcgccagcgccatagcgtgctcggccactgcctcggggctgtagcccggcacccgcagcaccgtgatgccgcaccgctgcgccgcctgcagatccacatgattgtaccccgcgcagcgcagcagcaggcagcggatacccacctgcgccagcctttccagcaccgccgccgagcagtctgcattgacaaacgcacacaccgcatccccgccccgggccagcggcgcggtatccgcatcaagattcgccgttaaaaacctgatctcacagccatattccgggtcagccgccagcacatcaaagtaataatggtcatactcccgcgccccgtaaaagacgatcttcatagcaatcccccaatccctttcagtatctgccgtttgcaggcatagtatacgataggtgttgggggatttctctttttatggcaacaagtcttatatttttagccgctccgttccgca

SEQ ID NO: 14289 - DNA, 171 bp, Unknown
  gut microbiota DNA sequence
atttttttcttctttggagaaaccagtttgtgaccggaataaatggacatgcccatacaaagcaatgaagaataggcaaagtatttatgcacagtcatagattttttgattccagaataaatgcatcccaacatacagaaaagtgcgcctaaggaccagtatttatgtgat

SEQ ID NO: 14290 - DNA, 1046 bp, Unknown
  gut microbiota DNA sequence
agaaaaatactctccagcaacttcgtttttgatgaataaaggtcagttttttgtttaactattctcactattatttgattcagtgatttttttcttctttggagaaaccagtttgtgaccggaataaatggacatgcccatacaaagcaatgaagaataggcaaagtatttatgtgcagtcatagattttttgattccagaataaatgcatcccaacatacagaaaagtgcgcctaaggaccagtatttatgtgatttcatgatttgatacctcctttgatttaactgattcaattataacgctttttttacgaaaacgcaacgcctgtacgggctgtccaagccgcagctcgaatttctgcgcaacgccagcgagggacacggcatcatcaagatgggcaacagtttactgccgttcaccaatctggaacccaaggatagtgatgtctatcagctcatcacaacgaaaccgggagaaaggaagaagcaagaatgattttgcataaagaaaaggcaggccgaagcccgccttagagttcatggcagtttagtgctgccagatattgttttccaaatcacgcagacgcgctttgtagtcgttaataagcgtctgcgggttttccgtgtccggaaagctgacaatatagccatcctcggattcatgaaagccgacaatgcccgtataacagcaacagccgtcacggcggataaaaccgtgacggctgttcagggattcgctgtgacctattccgtttttgcggtcaagcgctgtttatctgcggcgcttctttttgaaaatcatgaaaccgccagccagcgctatgccgccggcaatcggcagcatgacccaccatacagggggctttgctgcaggggccgggctgctttccggttttgcagtggcagcaggtgcggaggtcgggttgctgtccggttttacggtagcagtgggtgcaggggtcgggctgctttccggttttgcggtagcagcaggtgcggtggtcgcgctgctgttcggttttgcggtggcagcaggtgcggtggtc

SEQ ID NO: 14291 - DNA, 178503 bp, Unknown
  gut microbiota DNA sequence
atacgatgtattcagatggcttattaaaattacccatttttacaattcaaaaaatttcaaaattctcttgactgtttatagtttgtcacctctttttaagatagtaccatatttatatatattatgtcaatatctatgtcattttattatgaaattgcgattatcaatatgttctgaatcatatttgttattaatttccatatccccctatgtcctaattagcggccagtaataataatcctcataaatatcaaacgcagtaatgatatccattattttttcaataacatcacttaatgtatcagcctcaaataaacgccaataattttctactctttttgtatcgcaataaattacctcttttattttttgcgaatacaaactgttttctccaatcagcaaaataaaacgctgtttcttttttctgcgaatgataacactcaatctatttaaatgatatttactactaatgcatttatgaatggaggctgcatgtccagtgatagaaaacatgtcttttcctatttttctaatcatcccgtcttccattgctgctaccaaaaaatctttcaaatttttttcttccctatcacaaagttcagaaagatactgcaatgaaagcggctccccgccccactctattgctttacctgtataatcaaagatatgcagatagactttccaaaaatcatttaatgacttagacgaataacatcctctaaagttgatccatgccgttgaatcttttgtatgaattcttcttgttccatatgccgttattaattcttccaaacttttatgatattcttctcgctcaccgaaagctccattcagtttacagatcgtactttccaattctgaaaaagaatttattttctttttataacgttgcagtgtcttatttcttgaccacttttcttccatgagtttttcttcatatgccctgtcgatcgtatctacccgatgcattttagtctcaatgaattccgggtaaatatcaaatgtaacaggcacttcagataatttatatttcaattcagaatcatataatttaaaatcaacttttgctttttcagagagtcttttaacaccattttgaggcactataaaatttgcatacatacagccatcatattcatacttaattacatgatcagccaatcccagctttcgtcctaattcaaaaacttcatcatctgaattgatattctggttttcaaagtgctttcgcatttctctgtataacattactctacttgaattcatgttgtgtaacacatttaatgctatataatacatagttatctgccctcccacaaaagacgaatacgctctgcgaatcccgctctgattaacggtcgtcaaatgcaccgcatgaatgtgtgcatcttgctcgtgcgcaagttgcgcatcctcgcggagtattttttatgtaacagaaacgaagtttcttatttacataaaaaaagaagctgagacactgctgattgattctaatcagctggtgcacagcccctttctgtcttactcataatattttgctgcgctgtcacggaatttctcgaacaacggacagtacacattcacaatatccgcaaacatctcgcatgcaaaacttccatcataatcatgcgcaagctgatttcgcacttttaacatctgcatccgggctggcagttttacttttttccagattattcaggcatttgcaaaaagtatgataccggttaataaatctgctttccatatttgtgaatatcctcccgtaaaaattcattgtgaatactgtcgtagtcaaaaatgtctattttccgcaatgtttcaatctgttctaaatctgtttccaattttatcagattgttgcatccatacaccacaaaatcaatatcactcgttggtgtggatgttcctgttgcaaaagaaccaaataaatccagccgtttcaccccgttttttttgcagatttctgttacctgctcaatcagttctgatatcggcattgtattcatgtatcgtccctccagtcaccatcaagaacaatctctgtcatcctcactcgttattgacctaagtatagcggattactttttgaaaaacaatatccaatctctccctgcccataggcatttattccacataaatgccattctctccaacatgtatgattccatcatactgcgaaaggatttcttctcttgtatcatgtgtaatgactaaaacggtttttccttcaaactcttttcctgtaaacagataatgttctactgccgatttcatttttgcatccattgcagaaaacggctcatcgagaagtatcacctctgcattttttgctgccatacgcaaaaatgcgactgcctgtttttcccctccactaaaacgctgacattctttttcttttctgttgaatatcccttcaaaaaattccggccagatattctttcctacgctgtcgatcccatccattggataagaatgaaaaacggttatattatctacaatccccgctctgtaaatatgttcgttctgatccgtataggatattaattcagaaatgtcatagtttctgatatcttctccatctaatctgataacgcccgaactgtttttttcataccccataataagtttgaacaaggttgattttcctgctccactgtgtccgacaacagcatacttcatgcctttttttattgttaaatttatattttccaatgcaaaacttttccttttgaatgtcacattttcgaatgttatatctgaatttaattttttctttcgtggcaggactgtgacatgcgtatcctgcgtataagctaatacttttttcttcacgtccttcatggactgtattgccgtgaaattatagaggacagtgtcgatcggttcgatgaaagaagatacataactaagtgtggcaactccgactcccactgtgatctcatgcttataaaaaagaactgccaccactgcaaatgtaaatattttcacgaatttagtcgttaattcactcacgcctaataccatgctcttctttttcccatactgataccgcttttctgctgtttcatttaaaacgtgttcatgcttatcaagtatttttcctaccgtcatctgattaataacacgaaaaccttccaataaatccgtaatctctgtaacgtactccgccatctgttcctgatatgtacttcttgcgtcagtcagcgattttcctatcattctcggtatcaggatcgcaaatatcgaagtcagaattatcaccagcgcaattctccagtcaactccgaaaaacagcacgacaccatacacaattatcatgtttacgcagcgtatgatactgataaccggctccagataatcctgctctaacgctgtaatatcatttccctgtaaggaaacatattcgccaatggaatgcttatagaactttgaagattccatatgaaacaaagaatacaaaaaatctcttttcagtaaattttcgaattttattccgcctttaaatgcatacaacacacaaaaatactgtgataaagtataaaagaccagtaatgcaccatacgccaatatcaccatcacaatctttttgagagggctttgcagcccataatcaaacagccattgttgaagcaatggtgaaaaagccagacagataacgcctgccaaatcccataaaatctgggcgataatatatttttttgttttatatatatacgtgttcaatgtttttctccttctaaaccctggctctgatctctgcttttttcacaaaatggacaactaacaccaattgcctactttctgacataacgtgtattcattattcaaaaatttacatttataattttattcattctccgattatagaaagaataaaataatttataaaaagtcccacaaatactgccgcaattccaaatgtattttctttcaatataactatgcaaaacaaagataaaaagttgacaattgctgttacatacaatacatattttgcatcacccaatgcctgccgcacatacttataaactaaaagatagtaacaaaaaattattgttgaatgcatcttcttattaagatatatcctacctatttttactaatgttttttaactgcattatataaattagtataatctttatttgcttttataagttcttcatgcttcccctctccaacaacttttccctctttaagtatataaatataatctacctcattaagcattgataatctatgggtaattactattattattttatttttaagatatttttggatattatgaaatacattcctttcgttaatactgtctaaagcggatgtagcttcatcaaaaattattattggtgtgtttttaactaatgctcttgctatttctattcgttgcctttgccctccagatagcttaacgcctttatctccgatattagtattaaatttatcaggcaaactattaatgaaatcatagatttctgctattttacatgcttcaataactgcagcagcatcatttgatttcattaatatattatccataatacttccattgaacaaaatagtattttgtgatacaacagaaattatttcgcacagttgactttctgaaaatttattaatattaactccatttatattaatgcttcccgtttccacgtcccataagtgtaataataaattgatgattgtactcttacccgccccactgtctcctactattgcaattaccttattacgcaaaaaaaccatatttacattacttaagcatttctttttttcgttatatttaaatgatacatcaattaattcaagcctattgatgccttgtatatctatttgacttctcgattcttttatttgcagtgaaagcattgattctaatctatcaattgatatttgggctttcttgtattgagagatacattcagatgcactaattatgggtctaaatagttgccctgaatattgtacgaaaaccattaattgtcccatcgttatcgtgccccaaacaacatttaaaccacaaagtcctaaagtaattgttatagttatgcctgctaataagttcatcacattatttcttttattaacatctatttcaagatttttagtgcattctttattcttgtcaacactttcacatagtctattggaatagaacttcattccacctattagtgaaattggtaacaaatttgatataaattcgtgcacaaaagaattttgttcaactgatatcaattttgcttctcgtgaacttttatatattttttgattatatatcttgctcacatatccaaataaaggttgcatcagtaacgtgcaaacaaacaaagccggctgcattttcaaaatcaaaatactaactggaatataaataatcaaatctgataatgccaaaaataaagactgagataataaactttttattgcattgacatcatctagaatgcatgttatcaagtcacccgaattagcttcactataaaatttgccatcttgattttctattttatttatcagcagttttcttatataaccgcataattggactcccatatctatatatatgttattactatgatatttaaaaaaatattgcagcaaatataatataagcgatgcaataataagttgaagtaacaagaaaatatctttatgtacaattgcattgtcaacaatctgaactgtaataatgggatttatgtacatacacacagaacttatgaataaaaaaatcatggctttaaaatagctaattttatattttgatatgattatctttaatatttctgaatgccgccattgaattgatttgttcactcttaatcttttcatttttttgcaactccactagcaaattataaatcccacgtgtatatgcacattttacacctgatggtttaaacggatcccccgtgtatatttcgttgattattttacagcttcttgatttacaattattttccagaccacaccccatacacacgctattaggcttcttgctttccaaacatattttttgaaccgattttttatctaatccttcataaatattacctattttatatttaggatttcctactgagagataacatggaaataaatcccctaatggtgttatatgtatactcttttcgccgccagtgcaataatctcttcttgataaatattctctgttcagattgtctactagttcaaatgccccaattgggtcattgtcatataaatataaaatgacattttttatttgcttgaaaaataaagctacattatcattgaaccacccatcactaccataatcaaatgcaaaactaggtataattttatactcattataaatatgcataaaattttgaaaaaaaccttccacattattcggatgaatagtcattcgtatattaaaatgaatatcctttgatttcatcattctgataaacttatctatataacaataagaaccttcacaatttttatatattctgtttaaatcattataatattgtgtgccgtctatgctaacagaaatctttgcattttctattatgaaatcaattccattaatgatagtgccgttagtggttaaataaaaatgcatatttttattccctacttgtacatataattctttaattacatattctattatttccttattgagcaatggttctccaccatgaaatctaatattattcgcttcgttatcttttaagaacggaatgatatattttattgctctttctgcaatatccaatgtcatgatatctttacttttatctacataacaatatttacaacaaagattacattcattaataacccaaaaacatatatccataaattcttcctttcaaaaactctgcctatttgataggcagagtttatattattgacactacatttaaaaccaatttatttattttctatgttgtatctatgatgttttaatactgctttttaaaaatcatccgagattgactgatctgtgtaaatctcgcaattaaataatgttgaaatattgcctgtaaaatgcttacaatctgaatcgcatcccatagcaactactccatttgcaacaactgttgaatcaacatgctcaagtttctttacttccataattgtacctccctataaataaatgcagtgtccaaataataccaatgctattcctgcctgattcgtgctattacagaatctttggataatatgtgcttaccacaaacaggaactataattgaaacaataaaatatcctatccaaatcgctatcatcggtttcatcgtgatatacccagcatagtattccatcatccctgcaaatacattagaaaccaatggtatcaaaataacccctagtacaaacgagcccaataatgctaacagagagtaaataattccttctgtgcaaagcattttccgtaattgcttctcctgcatcccaatactttgcatcgtagctatttcttttcttctacttattatagatgttaagattacattgataaaattaacaagccctatccctccaataactacgctcataaaagtgccgacaatccaaaactctgatttcaaactgtcaaaggaagtgtaatatgtcttcgcagatatgtatgacatacttaaccattcattgctacattggttctcaatatattcttccatctgatcaatatctgctgcatcgaaagaataattcatcaatgtcgcattgctgatttttctcaactcatcactgcttaagtaataacaaaatccattagtagtaaattggcagtattctgttcttccccgattcatttttgccaaaagggtatattgatatttctgcccatccaatacgattgtaactgtatctccaacagcaaactctgaagacccagcagcactcataataatatattctccagaacccatcttacggagcaattcttctatgtctgctgtcccctctgttatctcgaaattagacaatacataatcatctgctccatataactgacagctaagcataccattattggatttgtacctggcacctgtactggttctgatatattgattgccttccttatcaatctcactgtgctgctcccagtcgggatactcaaaccatgactctcccatcggtgtgtaggcatacatagcccctccctgcaagaagccttcctgcctattaatctcatttataacagcttcgtctaaagcatcatcatttgtccaaaaatgtttatttacgttaaaataattactatttcctattacaaaatctgatttcatcttgctttgcaaatatttctccctgtttatcccatttgccaaaataaacgtacagttaaaaaggatcaggctaatgcttaatgaaatgataactaaaatcattctttttttgtttcttacaacattagctgcagcaagctttcctaaacttcctttttttacttttcttttcttcttgtgaattgtcacttccccatccgtacatcgcaatgcggctacgggtgagattgagacagctgttctgaccgacttttttgcactataatatacagttatagcaacaaagattgccgtaaacaatatcgcatgaactgtaattccatattgataatacccctcatttattgttgttgtccttgcgatatacggaaacaaaatattgcctaatacgcctccaatcacaataccaagcggaattcctaatatcatcagcatggaagcctgaagccttacaatcctgataattgtttttttgtcagtccctatcattctgagcagtgcccaaaaatggatatcctgtgtaatagatatttcgaatatgttatagatgactaaatatcccgtaaacatcaatagaaaaataattaacactatgcctatcatagttgacatatctattgatgattgtgtctcatatgccggatttatacttacatccaaaaaattccctgcctgattttccatggtataaccacattcattcaacttgtcagtgaaatatttaaatggaaatattttattatcaatcttaacgtccatcattcgaactccagaatattcaccgtcaatcaagtacgtattctccaattcagtagcatatttatcaacaaacgccttggaaacaataatactttgtctgctgtatacatcggactgtataatccctacaattctaaaatctattatatataactggtttctcataataaatttcaaagataccgtgtttccaatttccgccttcatccccatttctcccaaagttttactgtcgcatataatttcattttctttcattggaactgtgccctcagaaggagtacagaaatgcgttaacatataattttcatccatataagacatttcaattgcctgccctgacaatgactcgttatttatctgcgatgaaacaaataagcgatatccaacatttctactgccaaaagcttgttgcagtatttcataatcatcatctgagatatactttatagtcgcaaacgatgtcgaaccattcagtcttatttcctctttttgctgtgaatctgaaatactactaaatatcgtcattaacaccgtaaacataacggtagttagtgcaattgcaattaccaatattacatttctagtttttccttccaacatttttttgatagatagttttctttctattttcactgcagattctcccttaagctattattttaccatctcttatggtaattctacgatccgccaatgcagcgatttcattattatgggtaattaggataatagtctgattaaattttttactggtcattttaagcagtgccaccacgtcttcgcttgtcttactatccaaattccccgttggttcatcagcaaggacaatctgaggttttgctatcaaggcccttgctatggcaacgcgttgctgctgtcctcccgataaattattgggcatttcatataatttatcgcgaatacctaaaaagtctatgatttccgataagtattttttatccactttttcaccatctaactctactggcagggtgatattttctagtacattgataaccggaataagattataactctgaaaaataaatccaatgttttttcttctgtatgcaatcatatcttcgctatccatttcggataattttgaaccgtccaaaataatttccccataggtaggacgctccaatcctcctaacatatatagtagcgtcgattttccactaccgctcattccaacaacagctacaaactctccacgcttaataccaaaatctacaccatcaattgctttcaccaaattatttttattaccataatatttacgcaaaccctgtacttctacaatgttcattttatacttccccccataccaccttttctaacaaatctttattatttttacaaaaatcatcaaaatatgcactatttctatctacgtcatatctttcaatgcaattgtaacaaaataaacgaacagaacaatctttacatctatcttgtctttccggatgaatttgcagaaaattgtcataacctttactatcaattattacattttcaaaattttttatttcctcattattcaattgatctaagtgtcctaagcaatatttttccttatttaatgcaccacatggaaatatactcccatcgctatcaatataaacactttttcttgccgctaaacaagttctgcatcttttttcttttcttatatctgataactggttagaattattttgtaccatatgatatttttctatctctttcggaaaaagagtactgttttcgtcagctctgccagaatgcgcaagaggtcgcaaaacgggcttagttcctaactctctgtttaatgtagcaaactgctttttcaacttctggttttccttagtcaaaaccatagataatgagattggtatatcacctctcatcttaattaatttgatgctttctattactttagagaatacatttttacctctaataacactacaagacacctcgtcaaccccatctatactaatatcaattgaatcaaataattgaattattaattccacattttcgttgttaataaaggttccgtttgtcattaatattaatttcccctcgaaattttttctaaaatatgtggctaacccaaaaaaatcctttctaaccataggttctccacctgtaatacaaatcatatctggatttaacttcaaaattttatcaaaacggctgatgatgcattcgtactctatatctatttttcctacagaaagtgtagcattttgacaacaatgcctacactgcaaattacaagtgtttgtaattgaaatggtaactactttatattttatcttgttaacttcatcatcatttttctcacttaaaagttccattctaattaattcattgtaaaaatttatcagatatgtcctttcttgttcactgaattcatctaaatattcctgtagcctttcttttttcaaaccgtccatcattatgtcataatttaccttaggtactactacccacattccattactgctattagctatcagcattttattatctttttcaactaaatatgcaaatttggacataatatacttcttatcaaatcgaatctccatcgttatcacaataatctcccttcattttttacaagatgttagtcggcaaattggttggtaatctccttgagaaagtttcactggacgcataatacatgataatcatcctattgaaacaaacgattgcatgataaacttatcaccgtggagcattgctcctatacgatagattagaaactatcatactttttctcaatgtacactttttcccccaatgtatagcttatttaataaggacatctgttatccaaatctcaagttgctctacaacaagaaagttcttatcttaaatcaatccaaaatttactcattactaaaataagttcttattttttcgtatatatctatagataactctttgctgcaatagtcattatatataatcttgagtgtatgatccttaaatataatgaatagctgaacagaacctttaattgcttctactcttataagagcatccatatctctaaatatatccatcaatttacttgtatcatttgatgccaaaacgactatattgcttttctgaaaatacgttttccaatatacaaaactataaatctgtgatttctgttctaataattcttctggtatatattcaatatcataaaggacgctatctactctagtactgattgcacataaattgtatccatcatctttgaaactgttcttgagaatatttaatgtttcaatatcattcaatttataagattgttctaatatcaatattggtatatctatcctgttttcaattattcgtgtatttactatttgtctgattttattttgtttactccaaaaaaagcgcattggatttggagatactaccatttcattgcctaaataaaccatatgttttttatatattttatatttttctagcatctcttttgagtctactataatcgtgtccgcctcttctaaatcagtcacactaaaatagtacatatctaaactattagaagataaattagcaaagtatgcagatgatatccaatctggctcattgcaagaagccattggatatgtataatattcgtggttatataattcattttttattgcactaatacttttatcatttaccttttctactattcttgcaacaattgtacttacatatggtgtggcaaaactattgcttttcggagtggtaataaaattatctctcaccactagcacatgctctgcattgacttgtatatctatacctaagctaatgctatctaaatgtttatgatccataacttcatcgcttgctacaccaatcacattggaaaaagaagctggatatgttagtaaacccttgtttgaggtggcagcaataatagtcattcctctgtttgcatagtaatttactaatgataataatctaggacgattaaaaggattcactgttcccaaactcagattgactatatatatgccctcatgaaagcaccagtctaatgcttttttcaggtcagatattgagccaaaattatcatcttccaatacttgaatacataaaattatagcatttgggttgtatttttctattatttttgcacataatgtaccatgtgaaagattaccagttttcggaatatttgatggtctattctgaaatgttgccgtgtcatttagaaatactatgttttccacatctacaacattgttatctactaaggtgtctaatattgctactttatgtacagtcttcatatgtatctccattgtaaaactttcttcatttaactagactctttatcattcgcttttcatgaatttgtatagggaaacttttgcgtcacataattttttatactacgctgctttcattctgatcagaataaacacgcatttaattcttcccacacatatactattttcacctctctcctactacagcactaatttattattgcttttgttctcctattggtttttattatatagaatccatctaaattcgtaatataagtaaccagaaactaaaaagtttccatttatgtatataccaaatttattaacatacattgtctttttcttttttccgctatataatttatttcaaaatatatgttgattagaggttattacaaatgggtgtcagaaacgcaggaaaagcaatccgtgaagcacgattaaaggctggtttaacgcaggaacagttatcagaaggggtatgttctgttctctcgctttcaagaattgaaaatggttctgccggtgtcagtccggtgacttttcaggcacttatggctcatgcgggtgcttcctgcgaagtttacccaatctttgcaggcagaacagactttgaatgcttctattcgcttaatcgtgcacgcttctttctgggttcctggcagttaagtcaggcatatgaggaattaaataagcttgcagaatggcactttgcagataacaaactctattatcaggaatacctttatttaaatggccggcttcaggtgcgctctggctgtgcagaccatcatgcaatttatgaccttttttcttccgcgctccatataacacgtcctgaaattgactattcagattttcatcatcttttattatctattgttgaaatcgaactgcttattggcgttgcacaggaattactttatctgggaaaaagcgatctttgttataacatctgttcacagattgctttctatctcgcaaacgctgaaattgattatctgaaaaaagattatttgtacgcagaatacgcgattgtctacacaaagtatttattagaaataaaagattataaaaaggctcttgccatagcagaccatcaccgtcataaaatggtacaaaattccgaggattcccctttattagaattaacatttctgacttcggttggctattatcataccggtgaaatggaaactgcctatatttattttaagaatactttttatgccgcacactccatcgaaagctactacgcttctatttgcagaaattatgtttcaagtgaacatatatttgtattagatgattatctctcacaaatggacgatattccacaaattacatttccaatgaaaaaagccataaatacatccgatctaacagatggtacttatgactttttttccgcagatgttttgacgattggcagattaatccatgagcttcggacagaacagggactttctctgactgcattatgccagggattatgttcaaaatccaagctttcaaaaattgaaaatgacgccctgcagccggatgtctttctgaccgaagctttattacagcgtcttggcatatccgaacgcggttttactttctgggggagcgaacgtgaaagcagactttatgaattaaaattcaaattaacacatacacgtctgctgaccaacgaacaaacagaaaactatctgcaccagtttcactcattgatcacgaaaaaagataacaccttaatgcagcgttatacttttgactataacttattgtcatcttctcccgaagaatgtatccagaacctgcacaccgcactcgcttatactctaccggattttgacattcgctttatttataattaccacctgtcacacagcgaactttccattttaaataacattggattccaatatcgaaacattgatggaaataaaagcaagttatattttgcaaaattacttgactacctctccgttcattctctcgatatactttttataaataatgtttttccactgacattgtataagtatgaacacagtttatatacacaacatcattatcacgaggcggctgatttgtttacaagttcgaatcaccaactactcaagggaaatttagccacctttggatattttctcttttattattgccagtgtcttgcagaatgccagcaatatgaaccggcaacaaaatttgcacattatgcatgcagtatccaggaactatatgaattaaatgctaattctgaagttctccaaagagagttcttcaaagaattttctatcaacatcatctaatttacatttcattctcaattacaacttcagcacacgttgcaatcccttcactgcttactccaccaaacaatgtaagcagtgaacaggcaagcatcattcctgcaaccatctttttgattttgtttttcagatttctcttcatgtttttctctcctcttcatttgtttttcatctccattttatctgcctccaccaaaaaagaacactacataaacggaaactttttctgttccatttatgtaatgttcctttcacacttatcatttcaatttgctttacattccgttttcaccaccatgaaaaccttattttcctgcgaccgctaccccatgaaattcgaccgcaaatggtccgtcataatctttatctttataacgctcggtggaaaatgccatatctttctgtaattccaacagattgccgctgacggaacctccggttaccggcgtcactttctcaccgtcagaaagatatgccagacggatctcaccgccaaaatatccgcttaagctatccatggagaagtcagaaaaacttaccacataaaggtatggttcttttttcatctcctcaagagttttagtgccgttatccagttttaccgcactgtagattccggtcggctcaacacctaaataatatgcaaaccgggcatttccatgaattgccttcagttctccctcttttaatagtgtaagatctttcatcgggattccctcacttgaataaggattggatgcatggagcgtgatatttaatttttctccctgcactttttctccctgcacatccattcctgcctgatagcctgaataacccggatagaccatgccagaggatgaccggtctatgtaaaaatctatcagtgtgcgcacattttttccggaaagaagcagcttatagtttcctttttccggtgcttctgtcgcccttgccctgtcgcatacccgttccaatgcttcttttgcctgtgccgtcagtgcctctgtgtcaagatcatcatatgcgaactcctgatactgctcgacatcctgtggtgtgatacactgtacgacaaactctccgttcacactgtttttttcataagaaacatcaatgccctctgaattgtaaatcgcagtcgttgttttttccatgaaaaactcagccgtattgatgaatgcatcttcctgcacatccacacagtaaagcgcttttacaaatgcatctccgatctcctcaaggctttttccacagagtgtgctttttacctgcactttatcctcttttttcccttttggaagttcaaaaaatggattttttacaagggaagctgcgtaataagcaccttttaccgcctcatctacttcctcctgtgtcatctccggaaaaatgttgatatttgcggaaccacgcattttctttccgtctgtctcaaaatcacggtaaatggtaaccgcagacaccgcatcctgtttcatcctgcgcatatcaagttctttttttataaaataaagttctgcaccctcgaccgttttctctgtcacaagataggtttctatctgaaatttccgaattgcctgtaatattttttcacgcatctgtctctctcctttttatcccaatctgattctggctttgatatatggaccgccgtcagatacttttacccactctttgtgtccttttccacaataaccggttcctgcgagtttgcactcgtctgacatcatggaaattgattttaataagtccggtacatatccggtcagtacaatcggagaaaatacttttccggtaaatttaccgtctttgatctctcttgcaatgtcaactaaacactggattccccagtttttcggatcttccatgccgctgcttgcattttccagataaaatccataggaaatagaggcgatcatatcctccactttatctgtgcccggctcaaagaatgtatttgtcatccgcgtgtaagctttatggctgttcttttcccttcttccgtttccggtcggttttgtgccaagtgccatagcagcctgtgcatcgcagattccggtctttaagattcctttttcaatgatgacggtatcctgcgcaagtgttccctcatcatcaaagaagaaggttgctgtctcagatgctgctgcagcgccgtcatgcatggtaactaacggggatgccacatattcgccaatgtatttttctgccagcgcacgttttttcacaaacatatccatttcaacgccatgtccgaacgcttcgtgtacgatcatacctgtgacatccggtgcacagatgcagtcatattcgcccggagtgatcggttcacttgtggcaagatcgttgagtttctgcactaatggtgaaatttttgtttccatgtcatctaaaatttccattccgccacagccggagcagctgtcaaatgccaccttcatctcctcgcccttcgggatcagtcccatgatcatgccgtttgtccacatgacgttctgcgtcatgtctttatttggagataaaaataatttgtgataaatctggtaaacgcatgctgtctggatctcaacgattttttcatcctgcgccattgctttttcacgcaatgcgccaaggcgttttacgatctcctcatcgcctaaatcttccggcagaacttcatagtcagtgcttttttcaaaatgatatgcttcatccggaatttccggatactgtttcacttttatgtcatccggaagcttttttgcccacggcatcacatgattttttacttcctctgcaatggtgtcaatctcattctcatcaatgtggctgaacgcatattctccatagctctcgccatcgtatacttttaccacatatcctaactccacaaacatgttctccgtaatgctgattccctgttttgaaatggtgtactgtttgccttttgaatctgtcatcagaatggatgcatacgaatatgtctgcagcaatctatctaataattgtttcagaatcggtttcttctgatcgatcagtctgctggatgtaaccttcatctttttccccttacctttcctacgttctttgtcgttgtcgactatctcagtataggaaatggaatgtggtttgtaaatagatttcggataagtggtaaagtttctgcagtaagacgcaaaaaagacctcacagaatgttttttccactctgtgaggtcctgatgtaatctcttatttaaagtaagctacgccggattcaaaaatcttgatatcctgctctccgtaaatgttcattgcaacgcttctgtcacgtctttcggagtgagccatcttaccaagtacacggccatccgggcttgtgataccttcgatcgccatgtaggaaccattgacattccactcttcatccatggttggaactcctgcttcattcacatactgggtagcaacctgtccgtttgcaaagagcttgtctaaccattcctgtggtgctacgaaacgaccttcaccatgggaagccggattgcaatatacttttccaagctccgcaccctgtaaccatggagatttgttggaaacaacctttgtgtaaaccattttgctcacatggcgtccgatcgtgttgtaggtcaaagtcggtgactcagctgactgtggacagatctctccgtgtggaactaatcctaatttgatcagtgcctggaatccgttacagataccaagtgcaagaccgtctctctcatttaacagcttcatgactgcttctgtcatctttgcattgcggaatgcagtcgcaaagaattttgcagatccgtccggttcgtcaccggcggagaatccgcctgggaacataatgatctgggactgttcgattgcttttacaaactcatctacagattcacggatatcgtttgcattcatgtttttgaatacctttacgatggtattggcacctgcacgctcaaatgcatctgcactgtcgtactcgcagttagttcccgggaataccgggatgaatacagttggttttgccactttgtttttgcatacataaatgctgtctgctttgtataatcctgttttaacttcgtccttattctctgttgcacgggttgggaaaactttttccaatgtagctgtccatgcgtgtaatgcttcctccatggaaattctcatatcactgtaaataaagctttcttcctcatttacccatccgacaagtgcctcgtatcctgcaagtcctgctgcatcgaatgctgcttttacctctgcaaccttttcagccggaacttctgccacaatgttaccgaatcccggagcgaataatgtttctttggaaacatcttcatttactgtgacgccaagcttgttaccgaatgccattttgctgactgctgctgcaagtccttttccatcaagtgcataagcggatacgatcacgccagcctggatcagtgcatggatggtatcgtataatttcatgacctgtgcgtaatccggaaggtcaaattcatcttttttgattgtaaacagtactaactggtctcccactgcttttaattccggtgtgatgatatctttttcttttgcgatatccacagcgaaggaaacaagtgttggtggaacatcaatatcattgaaggttccggacatggaatcttttccaccgatggatggaagtccgaagccgatctgtgcattgtaagcaccaagtaatgctgcaaatggctggctccagcgttttggatcctcgctcattctgcggaagtactcctggaaagtgaaacgtactttcttgtaatcaccgcctgcagttacgattctggataaagattctaatactgcgtaaacagatccgtggtatgggctccagcttgataagtatggatcaaaaccataagacatcatggtcacggtatcgcagtctccttttgcaacaggaagctttgcaaccatggactgtgtctctgtgagctggtattttccaccgaatggcatgtaaacgctgttcacaccgatggaaccgtcgaacatctccacaagacctttctgggagcatacatttaaatcagcaagctctgtcatccatgcagctttcatatcattatttgcaactgcctctgctacttttggtgttgcgatttttttgaaatagttgtcttcttttacaggcatctcaacttcaacattggtttcctgatgtgcaccatttgtatttaagaatgctctggaaatgttgacgatttcttttcctctccactctaatacaagtcttggatcttctgtcacaactgcaacttccacagcctctaagttttcctctgctgcataacccaagaaggtctgtacatcctccggagcaacaacaactgccatacgctcctgggattcggagattgcaagctctgttccgtcaagtccagcgtattttttcggaactttatctaaattaatgcgaagtccgtctgccagctcaccgattgctacagacacaccgcctgcaccgaaatcgttacattttttgataatatgggcaacttcctcacggcggaataatctctggatcttacgctctgtcggagcattacctttctgtacttctgcaccacatacagaagtggactgtgtattgtgtgccttggaggaacctgttgcaccaccgataccgtcacgtccggtacgtcctccgagtaagataatgatatctcccggatcagaagtaagtctctgaacggcacgtcttggagctgctcccatgacagctccgatctccatacgttttgcaacataatttggatgataaacttctttgacataaccggttgcaagtccgatctggttaccataagagctgtaaccgtgagctgcctcgcggacaatctttttctgtggaagctttcctgctaaagtatccttaacggaaacggtcggatcagccgcacctgtcacacgcattgcctgataaacataggtacgtcctgacaacggatcacggattgcaccaccaaggcaggttgctgcgccaccaaaaggttcgatctctgtcggatgattgtgtgtctcatttttaaagttaacaagccactcttctgtctgtccgtccacttcaaccggcactacgatagagcatgcgttgatctcatcagattcttcctgatcctgcaattttccttcttttttgaggcgcttcatggcaagtaatgcaatatccattaagcagacaaacttgtcggaacgtccttcataaagatttttgaatgtattcagatagtcattgtaagtctcttcgatcggttttttataaaatccctcatcaaattttacatcttttaactcggtagagaatgtcgtatgacggcagtgatcggaccagtaagtatccaacacacggatctctgttactgacggatctctgtgttcctcatttttaaagtagttctggatatgtaagaaatccttgaatgtcatggcaaggttcaaagaactgtaaagttctttcagctctgcttctggcatcgtttggaatccgtcaaaagatgcaacatctgccggttcttcaaagttctgtactaatgtctccggtttttctaaacctgtctcacgggaatcaaccgggttgatacagtgatgcttgattgcctctaactgctcgtctgtcacatccccctcgatcacataagtggtcgctgtgcggatgaccggctcttcctcttcatttaataatttcacgcactgctctgcggaatctgctctctggtcaaactgtcccggcagatattctaccgaaaatgtttttgcgtttcctaagataaattcttcttcaaaaacagtatcaaccggcggctcagaaaaaacagtcaccagcgctttctgatatgtctcctctgaaatattctctatatcataacgaatcagttcacgtacacctttcactgatgaaattccaaggtagctcttgatctcagcctgtaactcttttgcttttactgcaaaagccggtttcttttctacataaactcttcttacattgctcataaataatcccttttcctttcgcgatgcatttttatcttccgtaagtatagcatatagtgttaaattagcataattaatatatttaatttgttttataagagaaattaatattttataactattcagaaccaaggcaattttcataaatttgcgaatcatgcttgcatgaatgagcataattttgaatagctcaatacaaatgtattgttcaaatcataagaattgattgacacaattataagtacgtcttataattatatctattcaggtgaactgcctgtcctcaaatgattataatttacagatttcttttccgaaaatctgcaccagaaaggtacacacatttttatggatattaactatgagttatataaggttttttattatgtcgcaacctctttaagtttttccgaggcaagcaagcagctctatatttcgcagtctgcggtcagccagtcgatcaagacgttagagaaaaaattagagcagcctctttttatccggagcaccaaaaaggttcagttaaccccggcaggaaaggttcttttaaaacacattgaaccagccatgaatctgatccagcgcggcgaaagccagctttttgattccggcagccttggactcggtcagttacacatcggtgcaagtgatacgatctgccgctattttttagttccttatttaaagcagtttcataagaagtttccgaatgttccgatcaaggtgaccaatgcaacttccgtaagctgtgttgacctcttagagcagggaaaagtggatttaatcgtaacaaattttccgaatgcgcacttaaaccactcttatatccagaaaacagtctgcaattttacggatgttttcattgcaaaccctgcttattttaatttgaagcaacaagagattccgttcgaggaattgaaacagtatccgattctgatgttagaccgcaagagtaccacgagtgaatttttacacaatctgtttttgcagcaccagttagaattgatcccggaagtggaattaagcagtaatgatcttctgatcgaccttgcccgcatcggacttggaatcgcatttatcccggactactgcttaagccgtgaatccaaagatctttatgtcgtaaaaacaaaagaaaagctgccttcccgccaaatggtcgcctctattaatccgacactgccggtttcgcagtccaccgaggaatttttgaagcttctgccggagttgtaaattggtggggaatataaagtagtgcaggcagattttgtagctgtgtcatagtttatgaaaggcagaaattagagccaatacacaagtcaaattcttagtatgtacaaaacctgctaatttacgtttattaaatatgcttaagcttggcaagttcctctttcaattggagtaattcagcatctttttcggctagcatttttttattttcagtgataatgtcttccaattgcttgattttggcattgcggtttcgttcccaaaactcagcatccgctcttgccctagcttgctgacggattatttcatcagaatttacggtatacagatcattggaagctttcaataaatctggattattttgtgcagtcatacgcaattcctcccaagtcgtagctttaaaaagtcttgcccagcgatcaatttcataatacttatcttcttccgtggcaagttctatctgcgttaagtctaacacatgaatcgcaaatttactactataaagatgtccggttttcttatttcgaagctcgtaagtggcaaagaactccggttgatcatgaaagagtgtaaagtttaaaaatccaatgctgtgaaccggaagtacttcgttatactgttccccagtattgagctgatcaaaacttctggccgcataactgatagaacgctctggccagttgtattcgttcgacatctgcatttccagatcaataagctgttcgttattcaaattcacacgaatgtcgagaataaagtctttgtctgcaattgcggttccaagttcaattggattcgtgatcgtcacttcatggatattttctttttccagatgaagcaatgcaccgatcagtgcggtgagcacctgcttgtctttctgcaaaatggcacgaaacatataatcattggtgaatgggtaatcgatactgccagttgcagtttcaaaagatgaaatgttttgtaaggtcatgtgtcctccttcgtagatatgaaattgattgtggttgaaaaatgtggcgatgctgccagactttttcgaatgtctaaacacagataagataatgaaaaattatgattgcagttatgggacaactgcaagtaatctgcgatggtctaagaataacatatatgaacttggatgtatataggttgttttgatatttaataggaattttagaaagtgaaaatatttgaataaccagagcaaacaaggtaaatggcggattttgagctacattcataacataaagcagggcagatatcaaagtctgtgcacaagtcagtcgttgcgttaacaaaaagaaaaatcgtacagacaaatatgatttcctttgtgagctttgcgaacaggaacatcatatttcgtctgtacgatttttctttttcttggggctgtgattgacttgtgtatggcttctaattcacgttatcgaagcaaccgcaaaatctgcccgcattacgccatactgttgactgttttatatttgtagagcatctccgcatgattctgttcttcaatctggatgtcagccaaaagttttctcacgcccgggtcaccgaatgcaaacacttccgtattataagtggaggaaacaagtttttctgtgccaatgcagtcggttgcaaggaaacagtccgttttcttatcctcggaaggtgccatgctgtaggtagcagccgggttgtaattttttccgtcactgtcattgcaatcgcaggaaggaacttttccagacagcacctgtgtcagcgattccaaatgtttctgctcttttccatgaaggtctgtgaacaggtcaatgagaacctgatcttttgcaagtttgctgtatctctcgtatttttccacgcaggactgctcctgtgtctgtaaatctttgatcaccgttgtctctttttcgctcaatatcatctttctacctctttccacggacttaaaactccgtacttttttcacgatgatattatgagtcaaataaaatattattattcagtgctttccctaaaatctgatacagcagcggacatggtcataaattttttcggtgtcattccgtatttcttcttaaattcgcggtgaaaataagacagattgcaaaatccacaggacaatgccacttccaatgaatttgttttaccattttcaaactgatccgccgctctctccaaacggacatttttgatgtattgcacacaggacatccccatgtattttttgaaaaaacgcataaaataatactcactgaaatagcagattccagccagcttttcaatggtcagttcttccatataatgtgaaccgatgtagcttaaaacatcctttaattttcttgcatgctccgtcagcagtgcgtcttcttctgtatttctgctacaatatggaagcaaaattgctacaaattgtaacaaataagatttgatgacaagctcatatcccggtgcctttttttcatatgcagcgtttattttttcaaacagaccgtctgcttttttataaagcggatgttcttttttgatcacaaatggcgggatcagtttctggttcaaaagcggcgttaaatatcggattgcacagatatctgcggcgtttgccccaagaaaattcatgtggaatacatatgtctccgactgcatccgctcctctttttcgttggaaatcgcatgaagcaccgctggtggcacaaaaatcagatctcctgcctccacttcatacgtttccagatgaatctgatatgtgcagcttcctttttcaattctggtcagctccgcttcctcatgccagtgggctgtgacaaaaggataatctttccacaatggtgtcacatatttttgcagtggaaaaatttcttcgccgtgtctggcgttctcatgctgggataaattcaaagcagttttgtacaataattgtttcttattatgcaagattttctcttttctttgttatatgataacactatcatacaataatatctaatatttgggaattcattttttatgatattattgcaaatgtattttttccaaaatatgatgcttgtaatttgaagtctgcaggcactcagaaaggcatggttgtttatatgaagaaaaaatggtggcacgataaaatagcttatcagatttatccaaaaagttttttagacacagacggagacggaatcggcgatttaaagggaatcatttcaaaactggattatttaaaggagcttggtatcgacatcatctggctctctccggtttatgaatctccttttgtcgatcagggatacgatatttccgattattataaaattgcagaacagtttggcactatggatgatttcgacacacttgttgctgaaatgaaaaaacgcggcatgcatctgatcatggatctcgttgtaaatcactgctccgacaaacacgaatggttccagaaggcacttgctgacccggacggcccttatgcagattatttttatttccgtgaagggaaaaatggcaaagctccaagcaattaccgctctaattttggcggtcctgcatggacaaaaattcccggcacaaataaatattatttccacacgtttgccaaggaacagcctgacttaaactgggaaaacgaggttgtccgtcagaaaatctatgaaatgatcaactggtggtttaaaaaaggtatttccggtttccgtatcgacgccattatcaacatcaagaaaaatcttgattttccttcttttccggcagacggtgcagacgggcttgtctcctgtgataaaatgctggcttctgctcatggaatcggcgttttcttagaggaaatgaagcatgaaacctttgacaaatacgatgcttttaccgtaggcgaggtatttaatctaaaagaggacgaactgcgcgaatttattggtgaaaatgggcatttttccaccaaattcgatttttccgcccatgtgctctcttacggggaacatggctggtatgacgctcccgaccttgattttacgcggtggcgcacggctcttttcgacacccagaaagctgaccttaacatcggttttgaggcaaatatcatcgaaaatcatgatgagtcaagaggtgctacgcactatcttcctgcacatgccagaaatgaagccggagttaaaatgttagccacaacttactttttgctccgcggtattccttttatctatcaggggcaggaaatcggcatgacaaactgtgtccggaacgacatttccgaatatgacgacatcagcaccaaagaccagtaccaggctgcgattaatgccggatgcacaaaagaagctgccctgcacgcctgctatgaaaacagccgcgacaacgcaagaacccctatgcagtgggatacctccccacacggtggttttacaaccggcacgccatggctctcagaaaacccaaattataccgagattaatgtagccgaccagttaaagcgttctgattccgttctctctttttacaaagaactgatcgcactccgcaaagcaccggaatacgtggaaaccttcacttacggaacatttgccgctgcttatgaagatgtggaccatatgtttgcatactaccgcaccaacgaagaaaccggacaacgcattctgattgccggaaatttcggcacagacaccgtgacactgccgcttaaaaaacaagctgaccgtgtacttcttaccaatggaaaaactgcggatgtaattttaaccagaaacagagaaagtgcttctcttgtattgggaagctgcgactgtgttgttttattattatagagatgaagtttcaaatgtgagaatttccgttctgtcatggaacaaggcgtatcggctacgccttgttccttgacctcactacacaccttattttattttctcatctaccaattctccattttcaatcacaacgattctgtctttaaattctagtatccactgaggtggttctccacttctattactctccccttctaagcgaactacattttcatcatgtccccatatatttcgagcatacataactttcaaactagatttgttctgatccgttgcccccgaaaaattcaactcatatcctggtttcccttgcagtgtaagataagccgtatctccttgaaccccataatttaaaataacattttcatacattgctacgccatgtgtccaatgaaaaccaactcccataagaactcccgacaaaacaaacgctccaacgaatatgcctaatgctttttttctattttttttcttgattttcttaattaaatttacatcttcaatttcttcatttgttatcactgaaaaattatcaatgtcccctgtcatttcttgatagtatttttgacattcttcacaatttttcaagtgtttttcgatttcttgattactttctttacttgtcaacccatcaatatataaaggtaacaaatctctaattatttcacatttcatggttactctcctttcttattctttgctttccacgataaaaagtcactcttgcccaattttcatctttacccataatttctccaatttctttaaatgtaaaatcgccatttaatctcaaatacataacttctcgcaccggctcctccaacaaatgaagttttttatacaactctattacttccattttctgtattgccgaattttctgtaattttctgacaagtagtttcttctacatattctgccactacttctctatcttttttctttagctctttataccataaatgttttgcaatcgaacataaccatacatatatcttacagtcaccacgaaaactatcaatagattttagcgcttgaaaaaaagtttcttgtgtgagttcttcgcttaaatgagcatcatgacaaaggctaaataaaaaattatatacttgtggcatatattttcgatagatttctaccatttcttccatactctaccctcctttatctatatgtactttacatatatttttcgttacacatttttttaatttttaaaaatgacgtagataatgttaccactacctacgccatttctcattacatctttgaaatatttactccattttctttcaacttttactccaaatttactccattctaaaaatctgttacgatattttgcggtattctgcgataccttttctttgaagaaaaatgtctgtaaaccttgatttcaagcgaacttttcaatattctcaagtgctttattctgttgtcagcgatgaggaataaatattattattcctcatcgctggacagagattatttcacttgacaaatcatttttttcgtgcttataatagcgttaattgaagcagaacacaggctttgacgggaagaagtacagttaagcggaagatacagaaagctgccggctgatgagaggcgcatcggaatcttaattcgaatacatccccgagcttcacaccgaatttgtttttgataccggatcataaattttccgtatcctgcaatagtaggctgtgacggattagcgcacgttaacagcgccggagtgttgtcggacactcacgaaggtaagcagtgtgagctgcttatgaattaaggtggtaacacgagttttagccctcgtccttttctaaggacgggggtttttaatcgttcactcaaaaaaagaaaggaacccaaacaatgacattatatgacgaattggttgcccgtggcttaatcgcgcaggtaacagacgaagaagagatcaaagatttgatcaacaacggaaaagcaactttttatatcggatttgatccgacagcagacagccttcacgtaggacatttcatggcactctgcctcatgaaacgtctccagatggctggaaacaaaccaatcgctttaatcggtggcggtaccgcaatgatcggtgatccgtccggacgtaccgacatgcgtcagatgatgacaccggaaaccatccagcacaactgtgactgcttcaagaaacagatgagccgtttcatcgacttctccgatggaaaagcattaatggtaaataacgctgactggctcatggacttaaattacatcgacgttctccgtgaagttggtgctcatttctctgtaaaccgtatgctcactgctgagtgctacaaacagcgtatggagaaaggcttaagcttcttggagttcaactacatgatcatgcagagctacgatttctacaccttataccagaaatacggctgcaacatggagttcggcggcgatgaccagtggagcaacatgttaggtggtaccgagctgatccgccgtaaactcggaaaagacgcttacgctatgaccatcaaccttcttttaaattctgagggaaaaaagatgggaaaaacccagtccggcgctgtatggcttgatcctgagaaaacttctccattcgacttcttccagtactggagaaacgtggcagactctgacgtattaaaatgtatccgtatgctgactttccttccattagaggaaatcgatgcaatggaaagctgggaaggtgcacagctcaatcaggcaaaagaaatccttgcattcgaactgaccaaattagttcacggggaagaggaggcaaacaaagcaagagaggcttcccacgcactttttgccggtggcggagattccgcacatatgccaacggtagagttatcctctgctgattttgcagacggcgatatggatatcctgtctcttctcgtaaaaacagagctcgctccatcccgttccgacgcaagacgtgccgtagaacagggcggtgtctcagttgcagacgagaaagtaaccgatatcaggacagcttacaatgcagattccttcggcgcagatggacttgttgtaaaacgtggtaaaaagaaattcgtgaaagtaatcgtaaaataatgaactgtatcataagaaatgcacaaatgagcgactatgactccgtcatccgcatcttaaatcaggggcaggcacttcatataaactggcgtcccgatatttacaaacccaatgatgcacttctgccaaaggcagtatttgaggaaatcgtaaaaggcgatactttctatattgcagaaaatgaaggaaatgtgatcggaattttagaacttatcttccggcatattgaatctcctgcacaagtgacacgggacattgtttttatcgacacaatggcggttgacgaaccttaccgcggcatgggtgtcggacatcttttctttgaaaaagtaaaagagctaaaagcaaaaaaaaatcttgacggcattgaacttcaggtgaatgcaaaaaataaagctgcctacgagatgtactgtaattacggatttacggaaaaatccattcatatggaattactgtaaaaactatatttacctaaaaaaaggacacatatcacaatgttatatgcattagaggatatgtgtcctgatcttatatatttctatgcgttttattggttgacataattttctatccacttaattgcataaagaggaatattcgtcatccaatcctgctctctataatccgacattgatgtccggactgcataagatggttgatacttttcacaaaaagctttcaaactctttgctttcagattttcttccgctttcacttcaattggaataacagatgtttttccctgaactaaaaaatcaatctcccccttggaattttgcgttgaataatagtaaggtatcactccgacatctgatattaactgctgcaatatatactgctctgtcagtgctcccttaaattcagtaaaaatcttatttccttctataatcacttttgcatccagatctgtcatcgctatgagcaatccaatatccactaaaaaaagcttaaaagcatcaaaatcaatatatgctttcaatggaagatccggtttttgaatccgctgtactttatgaatcaatccgcaatccaataaccattgaattgccagttcaaaatcctttgcccggctcccctcacgtacctgtccgtaaatatattttttattctcttttgcaagttgcatcggaatcgagttccacacaagattcagtcttggaacaagctttatttctgcatgctttgaaaagtcctgctgataataattaataagattcttctgaatcgcacgaacacgattataatcctttttttccgaaaaatcttttaccacctctggcatcccacctacaaaatagtattcccttaaacgttctatatatttcgttttgaacactgttaccatctgcgtatcacaactgtctaacatggaaacaaattgtttttctcccattgcgcacaaaaattccctaaaattcagcggatataaatcaagaaaatctaccttcccgactggaaatgacgtaccctggtgtaatgcaactccaagaagtgatcctgctgcaacaattgcatactgaggtgcattttcatgaaaatactttaatgatgtaagtgcttttggtacttcctgaatttcgtcaaaaataatcagtgtattctctgcctcaatagaaactcctgtctcagcactgatcgccaaaaccagtctttcaatgtctaaatctccttcgaatacctgtttcatacgggcgttattatcaaaattaacataggctgtcttctcaaaatactgttgaccaaatgtcttcatgatccatgtttttccgacctgtcttgccccgcgaataatcaatggttttctattttcattctctttccattctttcattcgtgataatgcaaatcgttccatgagtcttcctccaactcctataatctataagaaaccattaaattatttccatatatctgcattataaaattctaccccacaggtgtcaacattattaaggatgtaaatatgtgtttaatcaacacttttaaggacgaaaaatgtataaacatatcatttcttccggcgaatcgatgagatttcctcccgcagctaccagttccacatggcagagtgcccttccgaatcattattaatttcttcgatcacacattcatgctcttttgttttccggtcataatttatcccaacgagaagcaaatttccctgataatctttcagacttctgcagtactcatttctttttatctggttaattgctccctcggcagttctatcccacttcaaaggtaacccctgcattagaaaacaatcgcactgctcttatttcttctcttcgtcaaccttgcggaagttattgaaatcgttcacgatctcccgcacgcaccagacaagtgtatcgaatgcgcccgcctcatacagattgatcagaatcattccgaccgggattgcaaggatcattccgaccacactgctgatacggtagccgatatacataaaaaataaagaagcaaacggatcaagtcccaccgtatctccaatcagcttcggctgtacaagctggtgcaccacaagcgtaacgatatataaaagcagcattccggctgccattttataatctccggtaaaaagcttgatgactgcccacggacagagcaccgttcctgttccaaacaccgggagcatgtcaagaaaccctatgccaaatgcgatcagccatgcaaaatccacacgcaggatcataagcccgatcagaaggatcacatagatcactcccatgattttaaactgcgctttgaaatatcctccgactgcctttgcaagctggctgcaaatatttctgcttttttctaaaaatgccggtgagagatgtttttcaactccgctgatcagcttatctttatccgcaatgaaaaaataagttgcaagcaggctgacgaccacactcacaagcacatccggcagactttttgcgaaatcactgatcgttgccagtgttgacgtatccaatcccgataccagatttgtgaaaaaattctcaattgctgttccaatctggcttaaatccacattctgtgtaaacggaagcctctctagcaagccctgaagctggttgattgcctcagtaaattcatttcctgcatttgctgacatcgtcggcagatacgctgtaaaagcagtaagtccttttacgagcatagagcctgcaccgtaacacaccagtacaataagaccgatcaccaccacgatcatcagtaccgaaccgaattttcgattgatcttaatgtatttttccaaaaatcttacgattggattagcgatcagcgcaaaaatcagtccgatcacaaatggcataaaatatgcgatcatcttcggcagcaaacatataataaaaagtaataccacaatcgctgccagaaaattgcaggcaatttttaaatattttgtcttaagatcactcataacctctccttttcaaaaaatgtatccaattcttactatcttttttatctgaagtacagcaactcatgaaaaacgtgtcttcgaaaattttgttaattcttcacaatcctctcaaccttaatcaaagtttcgcaattacctaatataaatcacattgtagcacacaccttcctgaaaaactccaattttctgaaggttttatactttcttaaccaaatctttatttttcggaaagacttttcctgccagaaccaccaaaaggcttacgaaaaggagaaaataaaagttcaatcccctgctcactaacatggacggaagcagacgatccgccgcaaataccggtgcaaaaacggactgatacatcagctccgtaatgccctgtgcgcctggaagcggcagcatatcgactgcaatgtaaaccgatgcctgtaaaatcatgacctgctgcagggaagtccccgactgtcccagcccaagatacaccatatacgtgagtaaaaacacactgcatctctgcaaaaatgtaacaaacaggatcaccattaattttcccggatgctgtttcagccactctacagcctgtctatagttttccgtaaatgcacgcaccttatccatgcgcgctggattttccttccagatgccaaggcggatcatctgcctctctacccacgctccggcaccgatcatccactccggaaaaagcatggctgcaagtacaaccataaccacgatcgtattgagcgcaagtcctaacagatacaatgggaaaaaagaatgtaattccgttttcagcgttccaccacaaaacagcaggattccaacgcctaaaactaccagcacaaatttgtaaacaactgccacggtcataagcaccaccgtactgtctgaacctttctgtccatctttgttcatataataaagctgcaccggctgtccgcctgtcgcggacggtgtgattcccgaataaaaaaatccgataaaggaatactggatgcattgaaaaaccgataccgccgttttcttttctaaaatcccatagtttgttccggcagctttttttgcgcttgccatagactccagcagataccagatcatgctgccttccgcacagacaaaaaacaatgccagccctgccgcagccacaaggtacggaactgacattgttcggactgcccggtaaatttctgacagattctgtccatgaaggaacgtataaaacgtgagaaccatcattccaagaaagaaaagcaactgcgccatctgttttttctgcccggataacttttccttcttttttctgcaaacacccttccgcatatctgtcagaccacctttcttatgccattttttcaacagcaaaaacctgctgctcccgcacgttggaaagctcgactaattctcttagacttccctcaaacacttttttctgtccgaatttttccataaaatctttcggtgtgacgagtgaaaaatgtttttcccactgacagacaccgtactcctctaacactctcgccacataggaagaacaggtgtagtgcctctcctgataaaatggaatgttccataaaataaacggcagacctgcaaccgcataatgataatgaaatctttcctgcattgccagccataattcctgccggattgcctccttttgtgccagcgtgcattcgacgctgcacaccatataatcagccgttggaaacacggtcagaatttttcttttatcttctttttcaaacccggcaagaagcgggattgccggatttctgcgtccaacactgtatgcttcctcaagttcttcatccattgacagtaccacatggatgtatttctgttttatcacgcgccggatgatccctgcaaaaaagcccggtgtatcaacaaacgctatgtaaatctgtgccataattttttccccgttcgttctttttctgctgctactgtgttactggaactgataaatttttcttgccatcctgtaaccgccgattgtgatttttccacccaattttccaggaagataggtcagaccactcaatgtagagcaccgcagccggtagtatagtgccttgtcatgagtgcgtacctgctcccacatttttttccgcttttcccatgcctcctctgttttgatcagaagtaaatggatcgatgaaatagacagcatgatcgaaatattccgcatcatataaactgccagtttcggatatttctttttgacttcctttaaatccacactttctgccacaagctctgtcacccggatctgctggtcgatccgtttcatcagcactttctcattgaccgactgatcttcccttcccagataatagtggtacaagttaatatccatatagtaaagactttttgcataaggaagtggcttataggaaaacagattatccacataaaaagtatgctccggcagctttatccccgacgctctcaacactttcgtctgaaacatcaaagagtgcataataaggtactgggaaggacggaaatgcccgattgtattccagtcacatattttttcctttggaaacacgtttttataattcatcggcttttcgatttcttcgtccagatgatcgtatacataattgcagatgatcaaatccggaaatgcattttcaaacgctttcaattgtgccagaagtttcagatatgcctctttatcgagccagtcgtccgaatccaccactttaaaataaagtcccttcgccagctccagtcctttgttcacaccggaaccgtgaccgccattttccttatgcactgcgcgtacaatatttggatacaaagcttcatactcgtctgcgatcgctccggttttgtctgtcgatccatcattgataatcagaatttccacatcttctccgccgaccagcaaagaatcaatgcatcttctcatataactttctgaattgtaacttggtactgtaaatgtaatatatttcatgatttttcctccaaaaattgtaacaaagagctgctttgtaactctttgtgcgctaatgcgcataacataaaaagaaccgctatgccctgaatctttttcagagtataacggttctttcttaaaatacacatgaataaatctaaagaaaagttaaagattacctatatgaaatgttaaatttttaatagctcgatcataaaaaaccagaccagaccataataagtgacgactgctaccagatcattcacggttgtgataagtggtcctgacgcaactgccggatcgaccttgatcttatggaaaaacagtgggatcgtcgttccaacaaggcttgagatcaccattgcaagcaacagtgatacgcccacgcagcctgaaatcaaaaacgaatagccgaccgcatttcccttgataaagcacacataaagtccgataaataaaaatgccataagtcccagaaacagaccatttgcaaaacctacccgcatttccttaaaaatcagttttagtttgtctttccggttcaagttttcatccattaacacacggatcgtcacggcaagggactgtgttccgacatttcctgccatatctaaaatcagagactggaaacacatgacgatcgggatcacggcaaccactgtctcaaaaattccgactaccgaggataccaccatgcccaaaaacagcagaatgatcagccacggcaaacgttttttcatactctggaacgttgtctcctctaaatcttcctccgcggtaagacctgccagcttggcatagtcgtctcccatttcttcgtccacagcttccacgatatcataggctgtgataacacctaagattttttcctcctccgataacaccggaatggaatcctctgcgtaatcttttaaacgctcaatacaatcactgatcttttcatgagcgttcacatacggatacgaagttgacacaagatcatccagattctgataatcccttgccacgatcagatcttttaaatcgatagctccataatactgctcattttcatctactacatatatcgttgaaatattatcgttctctcccgcctgacggatcagctcatgcgtcgcctgacggatattcagattctttcctatgacgataaaattcgttgtcattttgctaccgatctcatcatcttcataagacaagatcagttttacatctttttccgcatcatcatccagcagatcgacaattctggtcttagtgtccgcatccagattctccagaacatcaaccgcatcatccgaatccatctccgaaatgactctggctgcattttccagattgatctcctgcaaatactctgctgcatcctctgtataggaaaggatctctgcaatatattcctctccaagcaatggatagagcttttttctttcctccggtgtcatctgctccattgcatctgcaatatcgctttcatgatagtcggatattttttcaagcaattcctcttttccgagattactccggaataatgctaataattcttctacatatgtcggttcttttaatacttctttttgcatttttgcctcctgttctccctataataagggcagctttataggaaaattgcgctgcaatcttcctaataaagcacaaaaaaaccaccgctttacttccattttctttcaagcagtatgtttttagtttctgctgttctagtataggaaaataaaccggtggtttcggaaggcaaataaaaattctttatctacgattttttattctcattcaaatatacacaatatctgcgcaaaacaggacgcaccccgctcctgttgtctgaagaaatggcatccatgcatgttctgccctgtgccaaaacattccaaaatccatcggttttgttctttcgccccgcactatcacaactgtccatgcatgtcacctcctgaaaatttatgttttttctatctgtaccccgctttgcaaatccataaatctgctcacgagccacaaaatcctttgctattatataattgtcatttaaaatggtcaaccagattttcggtaaaatctgtgtaatctttaaatggcaaatcagacgcctgatcacatcatctgtaaaacttatctgtccttcataaatgcttcgatctcgtccggatcacggataattgcctctgagagacactcgcagccgttctctgtgatcagcagatcatcctcaatacggattccgatctcccactcgtcaatgtaaagtcccggttcatcggtaatgattgcacccggttgtaatgtctcattgcaagccgctgtgacatcatgcacatcgattccaagatgatgagatacgccatgcatataataagtatcaatctcgtcctctttttcgatcagaccaagcttcatacatccctctgctaaaactttctttgcgacctcattcaactcttttaatgtcatgcccggttttgcagtctttgcaacctcacggtttgcagctaaaacaatgtcgtaaacctgtctctggcgctctgtgtatgttccgtttaccggataggttcttgtgatgtcagcacagtatccgcggtattttgcaccgagatccatcagcagtaaagaaccatcctcgcagatgtcaaggtttgtgtcatagtgaagcattgttccgtttgcaccgcttcctgcgatagtagggaatgcagttccctccgctccattatagcggatcatatattcaaaatctgcctgtgcctgatattctgccattcccggttctaaatgtttcatcacatactgtaatgccttatcggtaatgccgatcgcctcccgcacaagtgctgcttcatccccatctttttgcatacgcagttctgcgatcacctgcgaaatatttttcactgcatgtcccggatatttttctgcaaattcttttgctttgatcatattgtaatccggcatgtcctcaagctgatatctgtaacagtcaaaatacaggctgtcgatatcttcccttgccatcatgcggtcaacagcgccctcaaaagaatctaaaaacatcacattatcgatacctgaaatctcttttgcctcatccactgtcacttttcttccgtaccagcgctcctgtgtcgggtctgcttcttcgataagcaaaatcacctgctcctcttttaatgtctttttcatcaaaagaatcatatggtctcttcttaatcctgtcagataaaaaaagtttctgtctgcctcaaatggtgcatattcatctgcactcacatgactctcaatcccggaaaataagatcagagctgactgcttctccattttctcaaaaacctgttttcttctgtctgtaaaattcatgattgctctcctttgatctaaaaatttaaaaaggcaggttcttccatctctgaaaaagcctgcccgaaaaacttaattggttatccctctatgcctctgcgctcatctggattctcgctgtgatctcttttacttcagccattaaagcagaatacatctccatctcgattccaaccggcgacatatgcggatgctcctgtttcatacggtatgcctgtaccagtaaacttctcttcacatcttcaagttctaaaagctgttctctgctcataaccaatctcccatatactttttatcttttgcgtcttactatatctcgtagacgcacctcaactataatagcatatatggtagattttagcgcatgaaattcatcggcaaaagtaacaatatttttcctgacatttagcacatttgtctatacccggaaaaaatttcatcactttttacaattgcattagcgtttgcagtgcctcattttctacaatacattttccatgttcttttataaatgcaatctgcgccggttctgcataccgacacttattgtattctacaattgtaaatgcaaacggcttcaattcctctctggaaaaatggatcagatccatgacaagataatatttttgccggaatttataaaaactgcatgcaggcactttttcagtaaatggtgtcagacggatcaggcggagcacttcatccagactggaaaattccagactaaacggtacggatgtctcaaacacttcgctctcatcttccgcttctgctttgtcagcctctttcgcctgtgccttctttgtgtcctgactgtattttgttttatacttttcgaggaaatcatcaatggcgctctgtttttcctcctggttcatctgcccaaactcattgatcttgtccggtgcaagctggtttaaaagctgcccgaccgtatccacaagattcttgaagctcatctcagaatcaccaccaaacgtgatcgccatgctgtgatcctgcaaaagctctgctttcactaccggggaaatgttctgcatactgatatcactcttctgctccaccagttctaccaccgcacgcataaactcctgcgtcacctcggtattgccgatgatctcatcgatgttgtatcccatttcctgaatctcttcctcagacaatgcacatctgatcttattttcacctaatctctcaatttccatatgtattaccttctaaacatctgttgatgctttttgttcacagctattatcctattttttcttatatttgtaaataggcgaattatggtctgaatgtgggacatagaattttagtatagatgaagatggtttaaaacggaggtattgaaagagccagtccttggtagggctggctctgctgtgttatgttgattttatactggccgcttacgccattgtaggttctttctaataatcgcctcaacttcagcaacgcttgcttatcatacgtatctattcatcaaataatctcaacctcttcacaatctcctctggttccggcaacattgctttcatagcttccggtaaattattccgcaactgatatgtagccacaccaatcggagaattaatattctttaacgcatattctacataagttttatccttgttcttgcaaataataatcccaatggagggattttcgtctgacaatttgacctgctcatccaacgctgtcaaatataactgcatctttccagcgtattctgcttcaaattcacctatttttaactctatagctatcagacttctcaaccttctatgaaaaagcaaaagatcaatatacaaatccctgcttcctaccattaaatggtattgatttccaacaaatgtataatctccacccatttctatcaggaatgctcttatgttatttaccaactgcatttctaattcgtgttcagagtattccggtgacaattctgcaaaatcaaatgtatattcatcttttactgcaagcttagcttgtactctccgctcaactggaagtgttatatcgaagtttgtctgatttaataagtatttctcataagtctgtgcctcgataaagttcgttaaaatgcgcttagtccaaccatatcttttcgtcatttgaatgtaaaattcacgttgcaaatcatccttacatttttccataatgatgatattattgctccaactaatttctcgcaccagtggtgcgaatttttcagaactacgataagtcaaataaaaattacgcattctccatagattggctgctgaatagccttttgcacctggaaactctttttgtaattcggtcgaaagtacctggacgattgattttccccaacctttttctttctgttgtctatagatttcttccccaatttcccaatacaaatttatagtttctgaattgattaatttcaaaacctgatattgttttttatgaatcaattcctttaaatcatccacaagtggttcataccccacgatttcattctttcccatacgtttccccacttctcgcaccagtggtgcgagttttattcacgcttcacccatctttttgtgtcatgcatagcaccttcaagattctacaaacgtctctctacctcagtatcattataagtaagaacccctgcggaatcaacttaattttctataggggcactgctttgtctgtaggtctgctcaaggtgatggttgaaaagagccagcctatgttgactggctctggctacctcttttgctactttctcgctaaatttttctgcccaaagtcctatctccacatatctgccacaaaataggttagtgccgtccatgtatacacggaatagtatattccgtattcgtcgacaccctcttttaagatcttctgtgcctgttcttttgtcagaaaagaaaatccatcaaaacattcacttcctactgcaccgtcctgtgacatgcctgtcaatgtatccctgtgcagcacgatttttacaagtccattgctctcgtccgtcattcccggcgtgctgaaaaggcatggattgatcaccgctatctcgtccgtatcctgcacctcgattcccgtctcttcctttaactccctcttggcagtcacaagcagcggttctttctcctctttatctgccggatcaatgagtcccgccggaacacttaataaaaattgtcctgccggataccgaaattccctgtttaataaaagctttggctctccctcggacggattccagatcgtgatacagctcaccgcatccggaagcatattttgaaattcttccgtagacttcactgccacaagatcatctgcgctccgtcttgttgcattatagtaatgtctgccttcggcatactgaagatcaaatactttgataaactttgtttccaatagcgtttttatattctgttttgtgattttgggacgcataattaacttccttccttaaccgatgattgcgaaactcctttacacaatactttacattgttctatattcaggaattttataaaaatatactctgtttcatttttacgataatttacacccgatagcggttcaggcaggaatatatctcctgaattcttgggattgcgtatccaccggagataacgccatgctctgcggcaaataccattccttcctgctctaacttttgttctaaccactgtgccgtttctgaaatggtacgctttccatccaccagatgttccacagtatatttcaaaagcagtcccagtgccgccgtctgctcgctgtcgatcaactgctcgatatagcgcaggtcgacattctgttttccaagcataaagccatccactccaagcgtctttaccttcaagcgctccggctcgccttttttcacttctccgctccggtagtccctgcgttttaccgctccattcctgtctttttccatgacacggtggctatccggtaaaacaaatggttttgctgtctcctgcatgattggaaattgtccacacaggttctttgctttctctgtgatatccacaggttcatactgatccatctggatcacagtgtctgcaatgtggaaaaatgctcccgaacttcccgcaaccagaatggttgaaattcctgctttttcatacagatcccttgctctggataaaaacggtgtgatcggctctttgtccgggcttaccactttctgcataaaggcatcccgcaccataaaattggtggcagaagtatcctcatccagcaaaagcagtctgctgccagcctcaaccgcttccacgatgccagccgcctgggacgtgcttccactcgcatcagcagtcgaaaaatccttcgtatccctgccgtttggaagatcattgataaacatggaaatatctacgtttttgataaatcttccatcctcagagcggagcttttgtgccgtttcatctgcgatcacatactccctgccatctccggcaatatgattgtatacgcctaattccaacgcatttaaaagcgtagattttccatgataaccgccgcctacgatcagggtgattcctttgggaactcccattcctgtaatcttaccccggtgcggcagttctaacgtcacacgcattgtttctggagaaacaaattttacagactgcttcattggcttggaagagataccgctctcccttggcagcacagagtcatccgccacaaaagcagccagtccaagttctggcagcttctcacggattgcctgctgatcttctgccagttccacagcctcttttactttttgcgcattcagatttttataataaaaagactgctccacgcactgtggcagatattcaaataagattttttcgagttcttttgcattgatcgttcttccatttgcaggaaacccgactgcaaatctggcggtaatctctttttcactgatttcacatgctgtcctctgcagcacttcctgtccacagtgtgtcactgaaatcagcccgcttttcccggaacccttcgctttaaagttaaactgattcacttttgccgcaaaattgcgaagcagttcatccgccaatgcggttcttgtcagcttatctttcattgcaaatgccggaaatccggctgccttcgtatctactgtcaccctcacatccgatggtgccgcaaacggatcgccctgcacatggtcaattgacaatatgtatttggggaactggtaacttccgcgcagggatttgtataatgggtaacttttatggtctattgtttttaattgtgattgtaggtcgttgtatgattgcatggggactcctttttgtattgtgtttttattagataattgcgaaactcatgaaaagctaaattgaattgtgaaaaattaacaaaagacatgaaagacattggggaaccgccggtacttagaaggcaggtacaactgtaagttgttcctggcttcttagcaccgttgcgagtgacacatagcgagagcgtgtcttgaatgtttttgttgattttgaacaattgaaagaagagtaggaggagtttcgcaattatctattatgtttttatgaaatttttgtgctatttgcccgtctttcttatttgcaaatatgtaccgcctctaattaattacttcatttgactgaaaactatgaaaaagtatcaaataggatttctttatagtatccatgatatcacataaatgactttatttggcagatatttttgaacatcaaattatgttaatgaacaacctaagaaatttcccacctgtcacgttaggaatatttcaatctacgctcctacaagaggagcgacgcccatacgtgatgatttacgacaagtacaagctatttcaatccacgctcctacaagaggagcgacaagacagcttcagtcgacatccactcattatgctatttcaatccacgctcctacaagaggagcgactttaaagctattttatgtttttattatgtgaaagatttcaatccacgctcctacaagaggagcgacacaagcttccggggctatctgttatgaatcgctatatttcaatccacgctcctacaagaggagcgacatacacgcgattaatataagagggggtgggtaaatatttcaatccacgctcctacaagaggagcgacagaaaaacaaagttttttgacatactgaactgctatttcaatccacgctcctacaagaggagcgaccctgtcaaggactgtaaacgagagccaatctataatttcaatccacgctcctacaagaggagcgacggttctatgtgaaagaatccaaaacagaggcagatttcaatccacgctcctacaagaggagcgaccaccagaacccatgtataaccttgttcctcaatatttcaatccacgctcctacaagaggagcgacagaaattcagctatcttttcattctcggtcttttatttcaatccacgctcctacaagaggagcgactatacgatctggaacgtcatttgtccgacataaatttcaatccacgctcctacaagaggagcgacaatcgccggatccgcttgtaatatcagctttataatttcaatccacgctcctacaagaggagcgactgttcgttatcatccaaattaaactcatccataatttcaatccacgctcctacaagaggagcgactgtgctctgacaaggtgacttcctgcgttttctatttcaatccacgctcctacaagaggagcgacaatagtacactttatcttttaaaagtcggttaatatttcaatccacgctcctacaagaggagcgacgcatgatgaatcccaagagacgaaaacgcctcttatttcaatccacgctcctacaagaggagcgacaaacgtagcaaaagaattaaagaaactcggaattatttcaatccacgctcctacaagaggagcgacggcatatcgacaatgagtttccagaagatgaaacgaatttcaatccacgctcctacaagaggagcgacgtcaaatgcaccagaagattacatgtgggaacttatttcaatccacgctcctacaagaggagcgacgttgcaggagataaccgatgagcaagcaaaacgtatttcaatccacgctcctacaagaggagcgacattctttcatgtttttctcgctcctttctctttatttcaatccacgctcctacaagaggagcgacaccctctgcaaactttccgacataaagccacttatttcaatccacgctcctacaagaggagcgacgaatcagtgctactagcgtcctttatcgtattaaatttcaatccacgctcctacaagaggagcgacataagaaacattatcactttcagtgcaactaacaatttcaatccacgctcctacaagaggagcgacctgtccatttcctgcaacatcttttgctcctgcattatttcaatccacgctcctacaagaggagcgacgtcaaacagcagtaactcacttggcaagaagataatttcaatccacgctcctacaagaggagcgacaaatgcgttctccgtcatccggatgcagcaacgaatttcaatccacgctcctacaagaggagcgactatttcagcggatgaatatgaatatatcacaggaatttcaatccacgctcctacaagaggagcgaccgcactcaaggcagcaggattcgaggtactgacaatttcaatccacgctcctacaagaggagcgacccgttcatgacaccaacaacattttggaacacggttatttcaatccacgctcctacaagaggagcgacattcgcaatctttttcggaatctgctcaaagcagagatttcaatccacgctcctacaagaggagcgacggcaaaaatgcacaattatccttatacttatctgtaataattattgcatagtatctataaaatcccatcaacactacaataattatttcatgtaacacaaaaaatattgtatttcccggtgcgaatcatccgctttttcatgttcgcttatgatccgcaccgctttaaaatatcagcgtattttctactgatattcctttttttacacccagacattctattttctgtttttgtttatcgtttaaataataaatacgaatgctgtctttttcttcgtctataatttcctgtagttttcctttcagcatgcgacactgggcaccatctacaatacattcaaaaacagaattttgtactcgtactccatagtttacacattgttttgctactttacgaagtctgctctttcctgcttcattttctgtattaacatcatatgtaatcaatacaagcaaaatatcacctctatttccacaaaaatggcggatatgcatcaatgtctccacgtaaatatcttgccaaaaacattgcctgcatataaggaaccattccccactgaatcttttcttttaaatatggatgtattatctgttcctgttttcgcttctgccattcgtcaagcactctctttctggcatcatctgtcaataagattgctccatcttctttttctatgaaatctgttttgcccaccatccttttattaataagacgcaaaacaaaacgatcagccagcgcaggccgaagttcttccatcatatccaatgccagtgaatatcttccaggtctatctccatgtaaaaatccgacacatggatccagtccaactgtttctaacgatgctgccatcatgcttgttaatagtgtatatacaaatgataataatgcatttaccctgtccagaggtggtcttctgtttctctcatgaaaatagaaatcttctttttgctgtaaaatcaattcatcaaaaacagaaaaatactgtgacgcaagttcaccctctattcctctgagttgatctttgttgttactgattctgatatcaggtattttatcccgaagcctctctgaaacaatttttaatttatctgcatctgtctgtagtgaatgatctcttatggtacgttcaattacccatcgtccattataaacttttccgacaatcgtattgcgtgcaatctttaggctttcctgctcgtctgctgcaacttcatactgtttcttcctcagaagcacatttccttttgtctttccttctacccttgccaggaatgagccggacggcgtcaaaaatacaattgaaatattattatctgcacattttcccatcaacgccggactggctcctgctctgctaaacgttacaatcatttcaagattatgaagtggcattcttccaagctctgtaccttcctctttaatcaccacattttctccatccagagataaatatttattctcggatgtgatatagagagtattcaacaattttttcatgtgttatcctccaaatcttctgccaatatattattcatgtatgtttcaacatttcccgttttttccagttccggcagacacaaatcttttaaagaacacacataacatgctttcttcttttttgcttttggtgtataacctctttcataatattgatgcatttcatcaaacatatcttttacgttctgcttgataccctctgtaatctgaatattaacacgatgctttatctctccataatacaatgcgccctgtgtaattgtacaatccaacatttcttccagacacatggtctgtgcagctacctgcaggatatccgcatcatgatcttttggttttcctcttttatattctatcggtaatggcgtatatttcccaccaaatgtacgtatcaaagtaccagactcatctgcatgaaattccacaatatcacaaatcccactcacacccattattcgtgagaaaaccggcattccacgagaaatgatgatatcttttcttttctcgtgggatgccccattatgcgcctgtctgtgcataaagtttccatccattgtcttgtagttttcagtccattgctgttccaaatgaatcaatgcccattgtcttctacaaaacgcaaaatgctgtatcccggagatcatcagataatcgtcttctttatattccttcaattatttccacttccaatcctggtaaagaatttaatgtaaattcgtaatcatcaatactttttggaaattctgtcttcttctcaattttcagtaagcgatgaacttttgcagaagaatattgtcccatcgggcaattatgtttccaccagtaaacccttaccacttccatgcttccgtccggtcttgcagatgatgcatcattttcaaaaagcgtcctgagcgcttcttttatcttttccgcatcttcatctgaaaatcctgtcttttctgcaagctgatgattaatacttcccttcacggtatacatggcaaaattaacacgatgcttcattcccatcgtatctgcccctcttttatcgcttgtttctgaatttacacttttcgtgatctgtatgctttcaatatcaataggatctacgctgaatgctgactgaattgttacaggtcctctcactccaactgatacggaatttcctttgaaagcaaatacctgtccaaatgctctcacatcaatccacgtcttacatgcagcttttgcatatgcctcattatcctttgctttcaatgctttctgcatctcatcatttgtctttgtcctgtctgcaagactcttgcatccatcatcacagcgttcttcgctttgtacaaaaattttctctcccatatcctgcagacgatttctgatttttcttttcagacatacatccgaaatctctccgaatccgtcaaaatcttctcttggacgatttccattcaatggatccccattcggatttccatgatttaccataatcaccacttcaaaatcaattttgtttgtaaatactcccattactcttctcctccttcattcgacttttcgccttttgatttcattaatttttctctttcctcgtaataaccaagtaaatatctttcattcaaaggattgttgttgaatccatctgtttcccgaagaacatttatgatctgcattatttcgttttctattttcgctcttgcacccggatttaaccgtttcagatatgctctcactatatgactatagagtctttcataagtgattgccggacgtctggtatacacattccacattttctttgcattggtaagtctgtcatctgttttactttcctgtaaatatagtgctctctcctcgactttttcaaggatagcaagtaattgtccaaacagatagcttctgtctttctctagctccatactattcaccttcccatcaaattcattatattttatcattgcacaagccaccggcgccacacagttctgccacacaaaagagctgtatgcctgtggatttgaagccctgtttacagcagctttcacaatatcggccggtattttcgggcttaatccgataatacacggtaaaattcttcggattgtagtttttttcagtttatcactacatgccagatatcctttttcctgttctgttccatacgcagcaagtgttatctcatttggtgatggcgctgtgttatttatgaacacccatttttttgtttcatgtaattttatccaccgtggccaggtacaattctgatgccagtgaagaactctgtctataaattcatttcccggaacttcctgatagtaagtaacagctaaccttcctgttgttgctgcatcaaccgacaaaatgattacttcatcatccggttgaagttttgcccggtatccagccatcgcctgattcaatttctctgcaaattttctgtcgagttctatgtcatcctcgtccctgcattctgctgcccaatcaaaatctgccaaaaatgtttcctgtgtatctccaaataaatcaactacatccaaagccagattagaatctttttcttttagattttgtggaagcttccacaccacagtcatctcaccgtctatatattttccctgccttgctaacaaccagcgcaaagcattatgtgctttctgcgaagtttcatatccaatactggcagcctgctcacgattcgcgaaccttccccggtaagtaaaaccagaggtatcatttgccgaaaaaatctttgctttatccccggaatttctgattttcgatggatgtttttcagaacattgtatcttttcacccgtcacataatctatattacaattatgcaaattagtcttgtaatactcgataaaagagtgatacatttccggctctttccacaattcatgtttttctccattatcccatactgcaaatcttaccatcgcatctttttggacaactgactgaattttattttcattttcggacagaaaaccatcttcagccaataccaataattttgcttttattaaatcctgaatcagtgtagcttttttcaaataaagatatacacattgcagccacttattggaaaattcagagcttgtccattttctcaaactattaatgtaatcattatagtattctgtcttgtcctcatttgtgtataacgaataatctcctgcaacatagcaaagtttgtcacataatgcatgcggacagcttccattacttcgcgaagccgaatcctcggttactgggataatcgtgattttatcttccccatcctttggaatgattccggacaaagccggcataaatttaccttttaggtcaatcgtcacttctatctgcgcatttgctgtagaatgcgagattggaagtaagattggatcttcatttacctttttccccacaatcgcttcgcatgcgtcatatgttttttcaagcatttgtatccagcccaaaaagattccccctttcaaattcccttattccacagaaatttttttcgtcaaatgttttcatttccatttccgcaactacttttctgatctgacattcttccggttccggaaatctaatcactccgtctttcatgtatgcattccataaccggatcgtcatatgctttttctcattctccctgactgcttcatccgaatatgtaattccatgtaccatgattccaaaagaaatatttccatcattgtcatagaatccttctccttccatcactgtacagggttctacatatccctgacattctcttgttccaagaaaaatatctctcctgcctcctctttctaacattctttttgcaatttgataatgcttattctcattccggtcatttacaagatccggtctgttttcattccatacaaaatgtgctttcacccggtattctacatcttttaaatatgtgtaagatgccagatcgtttcctccctgatattttatcgggcgcattccctttgactctgtccgtattggatgcatcactctgcactcatcaatcacccacgtaaacgtaggtttccagtaaatactttctgtgattcctttcaatgcctgatacgttggcacctgatatgacagtttttcgcctcctgttttcgttaatggatcggtgaaaagtgcatatttcccatagactttatattctattgcattttctctttccattcttctttccccctttttcaataatattgtaatacaagttcattgagcagtcctttttccatatcataatttttagctacatatacgtctggtaaaaacctgctttcttctatcactccattttgtaagcattcttttaatttattttcataaacagacaccgtataacgctgtatctttcttaataatctttttttatcagataccgtctgcgctgtttccagtttttcaaggatatccattccctctttatatggaactatcactgtttttccctcttcctgaatcggtctgtagttttctcctgctgttttaaatgcctgtctgatgaaatgtttccgttctcccggaaatccactgctcaataatttatatattgtttcgccttttcctatatcataatccattttattgctgacttccttataataaatttcataataccaatccatccactctgggaaaataatactctccgtactattggactgattatatttttcacagacttcttccgttttcttctgagctgttcgaatcacctcaaattcatctccaactaattgaattacagtaaccctcccctgctccatttccccgtttcggttgcaacgacctgccgcctgtgcgatattgtccaatcctgcaagtgaacgatagacatgattgactgacagatccactcccgcttctatcagatttgtacttataatcaaaactttttctgtactatttttcagataattttttatgctttccaattgatcactccgatgttccggacataagtttgttgtcagataaaaaatcttcacatctttcaattctgcttttatgtaatcaaaaaatgttccaaccgtctcttttttattcaaaattagaagtattgtccgttctttttggaaatcatggcttatcctctctcccagtgattcaaatgtgtctggctcatttatttcaaaagagatgttcgtacgctgaaaacgctgaaaaatatcacacactcctgtgaccatatccttaggcgctgtatatagaatctttctttttatattgccagatgccaattgcggttgggtggctgtacacaaaataatagtcgcatgacatacataacataagaaattcatcataagattaaatgtgtgtattgtctgcaccggcagtgcctgcgcttcatccacaataatcactgaatttttcaattgatgaaaacggcggatgcttttatttttctgtgaaaacaacgtatacaaaaattgaatcatagttgtacagataatcggttccttccatgcagtatctatctgcttctcctgttcatcagaattgctgacatttgagtgatgttccatcacccattcttcgtttccgactgctttttttatcacttcagtgctctgttctgtgatggatatataaggacttatgtaaaaaatgtgagaaacttccgatgtttttctctttgctgccactttcagtgcatatcccaaagatgctaacgtctttcccgcacctgtcggaagtgataaccgatatattccatatgatgtctctgagaaattcatacattcttctctaatcttttttcgcagttcgaagatttgtttttgtttctctgttctgagattctcctgtgcttctttttccagcttatccatatattgctgataatttttcaaagccttctgatatacgtttgcagtttccatattatcatcaagcatactgtcacccattgctcttgctgtatctgtccagtctgagtctatttgcaaagacaaaaacaatcgttccatacagctcatataaaaaaatctctctgtgccttctgtctgtccattctgacagatttgttttaatggtttcaaaaaagcggttatgaattcaccatatgcctttctcatctgactgcataacatatcttttgtaaaatgcatttcttcaaaccacagtcttgcaatttcatccagtttttctttttcaaccacattcaatctgacttcaaacttgtcttcgccatcttcatctatgcagtcataaattccatgatgtgccgtaatcgtatatgaaataagctctatcaaaagcctcatatcttgaactgaatgatagggactgttcttaaattcctgcattaataattcagctcctgcagagctatgatttactgctccccttttgggtagatcatcttcttgcttgatatatgcctgaaattcagtactaaactttcctgcatcatgcaattgcagacaaagtgtagctaatgttcctattcctatcttttctccttcactctgtgcatactgtcccgcttccagtaaatgtactgttaattcctgctttttttcattttccttgtgtgccagatacatttttctttcctcctatcttcatattattctttcatatcctgtttgtcaatatattatccatattatagaataatatttttaccaattgacattcatacgttattatttataataaagattgtcgtattttactacgcggattgaaaatataatatggagaatattgttctccttcagcagggttttccctgctgatttttcattactgaagatatagcactttaactgtccaataatttgtacattttaatttaaatcaacaaaaaattgctatttaaatatttaaaccacagaagttagaactatggttacacatcgaaaatattcaataatgaattgcttagaacatttccgctattaaaaacgagtatcaaaataaggccttttaataggtagcatagatataaagcgaaaagccgtatgcccgagtaaggcaagtacggctttgtttagggatatagtggaaaatgcttttcatatttcttgattttttcttaaaatgtgttttttccgtctactataatcattttttatttgttttttgaaagttaaaaccctgcataatcatttggattatgcaggattttccgttccctattataacataccaagtaataaccgggaactacaactacaactacaatgtattatgggaatccagtgataatatttttaaaaaatataaatggaaaaaacattagtaacttatgttcaaagtaaaaatcatgatttaagaatacagactatgtattcagaaaaaagaaaaagccttgccattacgccaagtgatgtagacatcttctcgcaaacgtccgaaacgcttaatggtacagcttctaaaaatattatatcatgtgcaaaagcagcacatgatcgacattcgccgttcgccgaatgcataaatgcattcttctcacttgcgctcattatatcacaaagtcaaaaaaaataatactttaaataaacgcgatcatatataacggtaatgtaatgataccatcatcacttacacctatattaccatcaacaaacttgtatccataaggaatatctgcattcattttcaaaatagattttaaggaattagcccgcgtatttccacttttaacctcaatcggaactaccacaccatctttttggatcataacatcaattcctctcttagttgtctcatttttatagaaatataacggatatcctttcttgtaaagtgcatctgctatggcacattcatatataccgccttttgagtttccgaataacgtattttctacgatatgttgctttaatgaaaaatctttcatcgctatcaaaagagataaatccgttgtgtatgccctgaaaaagtcatctcttgcatagtcatccagatcaaatctgacatctgttactagtttgcataaatgcaccatatccgcacgaagcagccactcaatacttgaaaaatatttttgtgcccgaccaccatgctcgacctctttatattgaaatttatggttttccttatccagtaactgttttgcaagagaaagataacacttctctgcttttaccttttcctcagctgttgcataatgtgctatgtcatactggtatccctgtaagaggctgcgctgtatcctgtcaatttccctaaaatcttttgtgtctatatatttctgtactgcctctggcataccacctattgcaatgtactgtctgtaataattcatcatttgcgaatgaattgcttcaggcacaatcattttagaacgcagataaccacagagattttctatcatatccccggatattcccattccccacagaaactcttcaaaatcaatcccatacattttcaaataatcaacatatccaaccggataagaagaggcacgtttgtagtcgattccaagaagtgagccagatacaattacatcatatttattatctatcgcccaaaatttaagtgatgtgaccgcttcctgacattcctgaatttcatccagaaaaatcaatgtttttccaggaataattttcttttcagggaagcggaaccgcatacccataaccatagcatctacggtaagatctccagaaaatatctccatcgcagaaggcatctgtttaaaattaatttcaaccagttcttcataattttcttcggcaaaacgttcaacggtatatgtctttcctgtttgtctggcaccctgaacgacaaggcacttcttatcctttgtgtttatccagtttttcataaaatttgttgcttttctttttaacataaggcacctctggtcaacataaataatactttttaatgtaaattatcaacattttagaaagataaaatgtatatctgtcaacatttcagaaaaattatatcattaatttgaatcgatgaaaaggattattgcaaatttcatccgcagtacctgtaaaagtatggcataatttccacgaaaacaactgtaattttcttccagcatgtgctatgatgatgtcataaatgttgcaaaacgaaagacattccactgcgcttttccttaagcgctctggatttatgacacacaaaaggaggattttatgtacgaatttacagaagactgtatgcttcatattgatgcaatcgatgaagaacacaagcgtctgttccagatgataaatgaagcattcgaattagttgagaaaacagaggatgtgacagccatcggtcaaagcctgatcgcaaacctgaaagattacgcagctacgcaccttgctcatgaggaggcttatatggagagtatccatgatcctgagcttcctctccagaagacagaacacgctgcatttacaaagacgatcaatgaatttaaactggataccacatcaccacgcaatgccaagagatcgttaaatgaacttcttacttacctcgtgcactggctttatcatcatattttaagcagcgatatgatgatcgggaaaatgatccctacggaagaatctacagagaatccatttgcattcacggacaaatacaaaaccggcatcacatttgtcgatgatgagcaccgcaagctgtttgagatcatcagtgataccaatgacctcatccacgaccagcttttacatgataaatacgatgagatcatgcgtctgctggcagaattgagagattatacggaattacatttcagcgaggaagaggctctgatggagcgcatccattatcctgaacttccttcacagaaacgggcacacgctgcatttgtagaccgtcttgtaaatatcgatctggatgaaatggaggatctggatgacaaccagcaggtatatcttcttgatctgatccagtttttactgaactggcttgcaaaccacattcttgcctgtgataaaaaaatcggtgaatatatgcgcgaaaatcatatttctgaataagcaggaacggttgtatgggttttcacccgaatgataaaagatcacaagtcatccggtcaaaaactcatacaactttttttattttcttacttgacaaagtcaagtattggttttatactgtgtgcagttggaaacgtaaatactcagttttcgatatgaaaattggatttcgctttgcgatgtaaggaggatttatgctaatatcaactctttcctactatacaactgaactatataaagaatttgctgcttacacaacagaaaagctccatgagttaggtcttaactttggtcagatgtactttatcatttatgtgggcaaacatcctgagtgtaccccatcagaactgaccagcgccttaaaactggactggggacattcgcagcgctccgttgcgaaacttgcagaagatggttttctgatcaaagaaaagaaatccggccgcagttaccggttaaccttaacccctcttgggaaacaggcttttgatgtctgccatcaggtacttttcgactgggatgccaccaaattgaccggtcttaccaatgaggagcagcagctccttttaaatctgttgtgtaaaatatcaattcagaaagtgtgagattatgtacgaaacaattcagactcccttcaattatggaggattaaccttaaaaaaccgcattatttttgcccctacaacattcggtttatcggatgaagattactttgaaaaaatacgccggatcgcagctggcggctgcgctatgatcattgtcggagacgttccggttggaaaaagtcatttcggaaaatcactttttgacaaaaaaggctttgcattctatgaaaaagtgatcgggatcgcccatgacaatgactgtaaggtatgcgcccagcttcatcagtccgattccaatatcaaagccatgttaaaatatgttccgggcgtgctcacaaaacggatcagcatgcaggaactccgccctcttttaaataatgaggttgctccatatattacgaatatgcctcacaaaaaagtaaaagagatcacctctgctttcggcactgccgctattctcgcaaaaaaagcaggatttgatatgatccagatccacggtgaccgtatgtgtggaagtttcagttcttccatttacaaccaccgcaccgatgaatacggcggaactgccgaaaaccgtgcccgttttgcagtggaggctgtttctgccgtccgcgaaaaactgccggatatgccaatcgattacaagcttgccgtccgtcaggagaatccacactacggaaatgcaggtgttatcgaggatgagctgaaggtatttgttccaatgctggaaaaagcaggcgttacaagcttccatgtcacactcgcaaaccattctgatcttgagaataccatcccaccgaaaaaccatccgtattttagtgaaccgggatgtttcctgaaattctgtgatgaggtaagacagtacaccaatcttccgatctgtggtgtcggcggacttaccgatcctgattttgtggaaaaacagcttgccgatggccgtattcagtgtgctgccatgagccgccagttactggctgatcctgactgggtgaacaagctgaaaaatggtcatgcagaccagatccaccgctgcgtccgctgcaacaaaaaatgtcttggcggactgatgcagcatcagggaacacactgtatttatgagaaataattttaaaaaaagaatgtatccggatcaatttcctccggatacattcttttttatttattcttacttttctgttttttcttagtgtttaggaacgatcttctcaattccacccatatatggctgaagtgcttttggaatgttgacgcttccgtcctcatttaagttgttctctaagaatgcgatcagcatacgtggtggagcaacaactgtgttgtttaaggtatgtgcaaaatatttgtttccgtcttttccttttaccctgatctttaaacgtcttgcctgtgcatctcctaagtttgagcagcttccaacttcgaagtatttcttctgtcttggagaccatgcctctacgtcgcaggattttacttttaagtcagcgagatcgccggagcagcactctaatgtacggaccgggatatctaagctgcggaacaggtcaacggtgttctgccataatttatcataccactctttagactcctccggtctgcagacaacgatcatttcctgtttctcgaactggtggatacggtatacgccacgttcctcaataccgtgcgctcctttttccttacggaagcatggagagtaagaggtcagtgtgtatggtaatttttcttcatcattgatcgtatcgatgaatttaccgatcatggagtgctcggaagtaccgatcaggtaaagatcctctccctcgattttatacatcatagcgtccatctcgtcaaaactcataacacctgttacaacgttgcttcggatcatgaatggcggtacgcagtaggtaaatccgcggttgatcatgaaatcccttgcgtaggagatcactgcggaatggattcttgcgatatcacccattaaataatagaaaccgtttcctgcaacttttcctgctgcgtcaaggtcgataccatcaaaacgatccatgatatctgtgtgatatgggatttcaaaatcaggaacaacaggttcgccgaatttttcgatctccacgttgcagctgtcatcttttccgatcggaacagacggatcgatgatgtttgggatcaccatcatgatctttgttactttttcctgtaactctttctctgtttcttctaactcagcaaggcgggctgcattggcgcttacctgtgcctttactgcctcagcctcatccttcctgccctgtcccattaactgtccgatctgtttggataaggtgttacggcttgcacgaagctcatctgcctctttctgtgttgctcttgccttcgcatctaactcgatcacttcgtctactaatggtaatttctgatcctggaatttgttcttaatgttctgttttacgatttccggattttctcttaaaaattttaaatcgatcattttttctaagctcctttttcttttttataacacaaaagccttccgcccctgtgccaaaacacatgggacgaaaggctgtattctcttccgcgttgccacccatattgccggaacactctgcttctctttctctatggtaaagaacagattctcttccgacctctcaaacgtacgatacagggtacgaaccttgtgactttcatcaccggctctgaaagtggaaagaccttactcactgcaccggtttacacctgccaccggctctctgaaacagctttgcggtcgtagctttcgtcactgccaatttcttccgacattataccctcattatcttcaaaatgcaactgttttatacggaattcttcgcttttctccgattactcccgtttctctctcaatcttttctgtctgtcccgcgtgcatcttcctcgatccattccagcagctgatgtgctcgcctgatccacgtatgtctttcttccaccacagggattccggctcttacgatctcctcccggcgtgcatcgtccgccagcagatctcccaccagctccggcagtctttccatatgggctagatcgtaataacatacgccctgtccttcttttaactccccgcacagatatttgctcgtatcggtcacgctgacagtgccatttaaaatggaattaaagacacggtcatgtgctccgtccttaaaccatggcatgacgttcaacgatattttggacgccgcaattgcttttaaaccctcctctgaagttgtctgcggatgcaggatcatgttttccgggtgaccgcaggtgagttcatcccagcccttgccgaatacatccacctgtattcctgcgtccaccagcacttttaccgcctccctgcgccagtaattgcgcacatagatatcaataaatatcatgcggtgcagtgccatgcggagatccttataagtattctcccccatctcgcgctcacagtgttccaatgccacttcctcgaccgtgcgatgcggatgcgcaatgatatcatcgatgatcccctgataaaaggctgcatattcatcattgatccagtggatatacggttcacagaaagacgtcggggtaaagtttcctgtcataatgacattatattttttctcaacaggcttcctgattgcttctgccggagattcaaccgattgtttaacatcttctttaccggtattcggtttacataattcttccaatctgcttcctgcaagcggaagaaatccacggtgcgtaaactccggatagaaatgcttaaaataagcctcatgcagccggtcgatgctgatgtggtaatatttttccggaagatcagcaagtctctcatggtaataatacggatgatcgactgcgatgttgtaacacggaactgcatattcatcccatacatagccgatgccttcacggtaaacgcctgcctctttttccagaccttcaaagttaaacgtgacaagcactgtctcccccggtttgataaatctgcgcagctttttggcgctgttcctctcatcctccaagtcaaaatagaacaccttatagcccatgcgcttccattcatttcccatctgtatggaaaagtaggcaagtgtttccacaccgccaaccaataaaacaattcttttcataaatacatcaaggcggtattctgtcctgaataccgccactcctttattttttccaatgccactgttttttcaccggatgctcttctgctttcacatgtttcatccagatccgcagctctttcacgaacaccttgatccactgcaccagcttctgtcggatttcagtcttgtgtttccacagccagtgtattttcccggctgcaaaaatgaccggatagaccagacataacaattccagaatcaacagcagcgctgcaagatcctcataagctctcgcccggttttcccaatatggaaaaacaatattctttgtattcatcgaacggattccaaaatttcttaataccgtaaaacgattcatcaatccaaaacgggaagaattttcaacgatctcataactgcttttatccaatcccaatgcttcttttaatgcattgaatccgaacttctgcaccggatttttgatgagaagctcatagctgtcaagcgtcgttcctgctgactgtccgtaacttcccccctttgaatccgttgtgcccgctgccggtgtgctggctgctgcgctgtccatgccgccagtactgctgtctgatctgccttctaaaatctcataagagacataaacggttgctgcttcctcgtccgccgcatcactgaaatatcccttatcgctttttaccacaccgcgcaccggatactgtactccgttgatttccacatacattcctgcgacattgttggaaccaaataactgccatgcaacattttcatcaatgaccacaccgtctttgtttaaatcttctccatcaaaatagctgccggacaacagtttcagcggatgaaatgtgaaaaaatctcctccaacaccgaatgctctcgccgtaatggatgcccggtcagaataaagggtaagttccccttttgtgctgtaacagtccaccagcgttcttccgtttacatccgatgtatcctctgacgcctcctgcaatgcagtttttaatttctgttccagctgtatcacatagtccttcgtcactgctgcatctttggaaaaaaagcaggaaatctgtgcataactgtcttctgctgaccactctgatgcgatctgctgtgtggaaagctgtctgccgagtgcccgttccacatagccaaaaagaatggcagcacatatcatcagcactaatagaagtatttttctgtactgctttaccttcatgtgtcattcctttctgcttattctgatgcaagacgtacctgttcgttttccttgatcggttttgtcgtcgttgtgatcacatactcataaccttccaaagctccggtcactgctgattttgtatcatctgatgtgataacatccacatccacacgtctcgcatagtaacggtttccaagcggtgtgctctttgactctatgatcagaatgaattttccattggaatcttcccggatagcactcgtcggtacgatcgtgtcatagttggagctctgctccccgatagacagtgtatagctgtctccgactgacacatcccctttcatctcacagatgatcatactgttggagcggttctgtggatctttgcggatggctgacacgactgcggaaacatcatttccgtaccagttattcagtatttccgctgtatctccgactctgaccttctttgcctgattttcagtcacagagaactgcaacacatacgctttgttttccggctgaatggtcatcatgacatcgttggcgttgaccgtagttcctgctgtcactgcaatatcagtaacagttcctgatattggtgatgtgatctctgttccgatggattttgcctgtaattttgctacttcttcctgaagatctgtcattgttttgtaagcagatgcgatcgtcacctcgccactgatcttatcggtcacttttttctgatcattggttgcactggtcaatgcagtgtttgcatcggtcagtgccgccgttgccgtgttcagctgcgcttgcaggttgtttgcttccgctgtgttcgtgccagtcagttttttcacggaaagattgtagtttgcattgctcagagcattcttgctgtcggttgctgtggactttgcggaatcgtaggaaccctggactttgtttaagtttgcctgacaggtgttaaaagtggactgggctgtatctaactggcgttttgccttgttcattgcgctgacacttgcatccaacgcagttttggcattatcccatgcagtttttttatcgttgttagtcttatcatcattataagctttctctgcactattgtaatttgcctgtgcttcgttcttgagtgctacagcctcatcatacgcactctgtgcgctctgcagacctgaaagtgccgcatcatacgcactcttcaccggcgtataagcactctccgcactcgtcaggctgtcctgcgcctcactgttctttttctctgcatctaacactgccttttcctctgcagtcgtgtctgctgttgagttgctgaccgcatcgatctgtgctttgatcttatcgacacttgcctgtgcagcatccactgccgcctgcgcatccttcactctctgatttgctgctgcgatctcattttgtttctgggtgaggcttgatccctttccggcttcaatgctctgacgctctgccacggtgatccctgcggtaagcactgcggattcataggctgcctgcgcctcgtttaaactcttctttgcagcatctaactcatcactgtctgtatcctctaaggtaaacagtaaatctccggttgctacttccgcatcctttttcacgttgaccgttgcgatctttcttgtctcctcgatcgtgacggaataactctcactcgcctccacagaaccgcttccacgtaccttggaagtgatctgaccgcttgtcacctgctgtgtgctgacctccacaagcgaataattcatgatcgtattggaaaaaaaggtaagtatcagcatcaccagtaaaaatataattgtgatattctttattttatcttttctatctgtcatctttttaactctccattttctatcctttgacaccgccctgataagcgataccctctaccagctgatcctcaccatacaggaaaatcaaaaggcttgggatcatataaaaggtcgccactgcaaatgccagtcccacttcctgcgcattgatctttgacaaaaagatcgacaacgggtatttatctgtatctttaaaaaacagcagtggctgttccaccatattccagtaatccataaataccagaatcgcacaggttgtgatcacgcccttacagattggaatacatatctttgtaaagacctgaaactcgttggctccgtcaatcttcgccgcctcgatgagcggcactggtattcgtctcatatacttcgtgatcaggtacacactaaacggagaaaaaatacccggaagccatatactccagttcgtatccagtagcttcatccagtttaagaccagataatttggcaccagtgtaacctgatatggcatcatcattaagatcacatatgcaaaaaagacgattgcggaaagttttcctctggtccttgtgaaaccatatgcggcgagcactgccaccaccagctggaataccacgatcggcaccactaagatcacggaattccaaaacttcaacaggtagtccggactcttaaataacacggtcgcatactgtgagaaagtcaccatatccggtataaacttgaggtttactgtctgggagatgtactgcttgccccctgtatccgttttctggaaaatggaaccatagttggaggtgatctccgctgccgacataaatgaattgctgatggtaagaacaatcggcatgataaaaatcagcgccgtaaccactgcgatcactgtcaggcagatgcggatacataatttttttcgttctgatctctttttcattcttcctccaaatcctttccaaaatgatgttccacccaaaataaaattcccataatgacgatcatcacaaaggacatataaattgctgccgtggaaagtttctggtaatctgccgaagcaaacgtattgttcatataatgctgcaacatgtaaagtgcgccatacggatattctcctgtcagaagataaatctcacggaataccttaaacgaattgatcatggaaagtattgtcacaaacatgatcgtcggtgacagataccgcaatttaacatgcaggaatatctgccagcggtttgccccgtctaactctgctacttcaatgatatccttcgggatatttcccatggcagataaaaagaggatcatattatatcctaagtttttccataaaaacaggagaatgacaacgaaaagacctgcggatgatttcagccagtccacctgccctccgccaaacttctgaaccgccaggttcacaacgccattgtaatcaaaaagcacctgccagatcagcacgatcgatgctgtcggcaccataagcggtgttaaaaagcagcttctaagttcgctcttaagcggaatccccgcatccagcaaaaatgcgagtgtcattcccagaatgactgcaagcggtactgccacaatggaaaaaaacagagtatttcctaccgctgtgcggaacgctccattttgaatgacattgatataattcgtcaatccaacgaacttctttgccaccggattattcacaaaggaaaaatagatcactacaagaaacgggagtacaaaaaataacagtactcccagaacgctcggtgccaggaacgctcctgacaccagcctatgaaaccatgatttattctgtttttttataaccttactaaaatcctttttcttacttcgtctcacttaaatatacctgcattctgctctggataatttttgccacatcctctgcggacttctgtcctgagaaataggctgctgcctcctcattgatgatattggtgatatcatcggaaacggcaccggaaacagcggttgtattgtatacaagatcttttacctgatctacatcctcctgtgtcgccggctggatctcaacttcgaattccccccagccccaggtgcttccgccgtcagagtctgctttcattgcgttctgacaatatttttcaaaatcgtcttttctaatggaaaatccataagtgtaatcactgtcgccgtcgctgctcttcttttgcagataaaatgtccttaaaaactgccatgcaccatcgacatccttacaactattggaaattccaataatattgttcaggctcagcattgctccgtttccctcgctggtcggataaccaataaatgttgtcggacctccaaaaatcgcacggtacatctgtacctgctcaaaatcactgagataataagtatctaaaagctgttttccctgactcagcagaaccgtgctgtcttccatatcatctctatattcaaactcttccgggaacatatttgcaaaatccagtacatctataaattcctgactgtcaaaattacagcttgcatcctcccagttgataaaatcattatagccgagactcatcagtgctgtcaatgcagacgtccggtccataccccagaaaagctgtgttccttccggtttggatgcgagcagcgccttcatatccgacacggtccatcccggtgtcgttccgacatcatccgcttttccgatcaccgtctgtaacgtaaaggtctgcggcaggatcgccagttttccatcatactcgcatgcagtgagtacatttggaaggaaatcatctctcgaaagttccgtgtctttgtccagcagtccatacagatccacatttaatcctttggatgcaaaattgattgcctgggaataatcattaaaaagtaccagatcaatgttggaatccgatgtcactgccgtgttgaagctgttcactgcatcctcgtagtcctctgcgccgtctccataagacttcattgtgatatgatacttatcctgactcttgttaaatgcgatcaccttctcctccacgtctgaacctgtccacatgcaggcgagtgtaagatttacggtatctgccgcttcactggcatccacttctttgatcagtgcgatctccgtctggtttccgttggagttccagttctgaagataagctgcgatccttccatcggacaggactccgtagctgctcacgctggagctggaaatattacagtccatccagctgaaaaattcctctttttcctttgtatccagattgtacttataaacactgctgccctctgtgaccagcagattcttctcatctaacacagagactgtatcggaagggacttcaattgccttgtctgtctgttctttcattgcgccgacatctaacggccgcagctcacatccggcatccccatatccgatggaggcaaccgttccgtccgcaagcccgaccagtctggatgtatatccgtccgatgggatcctgcccttctggctgccgtcctctcctattacgagtgtaaaatattcatctgagctgacgctgttgccactgtcattattggaccaggtattcagggcaagataaaggtttccctccttatccactgctatcccgttacagcttacattctctgcatttgctccgagatccatgtcctgttcaaacgcaacatttccggatgtgtccactttgagaatggaagaggtctgaatgaatctcgcattctgtgccagcagaaatctgccatagtttacattgccgtcctcatccgtataattttttgcataataatcattccagtccttttctgcatcctcgtcactgtatccccactggtctaccatataacttaacacatcatccagtgttgcatccgaataatcctcggtgacactcgactcatccatctgattcttcgtcacaaacaggtaaacctctccgctgtctgccacggtatatcctgacacccagctgctgttcccgctgccgtcaccctgtgtctgctcataaagctgtgcattttctccggttatcagattataggaatacagtccggattttgtgctgtcctcattgctggaagtgtaatacatcacatctcccttaaactgtatatcacttgtcgtatcattaaaactgtccggcagatcactcagataatctgctttgaaatatctcttcgttccgtctgcggatgcgctgtcactgccaccgccacaggcagtgagccctgctgtcattgcagccacaagtgtcagtgccattgcctttctccataagcttcgtttcatatatgttcctcccgtaaaatgccgctttctgcggacgttttttctataatttcagaatatagaagtccttatggaaaagcaagatacaaaagtttatgaaattcttaattttgtctgaatggaaatttatgccaaaaaaaccacactgggattttcttttcccagtgtggtttttttatgattcttccggtttaaaatcgcggatcagattccatgttggcagtgcatttccctgataatcaaagagtgcctgattcgcccattcatttccgcaaggtcctttatcgttcatatattttaaggatgcttccgttgcccagccggaacccggaaccgggatccatgcaggctcccaataaaaaaagccttttcccctgtttcctttaatgtgactgatacggtttaagaaatcttccataaaatcatactgtccctgaactgtcatcgggtattcgattttttctaccagttcctgtttcgttgcatagcctttgcgttcttcgtcagagagcttttcgtaatccttataatcttccatcgtataccccatggaaacctccgctacgatcaggtctttgccataacgctctgcgatatcgttcatattgtctgtgagcatatctaatgtgccatgccagaacggatagtaggataaaccgatgatctggaaatcctcaccgcgctttgtaaactcgtcaaaccattcacggtaaagagcattgttaccgccattgtcaagatgaagcatgaccggcacatctttgtccacagcgcggacaccgcggattcctgcattgacaaattttgcaatgttatcataattcggcacttttccctccggccataacaggccattggaaagctcgtttccaacctgcaccatcgtggtattgatgccattctccttaaatactttcatagtatctacagtaaaatcatacactgcctgctctaactgttccacgctgtagtctttccatgcttttggtttgatctgtttgcccggatcagcccagaaatcactgtaatggaaattcagtaaaacacccagtcctgcgtctgtcactttctttgcaattgcaagtgttgttttaagatcattttctcctgcgccataggattctccgctctcagaccacggatcattccagagacggatgcggatcatatcgacatcatactttttcataatgtccagaatatccatttctgttccgtcaacgtagtatcttgcgccacatttctctaattccaataaagtggataaatccattccttttacaaatttcattttcctgttcctcctgtttttcttttatatttcataggtatttcgaaactcatagaaaacgtgaattgaattgtgaaaaattgacaaaagcttgagaagacattggggagccgccggtacttagaaggcaggaacaacagtatgttgtgactggcttcttagtaccgctgcgagcgacacatagtgaaaacgtgtcttcgaaaattttgttaattcttcgcaatcctctcaaccttaatttgagtttcgaattatacctaaattcctttaaaacggaacgtaaattccagtggttttgtcacatcgatatggtattccgggtgtacccatgcaccccagctgtcgtcaccgccgacacccatctgcgccagtgcgacacgcacgacagtataatgtacctgtggcagttcatacggatgtgctgcattttccagttcatgcggcgtatatggaagtgcagagaaactcagctcgtccccggagaataacagccctcttcctctgtcgtcggtcacttttgcatatcgcacaccgactttattgccgcactcttgcggaactaagtattttgccatattgtccgctgccttatttttgtaaataccaagttttgccccatgtctgcggtctgcataagtttcctctggtccataaccataccactccacgttgtcataatcggcatttaatttgaacatcatgccaaattccggcatatccggcagtccttccactggatcataagtaagctttgtctcgacggttccatcaccaaatacggtatatgcaacctgacattttgctgccggtgttgtcggcatataataggtgtaggtgatggtcacactgtgctctttctcctccacggttgtcggcacattgtcgaacatgccgccatttctgtgactgatgtacatgctggcgatcttccactgtgcataacgtcccggtgccatgctgccgttgtcattgtccactggtgctctccagaagttcggcatcggaatttttccgatcatctcttttcccgcatagcggtaggaaaccagaccgccgttcaacagggaaaacaggcagtcaaaatcatcacctttcacgccaatattgacttttccgcggactacctgtaatgttttttccggtacggcaaacggtgcttcttttttataaaccttctgaccaaaagcaacttcatgtccggctttcgcccagaacgtgtcttctctcagtacaaatgaaaccgtcactgcgtactctgcatcctctgggatcacaaacgggatctcataagagccggacgaaagtggtgcaacatttgtatccattttctgttttttcacgactgttccatttttctgtaaaattacgacacattgatattcgcttgtgtctgcaaacagatttttattcacaactgtaaaggtgtgtccctcaaaagccacgctgatattctgataattgaatttgacttcctgcattttcggagaagcatcacgctcaccgccataacagattccatttccgctgaaattgtagtcggtcggacgctcgccgcagtctccaccgtatgcctgaaattcctgtccatagcggtcttttttcaaaatagactgatcgatataatcccagataaaaccaccctgatatcttggttcggtatcggtaaggtctgtgtatttgtgcattgccccgcaggaatttcccatcgcatgggtgtactcacagcagataaaaggtttttccttatgctctgccaaaaacttcttaatattttccacgctggtgtacatctggctttccatgtcgctcgtgccttcatatctgcggtcattgaaaattccctcataatgtacaagacggtgcggatctactgcacggaatttttcggacatgtcaaaaatgacttttccgccgtaggattcatttcccaccgaccagatcaggatcgccggatggtttttatccctctgatagcaggagttcacgcggtctaacatcatcggctcccagtccatattatcgcccggaacgatggtatccttcggcacaagtccgtgacttgccgcatcccacgaaccgtgggattccagattattctccgcgatcatgtaaagtccataccggtcgcacagctcatagatgccggaggcatccgggtaatgacaggtgcggatcgcattgatattgttctgcttcatcgtgataatatcctgcaaaacttcttctttagaaacggcacgtcctgttttcgaactgaattcatggcggttcacgcccttaaagacaatacgttttccgtttaaagtcatgatgccatctttcatctcaaaacggcggaatccgatgttctgtgaaataaattcaacgctgtttccactctcatcaaaaagctcgaccgtaagcgtataaagatccggatgttcagcactccaaagatttggatggctcacttgctgttcaaagtgaactgtcgctgcacctgtatctgtgaaacggatcgtatctgaagtattattgggctgaaagctgattgtctcggaaaaaattgtgttttctgaaacacttccggcagctccctcttttgaatcatccctgcttcctgtgagcgtgattttggcagatacattctgcattttggcatcatctgcggatttttcaacagtttctacttttccacaaatctccatatcaagcactagcttcgcattctccaacgattcctcaacaagcggctgcactttcaggtcatacacatgcaccttcggcatggtatataaataaaccgagcggaaaataccagagaatcgatagaaatcctgatcctcacaccagcttgatgaggtccatttgaacaccttcaccgccagtttgttctcgccctctttcacatatggtgtcagatcaaactccgacggtgtaaagctgtcctcactgtaaccgacataacttccattaagccacaatgcaaaaccgctctccacaccctgaaacgagatgtaaagtccattttttataaatccttccggcaatgtgaaatatttcacataacttgccaccgggttaaagtctgtcggtaccgcgtcacgccacacatcctctcttccatcccacggatactggatattggcatactgtggaatatcatacccctccatctggatatgcgccggcacacggatgtcgtcccacggtctgcaattgtagtcctccgcctcaaaacccggaatcgtctgcgcatcattttttgcataatgaaacttccagatcccatctaaggacagtctgaaactgctgttttgttccactgcctccgcttcatttttatatgtaacatggtcagaatgtgccgccatgcagttttctttgaaaaacttcggatcatgaatcttttttacatcaaattccatagaaatgtctcccttatgccttaccagcctttcaacgcagaaatattataattcaacagctttctctcgtaattttccgggctgatcttccactgatacggcgatgtatttaaatattttttgaaattccggttgaacgtggaagtcgtagtaaatccaaccttctgtgcaacaacatccatggagtcattcgtctttttcataatgtcacaggctttctgtacccgcatcagattgatgtaatccatcggagacatattcatgtaggactcaaacaccctgcggaaatgtgtctcactcatgtggctcgccttcgccagctcctccacacggatgttattggcatattcattgcggacatattccaaagccggtgtgatctgtgacacacctgtctttttccggatctcatcctccgcaacatcattttcgcacatccgtaaaagttctgcaaacaatgtgatcataagtccccggacacattcatgaaatcgttttttcttctgccgcatctcatccatgatcattttgaccagcacggaaacacccggattttcccactcatgaaaaaatagtgctttctggttgaccatctgcagaatctttttctgtatgaccggattatccggatacaattcctggatcatgaccatcggatcaaaaaacagatactcccagaagcttggaccactgtccgtatcactgatggtcacatgtgggtaattctgtgggataatgcttaccattgccggttcataaggttttgactcctcgtttaagatcaattcccctgtgccatgtttgcaataaccaatctccatgagattatgaaaatgaagattgctctcatcatgaccatagtcacgaatccaactgtctcctaaaagtgcaagaacatattcattttgtggcacttcgtaaaaccgaagctccatcgtgtcttttttctttttccccatggctgttacctctttttgaaaaaggctgcctcaaaaattcaagacagcctcctttggtttaatcaaaatcaaattttgtaattctatcgtgcattgctttataacggaaacggatcatctcgtttttctccaaaacgtcctcctctgttcctctgtactgacagcggatgcagctgtaaattcctgtttctttattataaaacatatcaatgtccagatctcttaaaaagcaggatgggcatctgtaatttaatttgcctttgccaagttgagccatgttgcaaatacctccttatctgagattgtttttctgtatcccaatgtaaacattggtgagaatgcatatccttcttttacatatccttctgctgtttcatcagaagctgtcatggatacacgtgtctcgatttcaggaatgactgcggaaacttcttttgctccgacaacaccttcctcgcggcatttgtatgcatagtggatttctttttcttccgatccgtcaatctttaaggtgatgtttgacatatcctcggaatactctgttgtaccatagcatgcaaccatgtactcatttaatgtcacttctgcagttggatcactcatctctaagatatttctctcaatcttaatgtttgaggatccttcttcgaagtactcttttgtctgaagttttacggttaaatccctaaactcgatcgtcacaggatctaaggtaagaattcttgtctttccttcctgtgagaaatgtgcgtgtgtcgggcagaggcagagatccacttcctctcctttgtaagaaagttttgcacttcttacggttccttctccggcataatgtgtgaagtatcctgcacggtatttctcctggattaagaatggataagaggcatcctgcacatgttttgtaccgataccaaccggccactccaattttgctgcgtaaggacgaagatctacgatcgcaccgccctgatccatgttcacacatgctctcatatatggatcgcaataccagaataactgtttgtcagaaccatataagatatctctccagagcgcacattccggttcgttgtaattgttatcgttgacaccttttttctcacgatagtagtctgcaaactcagacatcgtcatatcgataagctgtccttcttttttcagcttgccatagtaagcacatccatcgctgtaagatttgtaaagaagttcatatggctgctcccagcgtcccatcttgttcatccagcctggtccaacgaacatcatgttgtaagaatatccgttgttatatttttccagagaacggtactgatcgatcaggttgtaaagatatggatactcccatgtctttgtatcatagatcattccacgtagtacgttctgtggatgtgttccgaagttggaaccatttccgtcgtaacatgcgatcaggtcacgggaaagatgtgggattgctacgattccgctatcctcttctttgtttgctgccggtgcatgtgtattctgtttggaaggaatccatggtgcccatgggccgccatcgaataatgtataccaggagttgttgcaggtatgatatgcttttggtccttcctcccagcaggttgcaactgcacattttacagttggataagctgctttgatgtagtttgtcagatcagcgtccatgtagtaggaacctgtggattccggatagaagccgaatctgtcatggaatttttcgaaaacatcgtttacgatcgcttttttgtcttccatagagaacatccagatacagaaatcttttgtcttgtatttctcacggaactcctcacatggcagaccaagcagtgatagtgcgatctcatcaccatatacttcatggtcatgttttgcgatctcaactgcctcgtcattaaaaagggaagcatatgtcatctgaatggttacttttaatccattctcatgtgctaatctctgctgtgtcttgaaaatatccaaagactctgtcagcagtgctttatctccgatatcctcctctttgccctgtcctgtcacggttgcagaatactctggaaccatctccggacgatgaataagattcaatacaaatttatccatttttttcattttctcctcaaaattttatatgattagacgattgcgaaacttccataagattctttgaattgcagataattttgaaactccaatttatattctgaatgttgtgagtttcagaattatctgttctttcaatttagtttttacgagtttcgcaattgtcttatgatttagcccttaactgctccacctgtcacaccttcaacgtagaacttctgcattactacgaaaagaatcgaaataggaattgcgatcatcacaccacccgcacagaagattgcgaagtaatccccgatcaacgtcttctgtaagaggttgtaaagtccgatcgctaccgtccagtctgcagattccttggacttgatcatgatacgtgccatcacgaaatccatccatggacttaagaaagcgttaatgatggtatacacgatcattggttttgacaatgggataataattttcgtaaaaatagttgcctcggatgcaccctcgagacgcgctgcctcccttaaggaaaccggaattgtatcaaagaatccttttaacacaaggaatccgagtccggaaccagcggagtaaacgatgatcaaaccagccagagaatcggtgagtccgatcattttcaacacaaagtaaactgcgatcatggaaagtacaccagggaacattccaaggatgatggaaaagctcatcaactgttttcttcctttaaatctcatacaactgaatgcataagaaaccatcagtacaaagcaggaagagataatgcaggtaaatagtgccacgataaaggtatttttaaaccatgccggaaagtttgcagcagtatctgtctcaaagaacagctggtggaaatttgccagcgtccagcgtgtcggaaagaaatgctgataacttacgccctttgttgcggataacgatgtcgcaaccagccagacgatcgggatgagccagatgaatgcgagcagtgcaagtaccacatgtctgattatgatattccatgttttctttttcattattggtacacctcctctttgtcaccactgatcattctggtgtagctaagcagtgtcagaagtgcgcagattacaaacgaaataattccgatcaccgatgccatcttgtagtttgagttatcattggtcaaagtaaacagccatgtgataagaaggtctgtctccttggcattggagtttgcaaacgccatatttgccgtagttgtagaacttgtcagcaggtaaataacgttgaagttgttgatattggcgatcacactctgtatcaaagacggtccgcagataaacaatacatatggcattgtaatcttccagaaaatctgccatttattggctccatcaattcgtgcactctccagctgatccgtcggaatattcatcaggataccagttgcggaaagcatctgatatggaacaccgacccagatgttgataaggatgatcatcacgtgggaccagcccggttttgagaggaacggaataaagtttcctgaaacaagaccgatatccttcaaaaatccggtcagaccaatgttggaacaccatgtgttcacaataccgtgatctgcaaacattttgctgactaacagcaaggttacgaactgtggaattgcgatggtcactacaaaaagtgaacgccacatttttttgaaatatgtattctcatgattgatcagttttgcaagaagaataccaccgataaaggttgtaaaagttgccattaccgcccagatcatcgtccatgcaagaatcctcacgaacgcataggagaatgtgatggtcgttccgcctgtaaacatatttttaaagttcctgagtcccacccatgtaaacagatagtttggcggcatatgatccatatcataattggtaaatgccacacaggacatgaaaatgatcggtatgatattcatcatgataacgccgatacttggcagggtaagcaatgtgatataaaacttaccattgaaaagagatttgacatcctcaccaaatgtattgatgtgctctccctcttccttcataagctgaaggcggtaaacagccttcatgttgcttatatataaaagtatgaatgctaagatcacgaggattcccacgattccataaagaaggatgagcaatgagttgtcgtaatcattaacagtatttttcatagtcagcggatcaaacactgcctcatactgtactgtaccaagcgtattcagatccttaatataattgatagaaaaaagaccggtaaacaggaaaaaaatcacttcgagagttgtcattaaaataccctttataatctgtttccgtccaaaatatccggctcccagaatgatcagcgagagtttacaccagatatccccctttgccacagctcttccaaagtcggcaaagtactttttgactgcatttaaaaatgttttcatagattcactcccttgcgtgaatgagtacttttgtcacaggacaaaaatgtttctctttttaaaaattccacataccctgcccaatgcagagcatgtggaattcagattcatgatagatagaaggtacgcccagcggacattctatgctatacgtatgaccgaatgtggattattcagctaccggctgtgtaataccggctactgcatcgtcaagtactttctgaagatcagcagctccgtcaacaaggttctgtccaagtgcttttgccggatcccagtagttgttacctacaagctgctgatcagcgtatgctgactgagctgcaagtgctgcaagtgccggggagtcaatctgggaagctgctgccaggttagcaggaccttctgctgttgcaagtccgatctctaactgactctcttcgtttgttaagtactcagcaagaagcattgaccagccaacattttttgcatgagagttaacacctacgaatttgtatcctgcataagatcccatctgtgtagctgttccattcacatcaaaggtaggaagtttgctggcagcatatccatcaccatactgatcctggaaagaagttgcattccatgtaccggaaacgtatgctccaagtgttccatctgtcagcattgtgatcgcttcctgatctgctacgtttacaaatgctggggaagaagcaatattctcaatgctctctgctactgcaagacctgtctcattgttccagtcacactcattggagttgtcttcattcatggaaagggtacatcctgctcctgcgaagaatccatatacataccagccgtctgcgatgttcataccgacttttgttccggcttcttcagcttttgcttcaagagcttcccaggaagctacatcttcctctgagaaaatgtttgaatcatagtataagaagtatccgttggaagctgttaatggataagcataaagttttccgtcttttgtagctgctgctacagttgcctcagagtttgtctctgccggatcatatgtataagtagctgctatttcctgaagtgctcctgcatttacaagatcatttacctgatcatctgcaaatacgaatacatctgctgctgcatcgatatcttcgaggatcttatcttttgcatctgcctcagatacagcaccgatcgtaatgttgaaatctacacctgagtactgctcctggaatttatctgtcagttctttcataactgtctggtaagcctcaagctctgagcaccagagctgaatgtctacagttccttctgttgcagcgatcaagtttgcaattgcatcatctgctgatgttgtatcagctgcttctgctgtctctgtagcagctgctgtgctgccgcctgctgcattgtctgttgtctcttctttgcttccgcatgctgctaaggaaacaaccatgcttgttgcaagtaatacgcttaatacttttttcttcattgaaaatttcctccctttttcttcccgcatttttgcgtttccgaaccattttaccgacttttgtgcatttgcgcaatacttcttttgtttcgcattttgtattgctatctgttttgcgttttgttgcgttcctcttttgtgttttgttgtgtttcgctttttgcgcaatcggttgttcgatggtttaagtatagtacgcagttgtttttgtgtcaatgtgcatattttataataagtatacttgttttttgtctattttcgctaaattattttgttattttcttgtcatattcttttcattttcaatcattgtgcaaccgataaaccttgaaatttcaagcatttatgaacatttttaagcaattttcctatgtgctgaaaggcatcaggcacagagtttaatctttgattggcacaatttacggtatactttatactgagatcacatcaaagccgcagacaaatgcaatgtgattatggaatttttcatgattgcaatcagtcttatatcgtttctgtctgcaggattctgaccaattacagttggaaaggatataatctcatctttcacagccgattcggcacgagattccattttgatgaagaacttgcaatgcataaaaaaattgataatattacgttgctgttcgctcatagctcgttctagtaacgatattgttattttttattcgtaaaaaccagttgtatgcattgaaaaacaccaaacattccattatcataaaggaggaatatgattgaacacaaatgatggtaaaatccaatggcatcctgccttctccgtattgatcgctgcaagctgtgtctcatcccatgtgaccgggacttcggtattggcagatcggtcgttatatacgatctctgctttttccggtaaaaccacttcatccccgacattgcatgtaactgatatttccggaataaaatcaactgccagaggcacagaatttccgtcttttaaatatctgaaaacattcagggaagccagcggatgtcctgtgaaatcaaataatgcctgattatcccatgaacagccaccataatacagaccggcatcatccggatcataatctgcggagtaactgcttgcccagccgcttccgtatttttcccataaatcagaattatctgcaccggcacttccgaccggaatccatgtgccttcccagtagaacataccgataaccccaacttcatttgcagctgcacaaatatcacggatcatggcagcctgactctggacggtcggcgcatatccctctaccgcatcctcgattccgtcaaagctgtttccaaaaccatccccatcctctgaggtataacagtaagaagtctctgcgatcatgactttctttccgtaattttccataatatttttggcaactgtctgcatgttttcatttgttccatcccagaacggataatacgacaatccgaaaatgtcataatctaccttgtactctttcaaattggatgcgatcgtgtcaatcccgtcattgtcctcaatattggtgtaatgtaaaactatctgaatgtcttttccataatcggatgagatttcccgcacagccttacttcctgcagtcagaagtttcatcacagagtccgtttctgtctcatcggacattccattgttgatctcatttccaacctgcaccatgccgacatccaccccagcatctaaaatcccggtcaggctctctttggtaaaatcataaagtgcatccgctttctcatctgccgtcattccttcccatgctttcggcgcatgctgtctctttggatcggcccagaaatcagaatagtgaaaatcaatgcagaccttcatcccgtactgtgtcgcacgttttccaagtgtgatggcagccgcaacatcattatttcctccgccgtatccatttccgttttcatcataaggatcgttccacacgcggagtcttatgtaattcacgccggattctgcgagcgtcttgaacacatcctgctccgttccgtcatatccataatattttgccccgctgttttccacagaaagtaccgctgacgcatccataccgcagataaaatcatccgaaatcccatcaaccggttccacgaaaacgtctgtctgctccactgcctgcccagtttccttttgcacgcgctcactgctctccgtctcagccactgcctcagtgcctatagtcttcttttcatttgtgccgcatccaaataataatggtgcacacaggctggcacttaaacacaatgccagaagttttctgctgctctttttcatttttgtaaatacctccctcagaacttctccaacaacctgccgctgcctttcatctgtacttccagatataggctgtgatcctgcttttttgcgcaatcggttgttcaagttatttacaatagtaattgaaaagagaatcttctgtcaatatgcacaatttataatcttttttcttaattttgtgaataatgtctaaagtaaaaaaagcaggcaaatctgcgttttctttcacgcaaaataaacctgctttctctcatcctattttattttgtagactccttaaggacaacttcgtatggaagcaatgttcttgtctccacttccgcaccctcgatcacatccaataccgttttacatgcaaccatgccaagctctttcgcatcaaaagaaagtgatgtaatggacggcacattattttccagtacggagctgttgtaaaaagatgccacacggatatcttttggaacctttacatgcttttcacgcagctttttcaataccctgctgcacaccgcatcgtccatacacaaaatacattctgcctttcgctcgagtacctcttccacgattttgtcgatcacaacatgattatcaagatttaaaaaaagcattgtcggatcaatgacctcacccattttttcataagcttcccggaatccccgcagacggctctgtgtgaccacatggttctcatctcctccgatcagtgcaatacgcttcattcctttcattaaaataatggacgtaagttctttacacgcacttttgtgattgtggtcgatctgaatcacacctgtataattggaggaaccgatcgtcacaaacggtacttttttttcctgaagatactctatctgccgatcctccacaaacgtcctcatcaggatcacaccatctactttacggtttgagataatgcgctctaacgaggagatatcgttatttttacagatggaaagcaggatatcatactccataattccggcgatctcctgaatcccaaataagcattcctgaaagaatgtgagatccacaacatcataatctcccggcatgaccacacaaagattatatgtttttgactgtgccagtcctttggcgataacgtttggcttataatcatgctcctcaatatattttaatacacggtctctcgtctcctgcccgatccgtcccttccctgaaatggctcttgagacagtggtttttgaaacaccaagtgcttctgccacatctgcgatcgttatatttttcttctcttcgttccccataaaaccccttctttcctcaaagcagttacttcccctgaattgtgctgtgacttcctgtatcgcttgcgatcctgccacaatgttactttgtcctgccctgatgtactgcgcatcctttgcgcaacaatattattatcatcctattttcgaaaaaaagcaatgacatttttacatattttccaaacaatctttttgtttctgttcactcgtgccccgttccggtaacaattctgttttttgtatcagcatcggatttacatttgtttttcctgatgttataatatgtttgcgcaatcggttgcgttatcggatgataatatagaagatcacactgattgtcaacataaaatatttttttgggggacaatatgaaaacagaccatttacttttcggggcagcttattactcggaataccttccatatgaccgcgtggaaaaagacatggaaatgatggaaaaggcaggcatgaacacgatccgtatcgcagaatcgacctggagtaccatcgagccaaaagacggtatctttgatttcacacatctcgataaaatgcttgaggcggctgcacgccaccatatttctgtcattgtcgggacaccgacctacgccatcccggcatggctgtcaaaaaaatacccggacattctggctttgaccaataacggtcagaacatttatggtgcaagacagaatatggatatcacacacgcaggctatctgttccactgcgagcgggttatccgcgcaatgatggaacatatcaaagatgttccgcatatcatcggatttcagctggacaatgagacaaaaagctacggcactgccggtctgcgtgtccaggcaatgtttgtcgattatttaaaggaaaaatatccggatatcaatgaattcaatcacgagttcgggctggactactggagcaaccgcatcaatacatgggaagatttcccggatgtccgcggcacgatcaatgaaagccttgccgcagaatttgccaaattccagcgtctgcttgtaaccagatttttaacatggcaggcttcgatcgtttccggatacaagcgcccggatcagttcatcacacagaacttcgactacgactggacagaccattccatcggctatcagccggaggtcaaccagtacgaagctgccagatgcatgaccgttgccggatgtgacatttatcatccttcccagtcgcttcttaccggggaagagattaccttctgtggcaacatctcgcgcagcttaaagaaagacaattaccttgttttagagacacaggctcagggaaatattgcatggcttccatatccgggacagctcaggcttcaggcctacagccacattgcaaacggctccaacagtgtcatgtactggcactggcactcgatccacaatgcgattgagagctattggaagggcatcctgtcacacgatttttccgaaaatgagacttaccgggaagctgcatccatcggcgcagactggaagcggattggcacccaccttaaaaacctgcaaaagaaaaaccgtgctgccatcctgcttgacaataactccctgaccggactgcgtcttttcccattgaaagacctcggcaattacagctataacactgttgcccgctggcttggcgatgctctgtaccatttaaatatcgagtacgacatgatctcctctgcggaacgtgatttttcttcctacgggtgcctgatcgtgcctgcactttacagtgcttccgaagatctgctcaccgcaatttctgattatgtaaaaaacggcggacatctgatcacgacgttccgttccggtttttcagatgaacagttaaaaatttatgcggatacacagcctcacattttacaggaatgtcttggtatccactatgaccaatatacctacccggtggatgtttcggtaacactgcctgattttatggctcatccatcctgctccggtcatgaaaatgcggcttccaatgccagctcgtcatgttccgatgaatcctgcacaaccagcagcaaatgtctgcactggatggatcttgtgatctgtgataccgccacaccgctctttttctacgatcacccggtctggaaaaaatatgcggctgccacagtcaaccagtttggaaaaggttcggcgctgtatctctccagcatgtttgatagtgctcttctggaaaaagttctggttcattactttgcttcgcttccggaaacacttttagcacatccggaatgccacttcccggttatcatcaaggaaggaatcaatgattttggaaaacgcgtaagattttactttaattattccgacgaaacgcagtccgctgtctgtgccgatatgtccggtacagaactgttgtctggcaacacaatgtccaaaaatactgcactgacacttgatccgtggggtgtacttataatcgaagaaaacaagtaacagcattcgaaaaaataccgcatgagaaaatcactttcccatgcggcattttttttgcgaaatatttgttaattcattataaccttttcttttttccgtatgcagttcccataagagcgcatccaaacaataacaggatcactgccagtgcaatcggtgtctcgtctgatgtcttcggacttgcgatcacgcttccggttgtctggctcatatctgtatcactgaaaacgatcacataatcagaagcatgtgaaaacgcaaagtctacggttccgtcctcttttacctgtactgcctgataatactcaaacttaccggttgtctcattgtagtaatagaggtttgctacttttccgctgtaagtatctccaacagcaattctcaatacgccgtcaaatccaaatgcaccgtcatagtttaaggataactggattgtttcatttccgtctgccagcgctgtcactttctgttttggaatatcactagttcccacaaccagaccaagatcgattggcgctgtcacattaccggtgatatcttttccattgatgatccagctggcctgatcactcactttgaaggtaactgtcacatcttttcctttgatattctcaaatacatttgccggaatctttgttgtctttttcaggttgacacggatagtacttcctgcctttgccttgtttactgcctcaactacatttgcaaagctttcttcctgcactgtcacctctgcaacagcctgttcttcctgttttggagctgtcttatttgcagaagcgctctggtttgcattgtttccggaagactgtgcatttccattgctctctgctgtatctgtcttcttatcatcctgtttttcatccggagccggttttggctgctcttttgtctgttctgtcagaacaattgtaccaccgtcttttgctgccggaatggtgattgaaactttctgatccgcggatactgtataagtttttccgtcataaaggtttgtaagaatcgttcctgcttttgcagttaccgggattacaacctcttttgctgcctcttttacattcattccaacatacaaagtatctgctccatagcttctgctgatcacttcgtaaccttctgcgtcagaagctgtcactgtgcttctgtttcctcttgcaaatacatctgtgtacgcattacggattgcaagcattgtcttgtaatgattgtaaatactgttgctgtctgttttctgtttttctaactctgtccagtcaaaatcgcggcggttcgtctgaagcggccagttgtttgccccgccctgtccgatctcctcaccataatagagcaccggctggccttttgctgtaatctggagtgttgctgccactttcatcaggttgtaagcttcctcgtcgctgagcttactctcatttacaagtttatactgcagagtgtcctcatcatggctgctcaaaaagcttcccattgtagcagtgttattgatcgcaccatttcgtttctgtaaagaactttccacaccagaaatatctccggttacgaatttctgtgcaaaatcattgaaatcaaaatcaagaagtgcatccatacttccggttccaagttctcccgcattattggcatatcctgcaccggaatactctcctatcattttaaaatcaggatttacttttgtcagcgagtttttgaaagcttcccatgtcgttgtctctacatgttttacagtatccacacgataatagtcaatgctgtattttgacatccactcggtctgccatgcaacaagctggtctgtcactgctttgttttctgtcacaaaatcaggcagatctgacaatgaatcatatttatcatcaccactgatcgtgttgttggagtcacggatcatggaaatactgtttccatctgcatctgttaaaatactgttgaagtatttttctgtaccgtaacctgcatggtttaatacaacgtccaccatgattttcattcccttgctgtgagcggcatccagtaatgctttgaactgctgctctgttccaagatgtctgtttaactttgtgaaatcgcttgcccagtaaccatgatagccataggtagcggtatctgtcttattatcatgctgatcctctgtgatattttctacgattggagtgatccagatcgtgttcacacccagatcttttaaataatccagtttctggtttaatccggcaaaatctccaccgtgatagctggatccgcccttttcgcctgtgttataatctccaactccgtatgcatcattgttgcttgcatctccatcaaagaaacggtctgtcactgcaaaataaatcactgcctcatcccagtcaaaatctccggcactttttttgcgctctgtgacggtaacatttgtcgctgttgtgtatacatttccataaatatctttcactgtgaccggaatatttttcacgcctgctgcaactgtattcaggcaggagattgttccttccataagttccggatcaatcgcaaactcttttcccagtcccagctcactcagatcggctgtgatcgcagcaatttcagatgtttcaagaccttctccctcttttgcagtcaattttacagataacacattgttgtcattgtaatccattgcatactgtgataaagaagactctacactcacatttgcttttttgaagtggcatacgctgcattcttttccattgctgtcgtttgcagttacatcattaaatgcatctaattcctcttttccatttaccacatagtagtaatagtaatcacccgtggaaacgccagtgaaatcgtattcaaagcggtcatttgctgcatcataagtcatcgggcaggtctgtccgttgacaacaacactgactttgccgtctaaagaagcaaggttattttctgctgccagtgtatcgttcctgtaataaaaatggatcgtatcattagctccatccatctcgtaacctgcgttgtatggcaatactcttgtgattccttctccctgtgtgaacactgcttttaccactgactggtctgccgggatcgtcacataatgatctccgccgtctttgtttgcccactcattgtcagcagtactttgtctcatacagaaagataacatcagatctgcctgcgaatcttttactggaattttggcaaccatttttccattgatgtctgcaaatgctacagatacatcagagccgaatccactgttccaggtaaaaatgttccagccctcataatccttcgccggtctgtcgtactcgatcatgacgtagcgggatctcggtgctaccagctctggaatctctgtgtatgcctgcttactattagatacaatataaagtgttacattttctattcctacgctgttgctataagaaatcgtgtccttctcccatttccactcgtcttttgatcttgggatgatctgaaggtctgtatatgggagttttatttctgcgcgcagccactcattcccatcagaaagtgtctcggttgcggtaaaaggtgttccctctgtcgctccaacaccatttttctcccagatccataagtcagatgcattttctgacatatgtgtcttatcaaaatcataataataaatggtatatgtatataatttttctgtcacattgaccacaaagtcagaggtctgtccgttctctgcttttgcagtcagttctacggtctgtcctgtataagattttccgattataatgctatttccatttaatgtaatatctttatttgcagtttttaaactgtaagtaaccggagcttcactgcttgttccgtcttcagaccacaatgtcagtttttctggaagtgctgtctcaattcccttcatggcatctgcttttccgtcagccaaacccggaacgatcaacacactgtttgttccgcttactttattatttaccggatctgcaaatgaaacatcccaggatttattaattgcaaatttatattcgtattttcctggcgcaatggcaaaggttccaacccacatacctgttgcttcatcttttttcagttcatagtcggaagaatccactttccagccgttcattcctcccggaaccgtaactgcctctgcatttccggctttggttgctggaacacggaatgttacatttcgtccatttacctccggacttacataacctgcctctttgtattcgatcagagtttcggatttattggcatctttataccatttcataccaccattgccgtcacttaagtaatagatcgaggtgtctgttgttatggcgttgatagctttcacttcttcgctctgaccatcaaattttttctctgctcctgtgtcagcatctaccaactgaaaccctgtcattgttgttccgcttaatgtaatagtataaatattttcaacgtctgaatcagccagttttggtttgtcctgatttccccacgcagcaatggacgcatccccagctccatgattgtccaatacaaaatcgccgccccatagattgataacaggcgttgtccaatcttctggtttttcaaaataaattataactttatgtgtagctgctttttctttctctggtaacacctgatttttatctttgtctaagtaccatgacattccattatcattctttaaaagataaaataatgtatctgatgttgccgaattaatcgcatcaataatggcacagttttcaaatttgtgttcttccgggtttcctgcacctgttccaccatttacaatctgaaagccactgatacaattcgtccggatatcaatataataataacctgttgattcatctttcaacatagcaggtcttgattgattcgtccagacttccacctttcctgcattcccattatctacttcaacgtcagattcattccaatagttaaatgccgggatattccaatcatccggtttttcaaaatacaacctcacgactggattctccgccgcctgtactgtgctgcttccaccaccaagtgccggaaccatagttactaccattgcaagcactagcagaaaacatagtactctgcttgcaatgctttgcctcttttgaaagcttttcgttaactttctcattcttccttctcctttttctcccctacttgcatgtgattatatcataatccccctcttcacatgttttcgttttttttcgcatttctattgtattctaaaatattgtattattctatacgtaataaatcccgaaatctcgtccaaatttttgtggattttaaccaattaaagtataaaaatgctcattttcttattttgaacataaaaaaagaatccggcatcgcactaaaaaatgcgaataaccggactgttaatgattttatttactttttgttatatctatggtataatctatcaataaaaaggtgctaccgatagacggttagcccggtttacgcattataaaaataaccgcaaccttggcctggggcggttatttttttctgccatggttatctttcccaataaggtaaaataatccggcaacgcttatcaataaacttgtgaactgaatcagttccgtaagtgttatcatcagcatcccctccgttaatgaatttcttctttcgaagatttctatgtaatcagagggttcagtccctctgttgagggcttaaccgcctaccgttttctcgcagcacctcattcattataccaaaccaataaaatcagtgcaatttattaaatttttaaaggaatgcttttaataagcaaaattctgtacccagtaataagttgagccatcataatagcatgaaacagagatttttgtgtaacttgcatttaaaatattggcacgatgtccatcacttcgcatccacccatccattaccatttccggtgaaatagccccttctgcgatgttttctcctacgttcatttttccacctgcagaattatggctaaaatccgtagtgatttccattgcccttcgatcagagtatgaagccatactgctatcccatgttaatgcatccacaccattagttgctctttcctgatttaccattgcaaatacctgttgagcataattactatcataatatccagatatatttgaattatcattgctgttatcttcaaataaagaatttaaaaattcatctatttcgtcaggtgtcattgaattaaacatttctactaattcatcatctgtaatacccaaactgttagtattggattttccactagcctgagatacttgattttgagtatttgtagttccagatttcttatcacttttgccggatttcttttcatttgcagtaacatcacttgtctgtaaaatcagacccgtcttttcgatcagagcggctgcatccaaacctgtgtatgtaaccgtcacttcgtaatctgcctcgttttcgtttccagcctgatcctgcactgtgcagtgtgcatttaatacttctacagggttctctttctgcagattaaatgatttctgctcaaattcgtatctgattgcattgtctccgcaaaatgcatcactggctgccgcccactccgcatttgaaaaatccggaagctcatgcagcatgtctgcaatcttttcagcgtcatctgtgttgacgtcgtcaatactgatcccggatgcatccacatccagatcgatcacattctgtgccagctctggagctgtgccatccacgtaaacgtttaatgttatatctgtaaaattgccttcactatcttttacctgtgctgtcacttcatagcagccttcatcatccaactgaacactttcttgataatctgctccatcatacggctctgcattatctaccgccgctttttcctgcagcatatcatcataatcacagactacaagatcctccttctgctcacaagatacaattccgctggaagtttccgatgcatctttgatctccgttaccagatcatccatggtcagagttcccggctgcatgtagatataatcttttgcttcgcattgtggcgaagtcgtgtccttcacttctaccgtaaatggataattttttccatcatatgcaacggcagcattgtacgaaccaacttttgtttcatctactgctgacagatcaaggcttgcaccctttaagattttctcatccggattctgcagataatctgcaacattttccgacagctcatcgccaagctccagtgtcactgtgctctgcgcgagttccaccttggaacatccggcaataccagccacgcttaaaaaagtcattcctaaaagtacgaattgtttatttttataacttgtgttcttcattttgtgacctccaaatgtattttcttattataatataaatgtaccacaacatcaagaacatttgttctgttacaaaaaagagaagcaaaaatcatttttcctctgatttttgcttctcttttttttgaaaatttcattttaaaatttatagatatcctataacatcacaatcggcatatgccaaaatgatccaaactccgcttactgtgccacagttccatccgttgtctgcgctgctggatccgcaggagcaactgttgagccatctgccggcgccgtctggtctgccgcaggctgctgtgcagccgctgcagcgccactctttaaagctgccagtgccgcctcatcatccacaagtgtctgataattggtaacataactctttgctgtatccgataacgcatcgtatgctgctcttgctgccacgatgacaggttcactttctaatgtaacagttccgatactgttgatcgtatttacaaccgcagctgcctctttctgttttacggtatcactttccgtacccgggaggttataaacaaggacgcagtatcctttgtcgatcgtctcatagattttcttggctgccgaatatggaagattgatgcatccatgagatcctcttgtcttataaatatctcctccaaaagcttttctggaagtcaggtcatgcattccgatgtcaccattaaatggcatccaatatgtaacaggtgtttcatagtccggtccgcgtaaaacagcattcaatgttttataggtaagcataaatgcgccgcctggtgttgcatgcccttttgcaacatttccggatacaaaatcggactctgtcacaagcacaccatctttataaaggaacaaatgctgtgcagtaaggttaatctccacataggaattaccataatcattttcgccatgactgtttgcagtctgcgcataaaccggttcacgttccactttttttccggctttcagatcatctaaaatctgtgccacttcctcggaattgttgattttccatccgtaaggtccattggaaattgtgaccgttgaaccataggaagttttcagttcttttggcttgtagcaggtattatattcacttgcgagctcttttacaaaggaacggactccttcctcgtccaccacaagatttaaatcatcatccacagaaagccactcggaaatacgctctccgtctaacacttcttttgcgacatcaaaatcatatgtgatcgttgttccgacataactattcatctcgtcaatcactgccagcagcttttcattgtcgtcttcgatttcaggtttcacatagcagtcagcctcatcaagatcaagctcatctgccaaaaccaaaatggaatcctccaccgcttttttgaatttgatcttatcgatcgttgtaccataatctgccggaactaaggaatatccatccgctgtgtatgcggaaacagctgcatccaccggctcacgctgttcggatgcctgtatgcagtttaactgatcaatctgactatccaaagcgtcctcgtcaaatgttaccacttttgcaagttcaagattgtcatgtttaaacagtgtcaccacccatgcgaacccattctgtccattcaaaagttcttccacttcaccgttgaataccggtgcgatctgaatggattctccggaaatgctctcgctgccgtcctcacgctctgccagattcagcacatagctgtcgatttcctctgtgatgagctgctcaactttttctactgatttgccaccgactttaattccgtcaatggttgttccaaagcagaaatgactctgaaaaaagattccaaacccaacataaacaaccgcgagacatgccacgactgcaccaacaatcacgaaaattttctttttttcttttttcataattcttcctctcactcttttgtagcttattcaaaaagacgtagcgatatacgcctattttcagcaaaaccatactctattataggtagaaaaaaggctttgtcaacaaattgcgacaatcgtaatatttgcgtaatgaatttgtttcaattcgtaacaatgcaggtaaaaatttcctcctgcatttgtttgtagggttgcacaaaaaccttccttttaccttaagaaatctttaaatattcaataatctttcttaaaaaagaggaaatggaattgtttcctaaaattgcctatgctataatcccacagtgtagggaaaagaaaatattttgacttaaaaacctgttaggaaggtgatattttgaagaccgatatgaaaagcagactcaatgcttttatagaaaaaaacaaacatgcatttctgcttctttatttttgcatttattttccgtggtttcatcatttagagcggactgtcacaacacattttcatgtgatacatactgcattagatgatctgatcccattctgtgaatattttattgttccttaccttttatggtttggatatgttgcatgggctgttggatatttttattttaaaaataaagatgaatatttcaaactctgtgccatgctttttaccggaatgaccgttttccttgttatttcaacgatctatccaaatggtcattatttaagaccagcttactttgagcacaacaatatttttatccagttagtcaaatggctgtacgcaacggataccccgacgaatctgtttccgagtgttcatgtgttcaactccattgctgtcaatattgcggtatggcacagtgataatttcaaaaaaaataaagctgtccgctatggttccgcagttttaatggtacttattattttatccacaatgtttttaaaacagcactctgttttcgacgttgtgaccggaatggtgcttgcagtgtttatgtattctgttgtttatacaacaaactgggttgctgtcaccgctgcaaaaccggtgcgcaaaccaagacgaatttaagaattactgcaaagttaaaaggtcatagttccttcctgtattcaggataagaactatgaccttttcgttttcctatgtaattaccaccgattcagaaaccaagtttcctatattattaccacagcttcaataactggattccggttttcatgactttgtacttcacgtcctcaagttctgccgctgcatttttcagttccttgcggatctcaatgtgctgcggacagtgtgtttcacattttccacaggaaatgcactgggaagcactgcttgtatcctttcggaaagcagtgcattgcagataatccctccgtccggattttttcccttcggaatacatcgcattatagcagcggaaagttcccggaatatccactccacgcggacatggcatacaataaccacatccggtgcagccgaccttcacctttttcttaatctcagcttttactttttcgatcagctcctgatccgattctgtaagacatcccaccagtgactcgctcgctgtttttacattctgctctaccatctccatggaattcatgccggagagcacacaggtgacttccggctggttatacagccatttcagcgccagttctgccggggtacgatgttgttcgtccttacggaataattcttttgccgactctgggagcagattcaccagacgaccgcctcgtaacggttccataatgatgaccggaagtcccttcttattcgcatagcgcagtccttccacaccagcctgtgaatgctcatccatgtaattatactggatctggcagaaatcccagtcataggcatcaagaagctggcagaacattgcggaatttccatggtaggaaaatccgatctgccggatctgaccggatgcttttttctcacgaatccagtcttccatgccgagttttttcaatttttcccaggttggaatgtcggtcagcatatgcatcagatagtaatcaatataatctgtctgcagccggcgcagctcctcctgaaacatcttttccactccgtcaatggatttgatcagatagtgtggcagcttcgtcgcaagattaattttttccctgcaatgatttctgtgcaggatttctcccactgccacttcatttcctgcatacacataagccgtatcaaaataattgacccccgcctcaattgccgccatcacttctttttctgctttctcgatatccgcactgtttccttttttcgtaaaacgcatacagccatagccaagcgccgaaatgtcatttccgtatttgtctttgcggtattgcataccttccgctccttattactttaaattttccagttcttccatccagatccttgcggacgcatccgacggcatacgcagatctccacgcggagaaacagcaacactaccaaccttcggtccgtccggcaggcaggaacgtttgaactgctgtgcaaaaaatctgcggtaaaacgtttttaaccatttcaaaatcgtttcatcctcataagttcccgcaaatgcaatttttgccagacgatagatttttgccggagcatagccaagacggagcatatgatacagataaaaatcatgcaattcgtaaggtccgaccagatcctcggttttctgggaaatctttccgtcctccggcggcagaagctccggtgaaaccggtgtatccaaaacatctaacagaaccgcctccagcttttcatcgccacaggtatccgcatagtaacgaaccagatgacgcactaaggtctttggcaccgatgcattcaccgcatacatcgacatatgatctccattataagtagcccagccaagcgccagttccgacagatccccggtaccaataaccatgccgccggtcttattggcaatatccataagaatctgcgttctctcacgcgcctgtccgttctcataagtcacatcatgcaccttcgggtcctgtccgatatcccggaaatggatattgaccgcatccttgatacttacttccataaaatctgcattgaggcatttgatcaggctcaccgcattgtcataagtgcggtccgttgttccaaaaccaggcattgtcactgccttgatattctgatgatccatgccaagcagatcaaatgctcgtacagtcacaagcaatgccagcgtggaatccaaaccaccggagataccgatcacagcagatttgcaatgcgtatgctccagacgttttttcaatcccatcgcctgaatggataaaatctcatcacagcggcgctctctgtctgtcttgcttcccggaacgaacggcatcggatcgatgtatctagtcagctctgtttcttctattttcagtgcaaacggaatttcgctgtaaccatctgcccttgtctcaaatgtcgtcattctgcggcgctcggcattcagacgcaaaacatcaatttccgaataaatggcttcatttgcaaaacgttttgctttctttaaaattcttccgttttccgcaatgatattatgcgcggaataaaccacatcctgcgtggactcaccgtctccggcactcgcataaatatagccgcagagaagtcttgcagactgaccgcccactaactcctcccgatacatatcttttccggttgtctcatcagaggcagacagattgacaatgacattcgcaccatttaaagcatgacggatgcttggcggttccggcgtccagagatcttcgcaaagttccacaccaatctttaactccggcattgtctgacatgtaaataacagttttttacccataggaaccgttacttcttctccaagccttacctgcacgagctcgtccattcctcttgtgaaatgtcttgcctcgtaaaattcattatagtttggcagatatgttttcggaaccagaccgagcactttgccattgctcacagtggcagccacattataaagcttgccattgtactctatcggaagtcccacaaacacgatgcagtccagcgcaaatgtaaaggcagcgatctcaagaagtgactgtctcgcctcacgcagcattttctcctgcaaaaagaggtcactgcacgtataaccggtgatgcagagttccggaagcacaatgatcttagcgccctccttctccgcttttttgatttccgcacagatcaacgctgtattttctttggtatccgctactacaattttcggggtgactgctgccaccttgacaaatccctgtctcactactttctcatctccttcagctcgtcaatgtcaaaatgatatgccttattacagaactggcattttacttcaatggcttcgccatcactgataatatcgtctaaatcttttttgcttaatgtcgcaatcgcgcgtgaaacgcgctctttggagcagtcacagtgaaactccgccggaagcgtatctgtaatttccagaccaaactcacctaagatgatctctaaaatctgctccggcgtatttccttcttctaacatctctgtcacagatttgatctcgctgattttcttttccaatgcatccacgacctcatccggcgtgaatggcatgagctggatgataaatcctcctgcctgtttgacagaaccatctacatccaccaaaacacctaagccgacggcagacggaatctgttcggaagttgcaaagtaataagtcagatcctctgcgatctctccggtctgaagtgcgatctgccccacatatggctcttttaatcccatatccttgatcacactcataacaccaagaccaagtgcgccgcctacatcaagcttacccatggcatttggaggcagttctacatctgccactcttgggaatccttttacatgtcctgcagaatccgctgttaccgtaagtccctgtgctggtccctgacactggatctgtacggtcaaaaggtctttctcacccttcatcatggttcccatcatggcagcaccggataataatcttcccaacgctgctgtgatcacaggacttgtgttgtgatcttttctcgcttcctctacaatgttttttgaagtgatcgcaaatgcgcggatcgaatgatcggctgcggttgctcttacaatataatcgttcatgtttttcctcttttcctgttattttatattaggcaattgcgaaacccctcataatcttctttcaattgttcaaaattaacaaaaacattcaagacacgctctcgctacgtgtcgctcgcagcggtactaagaagccaggcacaactttccgttgtaccagccttctaagtaccggcggctccccagtgtctttcatgtcttttgtcaatttttcacaattcaatttaggtttttatgggtttcgcaattacctatgttattctatattttctgttatatcatattccttaaatcaccttcggtcttgcaatgatatacatgcgttcactctctgccgtgaccggatcatgtgtaaatgcatcatacgccgccacaaactccatgccagcctctttaagcagcgctttcacctgctctaactcataggctttctgataatgaagttcttcatatctgcggtaaagatcattttcctcccggataaaaagtgtcaggtcatactcattgaccatctcatcctcgtaaaaataattatcccagatgaaactgctttcctcacggttttcactgatcgtgcactcgcccataagatccctgtatttgtgcacagtgttcagatcaaaaataaagactccgtcctctgccagatattttttcacaagttcaaatacttttttcagatcttccggttctaaaatatagttcatggaatcacagacgctcacgattgcccggatatttccgaataattccagttcacgcatatcctgaagaagatataaaatatcattccgttcttcttcctcctgacgctcccctgcaatctccaacatctcagcggagttatccactcccaccatgtcatagcctgcatctgctaaaagtctcgtcatctttcctgttccgcagccaagctccaccacggttccttctgtcacattgtactcctgcagcagaccggtcagataactgctccattcctcataaggtacattatccatgaaaagatcatatacctgtgcaaaactgctgtatgcttccaattttttctctccttgattattttttcacaaacccttatactacaagtagtattttaaagtgaggttttttatgcccgagaattacgaccattatatcacaaaaaacataaaagcattatataaacggcgacttttttcaccaattgtatatctgatcattgtgatcgtcctatggcatgtattttcactgacggatcttttatttccggtgcatctgacggatgatgtcccactggaatccgcctaccggaatgacgctgccaacatgcataccacactgacagatttaaaattcacaggatacaccagaaataactttgccgggacttccggttattattattacacaatccggaacggagaatgtatcattgtcctactttctccttctacctgtgaagaagggcttccttccattgatgaagtaaaatttaccggaaaaatcaaaaagtcctctgaatctttccatgcactattaaaaaatatggcggaagatttaagctggacagaaagcggtattcatagtagggtatccggatattatatcagtgaaccggattacaatcgtaccataaatacgattctttttacagtcatatttggtacaagtatttatgcgattctttgtcttgggctttatattctgtttattttctttccggtactctcgccgtgctgtcaggatctcgccctgtttggcaatccgaagaaactgctagagcaggcggaagaagaacttgcaacacttcctcagttagcaaccgaggatatgtttatcacagaacattattttattgaaacctctatttatggaaatgcgattatcccgattgaccagattatatggatttataagtactccactctccataagtttttctggtatcatttcagcatttcctatacgctgcatatcagcgccaacaagcatctgtatatccagtgcccgaaaaatatcaaatctgatattgacggtattatggattaccttgccgaagctaaccacaatattctcgttggattcaatgagaaaaatcgattggaagtgcagaaaattcagggaacgccgatgaattttgagaaatttattgcatttttgaagaagcggatttaaaaagaaaaaacgtaaacaagaacataggtcaccaatgaaacgaaaacaccaggcagaaacatctgtccggtgtttttctgtttgtttacgattgtggcgtaatcgtgttttttgttttgattgcaccaactaaaccgccataacagttatggaactgcatttgttttgtttcgttcttttcgttttcgaactctaatgtaatgcgtttctttgttaccttgacaacacgaacgttatttaggatgatatagccaacggttcgtccattctgagttgaaatctcctgaaaagcgtatttgtttactttcatgtcgatccatttatctgctttcgatgcattaaactctttcgcagaaccgaaataaattgcatccaaaacatcagttaacgtggcactaaacacagatgtatcctgtctttgtttcctaatttcattttccatggactgtatttttgatgcgactttgatattattcggcatagttgctgcctgagcgatagaaccagaaggcatgtacaagggagttccggcagcggctggattatacatcaatttaatcgcataccaatgattatctcgatttataaatgcgattgacttcgatatattcttttcgttatttgtctgtacgattttgtacacactaaagtaaccgagcgaaaataaacccaaaatcattgctattggttctaacaatacaacgattgcgttttcagttgcaattccataacaaaacggactaaagaaaagaacgaagaaaagaatcaatccaatcgccatatagccaagacacgcaacagcagggcattcttcccagagcccttcttttttcgttttcatataaattgtttcgttttccataagaataaatcctttcgtttaataatcataagaataacaaaatatgagtgtatatacaacagaaggacaccagattttatttctggcgtcctcgttttgtatattaggctccaagttcgtcttctttttctttgttatatcggaacaatgtcaagaataagccgaatgctgcagtacctgctggaatcagtccaacaaattcataagcatttgcatttgttacaatgataccaagtaatactgcaatgatttttccgataacatagccgagagcaagaccaagcaacaaccaagatttttcagagtcttatctccatagctcacaaagaaaataatatttgtttgtacgattttcttttattctacattgtgactgacttgtgcatggactatataatctgtcctgctttacattgtgagtgcagccacaaaatctgctgatttacattactactctcctctttcaatcgtacatctgtaccataagccagtgatctttgattttttcaaccctaacacagtctttcatatattccatggctgtctcatccgtataataaacatatcctgacacttctgtatagtctgtcataaagaatatgactgcactttcttcttttctttgataattgaccgttccatgtgaggtcagcatccagttacagccatctatcatctgataatccgtatcttccggataattatttaaaatgacttctgcctcattttcatattgattctgcaatatcataaatctcatacgctcaagactctgaaagagcaaaggaaatcgtcctggtccaattgcaaaatacagtaagatgattatcgtaatatctacgagtagccatctttttctatgccttatcaaatcaatgactgtaacacctgcaaaaagcaacaagataaaaaatctcagatatgtaaagccaaagaggaatagcaatagcagtaataagcttatacatttttcgtatattttatattttcgttccatcctaatttctttctacatcagtaagacaatacacccagccactataaatgcagcaataccacttttgtttcatcgtccaatcctgcatcaatctcatctaaaatgacaaatgaagtcgacggattcaaaactattccctttgttcctactattttattatgatccgaatcattaaccgttattgcagctatcaaactgaccttgttcgatggtgcattttcccaaacttctaatgttaaaattgttcttggtgttgccgcttgaattgatgtagccgaaaatcctatacacaaaactgtaactaacaacataacaattatttttttgtttttcttcatttgcatctcttttcattcacagcactgaatcaatgtaacaatatccagtctatccatatcattatataaagtcttttcctttatccataatctcatagaaattcttgtgccttttttcaaatctgtaaactgaattagttcatcattagtattaacaatttttatctgatctgaattataaatttgataatgctctgtaagcccgcaaccattcgttccatcaccctttactactatttttccactatcagcttctgtgattactccctcaaatggaatattttttaatgaaactgctggtgaaaaaaataataatttcacatttaccaatatactgactacaaacagaacaataaaaatggctaaacaaatttttttcttcataagctctcctaacaattgaatattcagctttacagaaagttaaaatgatcgtttaagcgtgaaaaatatctatagtttacataaaacgtattgtattgattcttttctctatttcccgcttcatggaactgctgactccaaaatcaatccccatcacaccaaatccataacttgaaagaatatatgttattgtggtcttttcttcctctaattcttcaaaaaagaaggtcgccgtagcacaaatatttggataaagataatacctctcatatacctgaaccaacacctgttttccactaacacttctctctatttccccacaaaaagaaaattttccttttcctttttccatttcctgacgaaaatttttcactgcatcttcaaatttttgttcaataagcgttggttctttttccatgatattctccatatttagaaagatttttattatttaccataacattcattttgtaaatacttaatccaaggcaaacatctttccacctaatatgactacactttcttcgtgtatttgatctcttcattccattccaatttctttctatacaagtaaaacaatacaccctgcgactataaatgcaacaataccaacgatccggcaaaaacgtgtccattttaaatacttcgcgctgtcctccatttttctgatattctgtaaaagcagccaatagtagcataaaaaaataataaacgcactcacataagtaatgattcccgctacataaggtgccccactcaattcctgcatgataatattggaaatgcaaataatatacatccataatgcaaatggagttacgatcaatatgtttaacttgctatttgtacccatacgctttccctcctattaattgtttctgcataaccgttgacttgttttcacttttctttttaaattcctatatcagacgaataataagtttcttgaattggatcccaatatatatattttacgctccaagataataatgtgccttcctcgtcgtaataattaatcgtaattctatctgcatattcatcttctatctgattgtctgcattcagataataatttaccttactgtatttcgaaatgatattactttgtactcgtccgttctcacattctaccttacaatatgcaaactcatcctcctgtggaatatattcaagtttcaggtgattctctccatttatattttcacaccagaaatttacacctccactgacttccagatagtcagatgtaatcctgttccctgaatacaatgtattctcttgttcttctatgttgttcttttctacaacagttgttgcatatatttgctggttattataccctgataataatatgttcacagcaaaagtcagaaggataagaaatattttcataaatatgcctttcgtattgttcctgcctactcgtatatcatctgatttcagtgtatcatcatatatattttttaacaatattcaaattatctaatatttaatctgaatctttatgtactttatcatgtgcttgcatgaaaatgttatttaaaatttaattttctgttctagctcaagtttattcatgcatctgtaccaccaaccaattttctttcagttatttcaatccacacacaatctttcataaattcaaatactgcattgtctgaataataaacatagcctgaagcatctgcataatccgttaaaaaagaaaataattatgcttccttcttttttttgataatttacgcttccatatgatgtcataatccaatttcatccatctatcatctgaaaacccatatctttctgatgattatatacgataatttctacctcatttgcatattgattctgcaacatctcaaatcttatactctcaagattatgaaataaagaagtaaactgacctagacatattgaaaaatacagcaacacaattaaaaccatttccgattatctaattgttccctataagtatccagacttgtcacctctatatcattatctactttctaaagtttcaaatatccatcagaatccatatagatatgtcccttttcacccaaatctttccattgttctgccacttcattattacataaatcgaccgttaatatttttacaaagaaaatgtattttcttgaattataataatattttaatatcaattttgaggtgtatagaaagtttccgtattttcctcaatactacttctgtttattgttccagttcctccaagattttctgattctagattattaataatcacttccgtatcgcttttagaatatatagaatctaaattttcttcaacattattattgataacctttgaagatttttcaatactttccttttcgtaattgctatttaccacagctgtgattgcaaaaacagaaccacaaataagtatcatacctatagagataactaccactaattttttcttcatcactttttcctctataaactgtatgaaccagtatatgtaattgtaacagatgaagcattttctattccgaaagaatatactgctgaacttatattgcccaaaacaactgttcctttccatccattggtaacttttgtatttgtgaatcgcaatgacgaattacttgttctattctgaaatgtcagataacttgttcctgtctgactctgtgaaatactcacctgtattttagaacctgatgaaagagtatactgattctctccatatgaatattttcctgctggaatttcccaattaatatttgctgtatatcttgctgtttttactggctctggatttgtttcagaatatggctcgtagtatcccatgaaattgccattatcatctaataactcatagacttcaagaccattttctcttttttcttcaaactcattccatattgcatttttcgattcattacttatttcttgtgccataactggatgaatattaataaaaaacaccattaccaaagttaaagaaaacaaaatttgctttacagatcgtcttacttgtttcatgtcaattaatctccttttaaaatatttttgttgcagcatttttctcagaaacattcagaaaatacatttcctctgtaaaaatattacttttaactatttttaatatattattgctttccaatcaagggacagaattgtcaaaaaaatttatggacaattctgtcccttgtaatatgtaaactaactatggcacaatagaaaatatgatgtatggaggttatcacaaatgaaaaaatttatttcaaaattatttatcactttaacaattatttgctttatccaggtaaacattccatcgatacaccatataggattcattgctccctataatgatattcctgtcagcggtgaaaacgatcattagcttaatttctctttgtatacattttcataaaaataacgctttacataatgactcataataatacaacgtttcaactctgtattcattcgattattactgactctttttccgctttttttcataagttctttctcattccataatatatcatatattttataatgaatatcccacacccttctacacgataagcttgccttaattgattttctgtctatttcttctgccctcacatgttccccattatttccaagttcattgacagcagctccagtaacaatttcatacactgaaattgcctgtgacaatccattatttaaagcataattgtcataaagtctaagtattaaattaatagattcctttttctcttttccctccatccctttccagctattgctaatacagattatttccctctctgtcagatacacgttctctttcctataaagattttccagcgtacattccagagcctctttttccatttttacaaattcttctctcgttacttttccctgttcaaactctagtaatgcctgcttctctaaaaaatattgtttattctgtggaatatccagatcaatccgtgatttcaggctttccaattgtttacttgccacagaaaacttccggtcattgatgtaatctgccagttcttctgccattcttatgacttcacggtcacttgtgataagccgtgaccactgcatttgtcctgacagtcccagtctgtttaataattttttgagtgtttccctctgcatatctgtctgtcctttttccgccctgcgaagtgattttacagaacatattccctcacagagctgctcctgcgttaatccgaacatttccctgcgggttcgcagcacatctttcatactaaagatccacttctgttggtaaaagtaggtgcaatcctgcatatatgccggaacttcatactctgcatacaattttttaatcacagacattaattcttttgcatttatcctatctgtcccatttttttctaaatactctgcaactgcatcctctggcattgtctctaatatttgtatttctatttccagcagttcgattagataatatgtccgcccggcatctcttaatttgtcaatagctttttcacatatcttcaaattttcagtctgtgtttccatattccaatactctttaaataaaatctgctttttcaaataataataaacaattttaggatatatttttgctttcataatttcatcataatatcctgtgtctatatactccatgagcactctgcatttatgcaaataatccatgttgtttccatatataattgtttccaatagcagattcatctccaataccgataatggtcttttctcccaccacactttttctgtttccggtattgtaagccttgcagctttttggtaacattcagcaattttttctttcgatgccccttcctgtttcaaagcttctccccacattgccaaaataaactgatgatttattctatcattttcccttaaatgtgccttatattctttaagcaaacgatatgcatcctctatttttttatcctgaatcgcagataaaatcttcttcttataatcccattcttcgaaatcgcataaatctaacaggttttcgtataattctttcgctataccaagccgctctaacaatctgtctctgatatttttattaatggggcgctctccgttttcaattttcacaagctggctggcactcattaatcccatcgctaactggtctaatgataccttttcttctgttcttatattctttagtaattttgcaaaatcctgatctgcttctgactgcggataaacttttgtttccttcatacaatactctcttttctccatctgtaaaaatgtctaccgatatatcttttatgatagtttaaatcacaggacttttcaatttatatttgcccatattgtctctgcttttgccatcgcaggcacagaaactgtcaatatcaaacacaagctgaagacactttgtttccaaataaatgattgaaaaagtgcgattttgtggtaatatatcaaaataaaaaacgcgattttgtttggaggatctatgtttaagcgaaaaatatacagtaaactactatcctggaaagaagaatccaacggaaatacagcattgttaatcgaaggtgcgcggcgaattgggaaatctacggttgtggaatcttttgctaagaatgaatatcaaagctatatattaattgatttttcaactgtatccaaaagtatcaaaactctttttgaagacatttccgatttagattatctttttttacagcttcagttacaatacaaggttgatcttcacgaaagaaattctctaattatctttgatgaagttcaactatgtccacttgcaagacaggcagttaaatcattagtaaaagaccacagatatgactatatagaaaccggttcactgatttccataaaaaagaacctacagaatatccttattccgagtgaagaaagaaaactctctatgtatcccatggattacgaagaattcttatgggctttaggtgaccatacaaccaccgccttagtaagaaaactctttgactcccgccatccaatcggagataaattacatcggaaattaatgagagacttcagactgtatatgcttgttggtggaatgccacaggctgtaaatgaatatctccagacaaataattttcgaaaagtcgataccataaaacgtgatattttaaatctttatgaggatgatttcaagaaaatagactcaacaggaaagctttcacttctttttgatgcaattcctgcccagctaaataaaaatgctgcacgatatcaagtttccagtgtactggcaaatgaccgagccgacagtatattagaattaattgccgaattaaaagattcaaaaactgttcttgtttcatatcatgccaatgatccaaatgctggaatgtcaacgaataaagacctttgtaaatttaaactgttcctctgcgacaccggactttttactacattgatgttcaaggacaaagactttacagaaaatataatatacgaaaaactattaaatgatacgctcaatacaaatctcggatatctctatgaaaatatagttgcccaaatccttacttgtaatggcaatgaattattttattatacctttttcaatgaaacttcgcggcataattatgaaattgattttcttcttgcaagtagaaataaaatatgtccgattgaagtaaagtcaagcggatacaaaacacataaatctcttgatgaattttgcaaaaaatattctgattgtatacttgataagtatcttgtgtataccaaagatttggctaaggactctgacattctttgtctgccagtttatatggttccttttctataaattagatttgtatataggtgacggcaaacttaaaaagaacccccgcaaacagcttctgaaaactggatgcgagggttttctcataaaatttttctactgtctgatatccacatacccaagctgtaagcttgtctcatcatagaaatggctgccaccataattgcttaaggtgaagtacatctcatttaatttgtcttccggcaccttgaatgccatacgcacggtgacggtttcacctggatttatcgtattaatgtagttgttgtggcgttctcctccatgaacatccgataaataaacttcctgactaaatccaatggattcttcgtttacacaatcccatgtatcgcctgctcccggtttttcattcatgtaagcgtcaaactgcatattttctccatgttctgccagaagtgcaatgccgccgttaaacatcacattggaaagtgccgtctttccattatttttataatccactgtcactgaaacaattttcattggaatctctttggtctccacaacttcatctactgtgttgataccgtctccactctttaaatattccactttcattggcaataaattaccgtctgcgtcaaatgctgcttttgtatcatccgccagcatattttctgacaaactgctgatattatcggaaattgttacacctgaaacgattgctgtaagtcccggtgttgcttcaattccgttctgatccagagaaatctccccgccaatgaggtgtgtatttttcatttcctcttttggaaatgtcatcaatgtttccgattcatccgtttccggttctccttttcctgcctcattttccatgtcattccagctgcacacctgcataacattctctccgctcgtttcttctgtcggagtgacggaaacaccctctgcgatctggaatgcttcttcttttgtcacatccgggaaaatgaacatctcaaggagatagttgtattctgcgtaaatcatatatattttttttgcaccgcttgtattttcattcgaagttccttctgtagaagaattttctgttgaattactctcggcaggagctgtttccatgtaaactgctggtctgccaccgatgtttgtttcctcgctcacagcaatgcctgtattttcaatgtctgctattgttttttccggtgtcagctggtacacgatcatgctgactccaccctgcatataattatcttcaaaactgtattttccttcctctgactgcaccatacctttcggcagataagaggtttccagtctgacatattcggctgctttacccgctctctcttctgtcgtctgatctgccatattctccgtactttctgccgctgtctgtggtccttcaatctgtgtttttaagccatattttccaaccttctgattatgcatctggtaagcaacacctgcacagaccgttgttgcaagtgccaaagctgccaccatggatgctaccagcatacggtgtgccatgttttttttctttcttttcttataagttacaacttttgtattgtaatttcctttatcctgctggttctgctccgcagacatatcctgtctggtctgattttcttcctgcccgatctgcactgcaacttcctgctcgatcatctgtttcatgctctccggcattttcggaaattgttctctcatatcttctaatctcatactgttaccgcctttcctgctatccaaacgatacgaaatttattatttttcattcgacatccgtgttttgtatgtctgttccaatggatcatcactatgtctcaatctgccagcgcttcttttaattttccacgcgcttttgccagcctgtttttcactgcactctctgttgtatctaacagtgctgcgacctctttcacactgtacccttccatataatacagtgtgacgcacagttttatctgctctggcaaatggaaaattgcctcatataaatctgagtagtctttggattccgtttcctgctcgttcatctgataatcctgcagagaaatgatttttttctctttgcgcatgattgcatagcactcattcatcacgatacggatgagccaggtttttgcatacgagtcatcctttaatgtatgtaattttgcaaatgcttttacaatggcttcctgtatcgcatccgcacagtctgcatcattgtagagcagagactttgcgatatgatacattgtttcttcggaatcaataatcaattgtcctaatgtttcttttgtcattttattttgcgctgtttccactgacttgtccgtggatcagcttcctttctgccggcttttttgcttgtttacatagattagatgcatgagaggcggatttggtctctgtgtatttttattttataagaatattacaacttcctatataatagaaaaacctcaccagcagattatacttagccagtaaggtttttactatcaatatttttttgttatgccccttctatctccttgatggaaaatccatttccctccagaagatacgttgcgctgcttccgcagtgcggacatatttttgcatactggactgtggaatatgtttttccgcagtcctcgcacatggtaacaccaggtatgatctcaatttttaattctgaatctttcaaaagctctgatctgcttctggcatagccccagcagtcagtcatgtactccggaacaacgccgctgacttctccgatctcacaggtcacggatctgatctctgtaagattattttctgctgcgacttcctccacggtacgcatgacatgtacgataattccaagttcgtgcattttatctcctattgtaattacagactgtttatgcaattgcgaaattcatccataaagtagattgaattgtgtatatctgagtttcacaattatttatacattaattacttgcgtgaaaatttaatcttgatcgcctgttttgctccatttggaaggatgtattttaacttatcctcacttggaaccatcttgctgcatcctggtaaatctctatgtaatttgatcgcatcaaattcacacttcgttgtacagataccgcagccgatacacttattctggtcaacgacagaagctccacatccaaggcagcgtgctgtctctgcttttacctgctcctctgtaaatacaagctttgcatcgcggaaggagtgttttgtatcgatagaatcattatgtccaggaatctgacggctggaattatcataattttctactttgatatcgtctttatttaactgaatgaagtcatttctgttacgtccgattgtaaggctggaatgtggctgtacaaaacggtggatagagattgcgccctgttttccggctgcgatcgcatcgattgcaaatttaggtcctgtataaacatctccaccaacaaaaatatccggttctgctgtctggtaagtaagtgcatcagcaactgctccgtttccgcgtccaagttccactttgcttccttttaataagtcgccccatacgattgcctgtcctacagagaagaatacatgtttacattctactgtcataagctggttttcgtcatactgtgggttgaatcttccgtctgcatcttttacagataaacatttctttaatacgattccacgtacttcaccattgttatccacaagaacttcttttggtccccagcctggatttacaacgattccctctgactctgcctcttcgatttcttctacagatgcaggcattgtctctctggattccagacagaacatattaactttggtattgtcgcttccacatctcttggaatctcttgcaacgtcgatcgcaacgttaccgccaccgatgacaactacatcacctttgatgtcgtatttctcatttgcattgacttcttttaagaggtcaactgcggaagaacatccttttgcagtatcatttggaatgcccggaagtcttccgccctgacatccgatcgcaatgtagaacgccttgtatccctgcgcacgaagttcatctaatgtgatgtcttttccgacttccactccggttctgatctcaacacccatctctttgatgatatcgatctctgcctgcacaacgtctttctctaatttgaaagaagggataccatatactaacataccgccggcacgttcatttttctcaaaaatagttggtttgtaacctttttcagccagatagaaggcacaggataatccggcaggaccacctccgatgatcgcgatcttctcctcaaaatatcctctgacagatggaactactttcttaggaatatagcgtgtctcagattttaaatcctgagtagcgataaacttcttaacctcatcgattgcgattgcctgatcgatcgttccacgtgtacatgcatcctcacagcgacggttacagatatgaccgcaaactgccgggagtggattgttcttcttgatcaaagcaagtgcatcctgatatcttccctgtgctgccatctttaagtaaccctggactgcaatgtgcgccggacaggctgtcttacaaggagctgtaccggtatcataacagttgatgcggttgttatcacgataattttcatcccacatctccggtccccattttttctcagaaggaagaacatgttttggatactctacttttgatccgtctttcttgcaaagcttctgtcccagttttactgcacctgcaggacagtactctacacagcgtccacatgctacacagttttctgtctcaacttttgcaacatatgcagaacgcgacatgttcggtgtgttgaacaactgtgaagtacggagtgcataacagacattgacgttacagttacagatagcaaaaatcttgtcctcaccgtcaatgtttgtgatctgatgaacaaatccgttatcttctgctttctggaaaatatctaatgcttcctcttttgtgatatagcgtccgcctttgtttgtctcaacaacatagtctgccatatcaccaacagcgatacaccagctctcaggatcatctgcacagccttcttcatacgtctggcgggagcggcggcaggaacatgggcttgctgcatattttccttcatatttgtctaaccagtgagaaatatgctcaatggaaatagactgattttccatggaaatcgctttctcaaccgggattacatgcataccgattccggctccaccttccggtaccattggtgttactttttccagtggaagacggctcatacgctcgaagaaacgtcctacttccggatgctcctctaacattttcagattcatatttccaaactcagcacttcccggtacaaacattggaagtacatactgtttctcatgctgtggattttcccaattatactcaatcacaccattcacagccatctgctgtaaaacctcttccaagtgctttttctcaatgcctgtcagctttaccatctgatctaacgtctttggcttacgaacacccattttcagtgcgatctctgccatctcgtctgtacacattgcagataatccccagtactccggatcatactttgtgatctttttcattccaagcttctgtggaacacggtctgtgatcatttttgcaagctttacaataacttctctctccacctcattttcaataaattccggtacaaaatttcccaatggatctgccatttcttcctcctgatatgtatgttccccctatgggggatattttattgttaatagaaccacccgcagattccctgcaggtggcacattctgtaaccttgctctactacttctggtattcgctcacttcggtacggatccagtctgcccattcctcaaagccttctcctgttttcgcggaaacaaagaagatctttgcattcggatttaattttaagatgcgctcttttactgcttctttgctgaaatcatcaaaaacgcttaatgtatcgcatttgttaatgagaactacatcacaaatggaaaacattaacgggtattttaaaggtttgtcatcgccttccggtacggaaagaatcattgcattctttgtgcttcctgtatcaaactctgccggacagacaagattgcccacattctcaagtactacaaaatcaaggccttttgttccgaactcacggattccctgtcttgtcatgtctgcatccagatggcacatacctcctgtatggatctggatcgcacgcacaccggtctcactgattgcctgtgcatctacatcagagtcaatatctgcttccatgacaccaatcttcatctcgtctttgagcatggagatcgtgcgctttaaagttgtcgtctttcctgcacccggagaagacatcaggtttaataaaaatgttccctctgacttcaactctgcacgtaatctgtcagcatccgcattgttatcttcgaaaatgcttcttttaacttcaattactttaaagtctttcaattattctccctctttcccttcctcttgaaacgttctctggtccgatcagattccatatccggtcacagcttcctgtcttctggtacaaccagattgttaatttttaaacattctatttataacatacatggtaaaagcactattgtcaacggttttgcctaaatttgtcaaaaaatacacaatgtttttctctggtatgtccagatagttccagacgcttttttactacattttattaaagtaatctttgatccattgtcctgcttcgctcaaatcttcctctttcccttgggagaaatgtagattcactcaactgactacaacctaaaaaatatccgcaaccggacatttcctaacttgtctggctacggatattattattttctatctatattttcttccctagaaatccacctcagtatcatagtagcagcatttcagcagcttctccatctcttcctggctcggctgtctaggattggaaccggtacatgcatctaaaattgcattggcaacgatctccggcagtctctctaagaacacctcttccggaacaaagccctgctcggttggatagctgtctgcgccataatttttgatgcagtgtggaatcttaaggtcgtcattcatcttacgcaaatatgcaatgagcaatgcaactttttcatccagactgtctccgccgagtcccatgaaatcagcaatatcgccgtaacgtttcttcgctgtctcatcttttgcattgaatgcgataacttttggcagatacatggcgtttgcagcaccgtggataatatgagctccataatctgcaaatgcagctcctgtcttatgtgccatggaatgaacgataccaagcagagcgttggagaatgccattccggcaagacactgcgcattgtgcatggaatctctcttagccatatctccgttgtaggaatcaaccagatcattctggatcatttttatcgcatgtaacgccagtggatcagtaaagtcacagttagcggtagaaacatatgcctcgatcgcatgtgtcatggcatccattccagtatgcgcaactaatttctgcggcattgtctctgcaagatccggatcaacgattgctacatccggtgtgatctcaaaatctgcgatcgggtatttgatacctttctcataatctgtgatgatagagaatgcagttacctctgttgcagttcctgaagtagaagaaattgcacagaaatgagctttatttctcaaagccgggattccaaatactttgcacatatcctcgaatgtgatgtccgggtactcgtatttgatccacattgcttttgcagcgtcgatcggggatccgccacccatagcaatgatccagtccggttcaaactccagcattgcctgtgcgcctttcataactgtttcaacagaagggtccggctcgataccttcaaacaactgaacttccattccggcttccttcagatactgctctgccttatcaagaaatccgaatcgtttcatggagccaccgccaacacagatcattgcttttttacccttgaatgtcttcaatgcttctaatgcaccttttccgtggtataagtctcttggtaacgtaaatcttgccatgtaaaaaccctcctataaaatatgtatgtgtttgttgtgattgttatgtttttaacaatctggttgtctatattatatcatacattttattttataaaagggtttttatacattattcacaaatttttcatgtattttttgacaaacaaatttctaatacaattttaatccgctgcgcaccggttcacttgtcagatccacacccagcttcttgaaaattttaatatccacttcagagagcattacggaagtatgtacctgacatccccgaagtgccggaagctgctccaatgctttctttgcgttttcattggtcaccgcagcgagcgaaagggcgatcaatacctcatcggtatgaagtcttggattctttccaccaaggaaacggactttcaaatcctggatcggttcaattgcttccgggcggataagtttttcgtcatgttcaataccagccagatgttttaatgcattcaaaagcagtgctgcagatgcgccaaggaaatcagacgttttagatgtaatgatacatccgtctgacagttcaatggctgctgttggaacaccaagctcctcggcacgttttttggctgcaacggtgacatgtctgtcgtctgttgtgatcttcgcctgtttcatcagaagttcgatcttataaacttcgttttccgttgcttcctctttgaccagtttgtttaccgctgtgtaataacgtcttatgatctccattttggaggcttcacagcacgcctcgtcatctatgatacagtttccggccatgttgacacccatatccgtcggtgatttataataggtattttctccgtagattccttcaaagatcgcatttaacactgggaaaatctcaatgtcacgattgtagttgaccgttgtttttccatatgcttccaagtggaacggatcgatcatgttcacgtcatttaaatctgcggtggctgcctcataggctaagtttaccgggtgctttaacggcagattccagatcgggaatgtctcaaattttgcatatccggctttcgttccacggatattctcatggtaaagctgggaaaggcaggttgccatttttccacttcccggtcccggtgcagtgatgacgactaacggtctggtcgtctcgatataatcattttttccaaatccattctcacttacgatcagtggaatgtttgccgggtaaccctcgatcttatagtgctggtatactttgattcctcttttttccagtttttcacggaactgtactgctccgctctgtcctgcaaactgcgtgatcacaacgcttccaacatacagaccttttttctcaaactctccgatcaatcgtacaacgtccacatcataggtgattccaagatctccgcggactttgttcttctctatatctgctgcactgatcacgatcacgatctctgccacatccgcaagctgcatcagcatctgaagtttgctgtccggtgcaaatcccggcaataccctggatgcgtgataatcgtcaaataattttccgccaaattccagataaagcttgtctccaaactggctgatccgctctttgatgtgctcagactgaatttttaagtacctgtcattgtcaaatcctattctcatccctgttatcctcttatttttcattcgcttttttatttacaaacataaagaatattatacaataaaaccgggacaaaatatacttaaaattttcaatttccctcacaaattttaacgtaccatttgaaaattatttttgcagatttcataataaggctgacccttcccggatcagccttatcattaaattcccaataactgctttttcttcgctgcaaactcttcttctgtgatgactcctgcatccagaagacctttgtatttctgcagctgttcgatcgtatcgctctcagaagactgcttctgctctcccagagatccgggctcccgctttgcagcctgttttttctctcccgctgtcacctctttgacattcggattcatcaggtgtgccagattgagtgccagcgtgtgcagactctctgttttatcctcatagctgcttaaaaacgcctcgacacttgggctgtcactgtcaaaggaaacccctgtccaatcccacttgacattatcccaataaggatggtcaaacgtcaactccacatggaaggtatctgccggagaagccacgtcaaaagatggtcttggatgatactcatgataatgattaccatctttgtcattttcctcatgcatccgctccagccgctcaaacatctcatattccctcatctgtatatgaaactgtgcgatctgcggctccagctgctttactttttccggaactttactgttgtaatgctttaattcctgatgatttccctcaaataaaacccggctgtcctctaaaatacggaaagactttaaattgtctgcttgaaatgcgagtgagtctttgtcgcagttcacacggaaaagtccatggaaaatatctaataccagatctccaccaaacagtccaaaattaaacgaatagttttcctcgaactgatctcttaatgcctgattatcttcgtaaaactggacgtactgcttaaaatcatcaatagtcatccgatctgtacttccttttggcagatagatttttttatcacattccttacagatcggtgtgtcctgtatttttgttgcaagcagccgcggtgtcggattcccgcagaccggacataattttttattattactgaataatcccatattaatcccctttctgtgacagatattctcttttatgaaagccaagaatacctgcaattacatttgtaggaaatataccaagcgcactgtttaactttgtcacagaatcgttgtagaccaaacggctggtatatatcatgcgtccataacattccaccgcatccatacatcttgtatagtttttatctgcacaaagcagtggattgcgttctgccgccagacggatgctttttacggtttcctctatcacctgctcctgctctgatacctcctcaagtgcggagcgcgcagtgatcacacttcgtctggccgctgcacgctccatcagcggctgtgtgtcatctgctgcatatcctttcataagatcaagcactgcaaataatgcatcaaaacgtgaggaaatctgcactccgatctgattcatggcattttggatatttccgtccatcaccgcaaacttccgctgcacggagataatccagagaacaagtaaaagcaggatcaaaccaataatgatcaagatttccatacctaacattttttcttcttaatccctccttcttttgtgtgcttattttggctttctcctttgtctgaatctacaatacacgatttttccaaaaaaatggacgcactgtcatgaatcgaccataaaatgcattgaatcgaccaaaaaaacagaccgtcataagacagcctgctctccgttaaacgcatattccatatatgtatttttgatttccgaacattttccatgcggaatcgggatcaccgcatcatttaccattttgatggaacggctggaaatattctggatatactccatattcacaagaaaggaccggtggggacggaaaaagttgctgtactgcatcagctgtcccgccagatcatccagactccctgcaccctctagaactgctccgttttccagatgaaataaaagttttcgtcccagcacctcgcagtattccagctgctgcagattgacccttgtaataccgtccttactgcgcaggatcagactgttcttctttttcttctcacactccgacagcactgaagccatcagccagaaaaagctttcctcccagattggtttcaactggtaaaaataagctccaaccgtataagattccaccgcaaactccggggatgaggtcagaaaaataattttcatatttgtgtcatactgccggatctcttttgccacatccatgccattctgccccggcatcacgacatcaagaaataaaatatccggtcttatgcccttctcaatctccgtcagcagttcaaacggactctggaatgccgcataggtaatatcctcattccgttctacctgatagcggtctaataattcgttcatctgatgaagcacttccatttcatcatcacaaaacgcaatctttatcataaaattatattttctcctgcgtaattataatatatccatacctcttgtgattcctttcactgtcacaggaagcctgcaaaatgttttttccacgtaccattcattatacttcaaagaaagcaaaatgaaaagtcaatgtccgctaccttctcagatcctcaaatgccccatacacatccagtgttccatacccccacgacggattcggataactcctgtcatccgcccggtctgcaccgcggatcagcatatttttgatatccgcagaggacatgaaaatctgatttctttttaccagtccccattccatgatctgcgcacatgccccggctgtgatcgctgccgctgcactcgtcccggtcatggtcacaaaacggttctgcagtcccggtccatacacattcaccgccggagcacagaaatccggctttacctcaccggaaagcgtaaatcccctgcccgagtccagatacagaccgccatttgccacattgtagccgcccgtgcttatgacctgccctgcattgcccggcacggtgatcgtatgatttggatttgaccgcaggaaaaaaacctttccactcgtaaaattccgcatgggaagccacatattgtaatcccctgtcacaatgctctgcggatacacgttgatcgtccagatcccctgcgctgcgtttgaaaaacgtaaataaataagctggtttccctgctgcctgcccgtcagccgatagtcgatgctgactcttgtctgctcgaaaataaagagaaactcctgccttccaccgctccgataaggcactttgggcagcacttccccggtgggcgagctgaccgataccgcataaagctccggcgcatttgcccacatctcaatgaaaaaacccggcatattttcctccaccgagacttccaccgattcgtactccatatccggctgtatttttccaagaaaatgatgtcttgcattcgcctcgtttcctactgctgccacactgcatcttttccgccttctggatacaatatccagataagttgccaacggtccgtccttgccacggtttcccatgttgctgcctagtgcaatgcagatcacaagcggcatatcccgctccattgccagccggtccagatagctgactgccatcatgatatcattctcctgatacgccggaacagaatccgggataaaataaaattcccgcagataagtttttgcctctttcagttttacaactgcgatatcggaaaacggtgccgccccaataaaattattttcgacatcctcacttccacatgccacaccggctacaaaagttccgtgtccattggtatccatggacggaacggtttccagcggattttctgcccggagtgcggcattgatctgttctgccttatactcggaaccatatgcgatcccttccggctttgttccatcccggatcgtctgatcccagatgcggcaaatccttgttgtcccatcagaatactgaaataccggattgcggtagtcgatcccggtatcgataaatccgatcatcacgccctgccctttcagtgcgagcgccggctgctgctgtaattttaatatccccgaaacctcaagcgccgtctcatccagaagtccatagcattttggaacagaagcataggaatccgccggaaaatcaaatatctgaaaaaaactcctcggataaaaataaatatcgttttcctcctcgatccgctggatacaatcactttgaaggtcaatcacatccaaaacgtctttcgatatgataaaatccacataatcattggaataaatcttttcttcacagtcagacataaaaaactccgcacacctatttttacaataaatgccggagttttgtcttttattcctttaaattgcaggtttttcttcgatcgctgcacagccgcgcatcgtaatgagcgggccgccctttttctctacataatcttttgtgatcgtcaccatgccgatattgtcatccttcgggatctcatacatgatatctaacataaaatcttcgataatagagcggagcgcacgcgctcctacctttttctcttttgcttcctttgcgatagagtgaagtgcatcctcgtcaaatacaagctttacctcatccatggcaagcagcttctcatactgcctgatgatcgcattcttcggctcttttaaaatacgcacgagcatatcttccgtcagcgcctccaatgtgaacatgactggcagacgtcctaaaaattccgggatcataccaaatttgcgcacatcttctgtcgtcacttttgcaagcaggttctcgtcattgtcatatttgtccttcaggtctgccttaaatccaatggaagcttccttgttcagacgctccttaatgatatcttccagatccgggaacgctcctccgcatataaaaagaatgttcttcgtgttgaccatcgtcatcggaaccatcgcatttttactgcttgcccctaccggtacttccacttccgcaccctctaacagctttaacattccctgctggacagattctccgctgacatcgcgctggtttgtgttgcgcttctttgcgatcttgtcgatctcatcaataaagataatgccgtgctctgcgcgctccacatcattgtctgcagccgctaacagtttgctgactacactctcgatatcgtcaccgatataacctgcttctgtcagagaagttgcgtccgtgatggcgagcggcacatctaataatcttgccagtgtcttgaccagataagtcttaccacttccggtcggtccgatcatgagcatgttggatttttcgatttccacaccgtcctgcacatcagatgcaattctcttgtagtgattgtaaactgctacggacatgacttttttggcatgttcctgtccgaccacatactcatccagtgacgctttgatcttatgtggtgccgggattgcatgaatatcgatctccggctttctctcctcttttggtttctttttcttgatcttctggctgtttggcataccgcccatcatattttgcagatcagagagattgatcatgctgatattaggcatcttatccagattcatattattaaaacttcccatgttcatcatatcacccattgggaatccagtgccattcatgctgtcgaacgttctctgcatacagtcatgacagatggaaatgctgtttgggatcctgatcattttgccggctatatgctccggtctgtgacagatgtagcagatctcctcgtactcatcatccttcttctcatcactctcctgtgcatctgccgtgctgtttaccacttccgcactctctgcttccgttgtatgtaaattattgtcagaggctgccggctctttgttctcttctccgtcgatcacctctctgaaatcattatctgacattgaaatctccttaatatccctgaaattgctttctgttttcaccgccctcaaaaaatgcgatgggtttattataattcaaatgaaaatgaatcacaactaatttggcaagatttcatttttatttaagatattttctttgaaaagcatgataatatttgaccatccggattttatgggttagaatacagctacataaaaaaactttcggaaaggcaactcatgtatacagaaaaaaaatcttttagcagacaaatgaaacaggcagaacaacaggctgccccactgctgcagaaaattctgatcttcgttttgattttccttgtcatttttatgatggtgcagatccagaatctacagggaactgcccacgtggtgaactatgccggtcttgtgcgtggagccacacagcgtgaagtcaagctcgagattaccggaacagcaaatgatatgcagatccagtatctggatcaaattttgtccggtttaaaatatgaagatggaaattataatctggtaagcctgaaagatccggtttaccagcagtgtctggacaatcagattgaatattgggaactactgaaagaagagatttataccgttcgtgaaaagggctatgaaaacaccaatgttgtctcaatgagtgaaacttattttgaatatgccgatgagacggtgactgctgccgaacagtactcggaaaaggttgcagcacggatccggctgaccgagattatttctgcgcttgatatactattgttaatctttttgatcgtccagcagcacatccagcacattcaggccgtcagggaaaatcgtattttatcccagaaagcctatctggatgtgcacaccggacttccaaacaaaagcctctgtgaagaccttttgaacacttccgggtttatcactgagccactgtgttttgttatgttcgacttaaataatttaaaagaagtgaacgataccatcggacacgctgccggggattcgatgatcgccagttttgcccacattttaagaaaggtagttcctgaaaaagattttgtcggcagatacggcggtgacgaatttatcgctattttatatgacaccacctccgggcaggcagacgaactgttggaaaaactacatgctacggtcaaacagtatcagcccggcaatatgccggatgcgatcagttacgcctatggttacagctactccatgaattacaaagattgtacgctccgcaatctgcttgacaaggcagaccatgaaatgtatctgaataaacaggcacaaaaaaagaaacgataagccgtttctttttttgtatttctctatcatttacggatttgcagttccatttccgccggttccgttggtattctctgcgtttccgccggttgcatcgtttgtgagatcatccacaccattttccacaccatcgatcacatctttgccggcatcgccaacaccgtccactacatcctcgatcacgttgccgttatcatccacacggttgttatccttgcccttatcctctgtggtgccgatattatttttgtccttgtctgtggtggtgtccgcattgttgttcagacggttttccgtgcttgtgtttgtaccgtttgtgccattatttttatcgtttgcggtattatttccgcagcctgtcacagcacttaaagataacgtaagcatcattcctgccaaaagtaatttccactttctcatagtcatttctccttttctttcacagagtgctcttgctctgttcttcgaaaatagtatgaccatccttttttttcttatacattttctgtaaaaaaatttaattttgtggataataccccagttcccttgataattcttcctgcacttttttcacatccacagcaagttcttccacgcgttctcttgtcatacggctgaccggtccggaaatactgaaagcgtattttacctctttgctgtagcctcttaagcacgcagcgatgcaacgaactccttcctcattttcctcatcatctaacgcataaccgttcttgcggacttccgctaatacctgcatcatatcatcaatatcagtgatcgttttgtccgttttcttctcgataatgctctcgttccagatctgttttacttctttctcaggaagtgttgccatgatcgccttgccaacgccggaacaatacattggatgcaccattcccacatgggaaaccatgcggatcgttccaacttttgcttctattttatagatgtataaaatattgttgccctcgcgctgtaccagatgcactgcctctccactgatatcggacagccgctccatataaggttttgcgatctgtaaaatatcggtacgctccaaaatcttgccagccatgctcacgatcttataggaaagcatgtatttctgtgttgtctcatcctgcttcgcgtagcccatatagatcaaggacatcaataagcggtggactgtacttttgtgaagtccgagttctgtgctgatctccattaatcccatttcgccatgctccgctaacatctccagcacctggaaaatacgctccgctgactgcaccggattttttgtttctttttcttctgccatcgtagggtgtccctttcttaattcttatactgcgattgttcagaaccccatgcaaaagctttcggtgttctgacgaatcactttatgtttcacatttcagtttgtcgttccatattgtgaaacaatctttttttcatcttaacagttagatattgaaatgtcaagggaattggagcggaactattgacatcctcttttctgatgttataataaaatcgtatcgttttatggaacattgtttcatataatggaactttgtaaaagaacacaatcatccactggatgacaaaataagaatgataaggagaatcatcatgaacaaagtattagaagagatttctaaaattggtatcgtacctgttatcgctctcgatcacgtagaggacgctgctcctttagcaaaagcattatgtgacggaggtcttccttgtgcagaagtcacattccgtactgctgccgctgaggaatctatccgtattatggcagaacagttcccggaaatgttagttggtgccggaactgttcttacaactgagcaggttgaccgtgcggtaaacgccggagcaaaattcatcgtaagccctggcttaaatccaaaagttgtgaaatactgcgtagaaaaaggaatccctgttactcctggatgctctaacccaagtgatgtggaagttgccattgaacttggtcttgatgttgtaaaattcttcccagcagaggcagccggcggattaaatatgatcaaatccatggcagctccttatgtaaatatgaaattcatgccaactggcggaattaacgcaaagaaccttacaaattaccttgatttcaacagaatcatcgcatgtggcggttcctggatggtaagcaaagaccttgttgcagcaaaagactgggcaggcatcactgctctcacaaaagaagctgtatctactatgttaggattcaaacttcttcatgttggtgtaaataatgcatctgaggaagctgctgcttctgattctgcaaaattcgctactttacttggtcaggatgtaaaagttggaaacagctctatgttcgttggatctctcatcgaaatgatgaaaaatccgggtcgtggaacatgcggtcatatcgcaatccagacaaactaccttgcacgtgcgatctaccacttagagaaacgtggttttgtatttgatgagtcttccttcaaatatgatgcaaaaggaaacatcactgttgcttacttaaaagatgaaatcgctggtttcgctgttcatttcaaccagaaataaggcaggagacggatatgaatggggtgaggtatttgccatgaaccccggtgagaagtttttatcagaggaagaatatacttccctgattgaagaaatacgcaagtatttgtaaaccggagggtggctggtagtgtaggcagattttgtggctacattcataacgtaaatcagggcagatatcaaagtctgtgcacaagtcagtcactgcgtaaataaaaagaaaaatcgtacaaacaaatatgatttcctttgtgagctctgcgaacaggaacatcatatttcgtttgtacgattttcttttatatacactaataatttgacttgtgtggactcttttatctctgcccttcataacctataaagcagccacaaaatctgcctacattactatgttaaactccggtttaaaaataaagtaacaatagaatttaccctggcaatatgataaaataccgttaaacaagtcgaatttttcaaggttaaggagatattacatgcgaaatattctgaatataaactctgactggatgttatccaccgaaaagagagcggacaataaatctgtccacaaacgaatccttccattaaataaagaagatgaatattgttattatctggaacttctgggtgcttcgtcttccatggaagtttttatgaatcaggaaaaaataggcacacacaacggcatttatacgctttaccgtatcgatgtgacggactacattgtaaatggtgacaatgaactggatattgtttgtgacggcgaagttccatgcttagatgccagccttattattgtaggaaaatatcatttttcactggatcattttggagatgcaggacttactgtcattccacaggagatctcatcatcctctgccagcatccggattcttgcctccgcaaaggatctcccggaagatgccatgatctcctacactgtgcttacgaccaccggaaccatgcttgccaacaaaagtgtgccagccaccacaccggaatatatctgtcgtctgaccaacccatgcctttggaatggaaaaacttctccaaaactttacgtggttgttgcaggattaattgtaaatggcactatagaagaccagctcgtacttccttttggtctgcgcaatcttaaaatggaatccggcagtaatattaccgtaaatggtctgtgtatcccggaaaatgaccttgtccacattttagaatccgatccatttgtctacgacgatatggacgaggacggcactttcgcctgtgtagaattaaaggagctctgcaatctttccacagatgaggctgactgtaaaaatctgctcacagaatatgtgctgcagaatgcttatcatccttccattctctgctggaagcttccggaagaacatgctgactttgcaactttgctccgcgaattagacagtacaagacctgttttgttctaaattaatttctataatagaataccattctattatcacgaatcaggacactgcttcacaggctttttcaaattcagcacgcacttttgccatctgctccggcaggtggcttaattcctgtttgcgtatggatgcgaccacctgtgaagctgcctcaaataaatccgtcattccaagcgttcctgcaacaccctttaatgcatggactgcctctaacacatcctcataacgtccttctgcaagcgcctgttccccgattgcaagatgatcgtcttttgtcaatttcactaaaaatttttcgtacaaagcctcattcccggcaaaacgtttcactgcattttcataatcaatgccataggctttcaacttttctttctccatacccgtaccccgtcatccataaaaatataactgtattatacgctataccttttattttgtaatcggtgtctgacaatttctttgccatttcttaactgccacttactttttcattttcggctggaagatgatacttgcgatataagagaaaatcagtgctgcggaaataccgactgcactcgctttgaagcctcccataaaaatgccgataaatccattctcatcaactgcttcttttacgcccatccaaagaacatttccgaaaccaagcagcggtacactcgcaccggcgcctgcaaattccagaaacggttcatagatctgcaaagctccaagtaccgccccaaggcacactaacaacaccatgattctgcccgggagcatttttgttttttccatgagtatctgaacgattgcacagatcagtccacctacccagaacgcgtttacataatccataattcctcctttttacgcatcgacatgttcaatcacgaccgcgtgggcaatgcccggcacattcattccttcattaaaagacacggtggaaagcaatgctcctgtcggcacaaataaaattctttttaacgttccatctgcgatctgctttagaaaataagcacttaatgtcaccgcagaacatccacagccggagcctcccgccccggtattctggttttgcgcatcaaaaatctcgatgccgcagtctgtgtgtattttgctgatgtcgtagccgtcctttaacagcagatcaataagaatttcctgtccgattgttccaagatctcctgtgatgattttgtcgtattctttttcactgcgtccgaaatcttcaaaatgctgtttgatcacatctttcgctgccggtgccatggcagcacccatgttcatggaatctttgatcccgaagtccacgatttttccagttgtgattcctgtgatctttgcgattcccttttcttttccaagcacaaaagctgcacttccggtcactgtccaggttgcagattttggccgctgattggcgtattccaaaggaaaacggaactgtttctctgcgctggcgaaatggctcgatgtcatggtcacaacatggtcggcgtagcctgccgccacacacattgcgccaagcgacaatgattctccgcacgtgctgcatgccccgtatagtccgaaaagcggcacctgaaaatccagcacgccgaaagatgttgcgatcgtctgtccgagaagatctcccgcaaaaagataccggatatcttcttttttaagtcctgccttgccaactgccatggtaaaagcttccttctgcagggtgctctctgcttcctcccatgtgttctgtccgaatttgtcgtcctctccgatcacatcaaaatgagctgccagaggaccttctccctctttttttccaacaatgttagctgtgctgataataaaaggagcctctgtaaaacagaggctctgttttcccttctgcatactgattccacactttctttttgttttagtatgcattcggggaacttcttttattcattttttataacatcattgtaaatattcggcaccgcattcaaaaaaccgcatcttggatgctcgatttatgctcttactttctgaatttcctgtatcataagtggaacgatctcatagaggtctccgacgattccataatctgccacttcaaaaattggagcatcttcatttgtatttactgcaatgataagttcagagtcctgcattccggctttatgctggattgctcctgaaataccaagtgcaacgtagattttcggacgtactgtttttccagtctgtccaacctgatgatcagcggtaagccagccggcatctgtaacggcacgggaagctcccactacaccgccaccaagtgcctctgcaagctgttttgcatattcgattcctttttccggatttttgctgataccatttccgacagaaacaatgacttctgcaccaagcaggtcaaccatttttctggattcttttacaacttcaatcacttttgtcttcaaatcgctgtcagaaagatttacctgtactttttcgatttctactgcatctgcttttgcctggtcaaaaggcgctttcttcaaaacacccggacggacagttgccatgcacggacggaatcttgggcagatgatagtagccatcatatgtccgccgaaagccggacgtgtcattttcatatttttgtcttccatatcaaactttacagaatcaacatcaatcgtagatgcctctcttaaaaagtctgtatagatatccatattaatatccagatgtgtacagtctgcacaaagtcctgtatgtaatcttgctgcaacacgaggtcctaaatcacgaccgatattcgatgctccaacaaggaatacctctggttttttatccatgatcacatcacagatcacttttgtatatgcgtctgttgtatacacggcaagtctctcatccgatgctacaataattttgtctgcaccatatccgccaagttcttttgctgcactctcgattccgtctgcgccaagtaaaagtccgacgagtttacaaccgcgctcatctgcaagttttcttccttcactgataagttcaatatccgtgctcataagcttgccttcacgctgctcacagaacacccagatatcgctgaattcttctattgctgcactattaaatgccatatctttttcctccttagattacgtgctttttggcaagactttctgccagttcttttaccatttcttcattggaaccctgtaacatttttcctgcacccttctgtggtggtgtaaaagaacggaaaatattagtaggggaaccttttaatccgatggttgtcggatcgattaacggttcatcttttaaagcctcataatctaatacggtaaatggttttttataacactctaagattccctttaccgtcatgtaacgtggctggtttaattctttcacacatgtgataagacatggtgtggaaacctcaactgtcatatatccatcctctaaaagacgttttacagtaagtgtatttccgtttttgtggatttcagctgcataagtaacctgtgggatatttaatttttctgcaatctgtggtcctacctgagcggtatctccgtcaattgcctgacgtccacagaaaataatatcttccggtccaactccgagattggataatccacctgcgataatctgtgaagttgcaaatgtatcagaacctccaaattcacgtcccgagatcagaactgcatcatctgctcccattgcgatacactctctcaacattccttctgctggtggtggtcccatggaaacaactgtaacctttgcacctgtttcatcttttaatcttaacgctgcttctactgctgctaaatcgtccgggtttgtgatagttgccattgatgcacgatcaagcgtaccgtttgcgtttacagcaacttttccggaagtatccggaacctgctttacacatacatatattctcatttcaaattctccttttcaaacgattccgtactttttattttaacagacttcttgagatgacgatctgctgtacctgactggttccttcatacaatgtcatgacgcgcgcatctctgtaaagtctctctactttgtaatccttgataaatccatatccaccatgaatctgaattgcttttgcacaaacacggtttgccatttcagaagcatagtattttgccatggagcactgtgtggaagcatcttttgcatccatgtcttttgcctgtgctgcactgtaaattaagtttctggctgcttcgatctcagttgccatatctgcgagcataaagcttacaccctggttgtagctgatcggcttaccaaactgttttctttcttttgcataagcaatggcctcttctaatgctccctgggcgataccaagggactgtgctgcaacaccaagacgaccgccatcaagtgttttcattgcaactgcataacctttgtctaaaggtcctaacagatcactcttatgtacgcggacattctcaaaaacaatatcacttgtcggataaccgttaattcccatcttaggttctggttttccacaggaaactccatctaaatgcatatctacgataaacatggaaattccttttgcaccttttaattccggatttgttcttgcgtatacgatcgcataatcagcaatcggtgctccggaaataaagcatttacgtccgtttaatacatagtaatctccgtctgctgttgctcttgttatcatgcttcccggatcagagcctgctcccggctctgtcagtgcaaacacaatatgtttttcaccttttgcagcaggagttaagtatttttcaagctgctccttattgccgcattgtaataatggaccaccaccaagagagttcggtgtattggcataaattgcaagtaccgggcatacgcgggcaaattcctcattcataagtgcgtatgcaagatagtcaccaccctgtccgccatattctaccgggatttttgttcctgcaaaaccatattttgcaatctttttccagatgtcccagttaaatccaccttctctgtctaactgctcctgaatttctgttgtaaattcagtttccgcaaagttgcggaagttctttctcatcagttcatgttcctttgaaagaatcattttttacctccttataaaatatgcgtcaaaccgcataaatctatttatttgcgagtgcaagcactctcattctctcttttaactcacctatttttatcttgttgctcgaatttaccggaagttcttcaaaaaactcgatataccgtggaactttatatgccgcaagatatttgctgcagtgcgctgtaatctcttcctttgtcagttcacagttttttctcaaaacaatgcacgccgctatttcttcctgcaaaactgcctgtgggacaccgaccaccttaacatcccgcacctgcggaaacatccggatacattcctctatctccaccgggcttatattttctccaccacggatgatcatttccttgattcttccgcttatgtgtatcctgccactgtcatctacgaatccaaggtctccggtatgaataaaaccatcctcggtcaatgcctccctggtggcttcctctctcctgaagtaccctttcatcacattaaatcctctgacaccgatttctcctctggaaaaaaatgtacctctggtacacaccgcatttctcttatctccgataagacttgtatagtggatatgtgactccccggtctcctctcttccaaggatccttccatccggttttaagacatcacaatgataaatattctgatttccctctaaatcccagacacacacctcgataaatggaataatgaaccctgcattgtcacatttctgttcgattgtctcatcatattcagaaaagctgattcccggtgaagtctcagtctgtccgtaagacatctggagtttctccataccaagtttttcgcagatcattttataatcagatgccgaaagcggggaacctgcgataattccagattttaaactgttaagcttaaattcctcaaaatgcctgttgtgcaccatggcaagaaacatcgacggaacaccgtttaaaacggtacatccatgattgtcgattccctcaagtgcattaatggtcctataatacttcataacatacaggcagcttccgcagatcacacttgcaagcagacagcttgtcattccaaaacagtgaaaaagcggaaccatcacacagattttatcatccttttcccagtgcattgcctttgcagtaaacatggcatcattcacaagattataatgggtaagtaatacaccctttggaagagcggttgttcccgaagtaaacaacatacatgcggtatctttacaatcgggaagctgctttaactcataaattctttgcttctgtgcctctgtcagttcttctgcaccttttttcataaaatcaatggcagctttcagttcgatcggaattgtctgttttaaattcggtgttgtggaaatatccacttccgcaagtatctttgtcagatctgcatttttgaattcctctccataaaacagatactctacatctgaataagatattattttatgaagctcatccgctaaataccccggattgatcaaaacggctgtcgcacctatcttctgcagtccaaggaatacaataatccactgaagattattaccacaccagattccggctcttgttcctctttttattccaaggaaatcaaaccgccatacaagccagtcagataaccagtctaactcgttccaggaaattctctctccttcaaactcaacggcaggagcatctggcgtaagacttactctgtattcaaaacattgtgcaattgtcttttctaataatctgtcactttctaaaatattgttttgttccatatctgcctcttgttaacttgtcgacaagtttgatacatttatcatagcagtacaccggcaatttgtaaagtaaaaaaggcatttcttttatcagtttctatgacctttttgtctggaaatcaataaacgaaatgccttaaaattagtttttcttttttataatggcttatcttacttcatcatcaattggctctactttcaatgcgatcatagcaattaatcctgctgctgcgatcactgccatagctgcatatgccatccagtagcttacattgtgtccgataatgaatacaactgtgatgccgacaccagtcatcagtgaattaagtggctgaatgacacggaaagcattctggaaatcatatcttccccaaattgcagatgtacaggaagccatcaggtttgaagatcctcctaacatacaagctaagattggaagtgagataaagtgtaatgggcggatggatgtaagattaaatacaactgcgataagtgctgctgcatttacgataactccagccttctttgttccaaatctgacgtctaaccagccgacgatcatggaacccggaattgcaagtacaccggaaacagcaagcattaccataatagttcccatatcataaccctgctcaaggaattttcctacaaagtttgacataattcccatggaaaggaaacctgttgctcctactgcaacccataaaacccacatacgtcctgtcataagacatttctttacagtccattttgatttttttaaatattcaagattttctttatgtttcttcttttctgtttcaaaatcaaattctttattgttgtccggatatgccccaacttcttccgggaagtctcttactacaagtaaaatcactactccaagaacaagtgcaatgattcctacaattctaaaatacatctccggatgtcctgttcctgcaaacattccacagaaattagctgttgtagcagcagaaagtggaaatcctgcggttgcaataccaagtgctgcacctctcttggttgggaaccagtaagcaagtacctgatagcttaaaagcattgcagatgccagcgtacatgcataacagacaaagtatccaatcgcaaaaaccgaaaatgtctttcctgttgaccagataattgcaaaaatacctgtaatgaacatggaaactgaccacatcttagatgctgttgaaactgacatcaattttccccagatgattgaggtaataatgcctacaaacgctgcaatggttggaagcgttgcaattgcatttgcatcaatctggtaaattccggcgtatgcatccggcattacattgatcatgtctgatgtaagtgcggaatacatgtagcatgataaaaatgaaaggattaccatcagaaatcccctgcctccaagattgaaggcacctgtttttttgttgttcataaaaacctcctaaaacatcctctagtattttaaagattgtcatttttttaacaaccttatgtagaatattgtaaactagttgacaagttttagcaagttttattgtgcattttgcttatacctttatttgtatatgttcaataattataagttataaacaaaagtgaaaaaatttctatcctttgattttatcatatgctgccaacgcagctcctaatgcgcccatgtactgcgcatcttttacctggataacttctctgccgagttcttttgcaagtgcattccttacaccaccgttttttgccactccaccgctcatgcagactttatctgtaattgcagttctctttgcaagcgcagcggttctctttgctaccgatgagcagattcctgccaccagatcgcttaagtccacattgtttgaaagctgcgagatcacctcggattctgcaaatacagtgcatgtgctcgatatgctgcatggatgttctgattttgctgcatactgttccagctcgcttatatcaagctgcaggattccagccatgacatccaaaaaacgtccggtaccagctgcacatttatcattcataacaaaattagaaattgttccattggaagaaagcagaatcaccttcgcatcctgtcctccaatgtcaatgatcgtacggcactccggctccataaaaaagacgccttttccatgacagcttaattcactcatttcagcatccgcagccggatatgtttttcttccatatccggttgccattgtaaatgctatttcatcctgcgtaaggcctgcactgcgaagcacctcgttatatgcgccatccggtccgcttgttccggttccggcttttaccagtgactttgccacgattgtcctgccgtcttctaaaataacgcattttgaggtcgtagatccaatatctattcccagtgtatacatatattttccctgccttttatccgattctcttgcagccagttgcctctccagcctcgatcatcgcctgaatctgctccttgctgtatcctaagcgcgctaacacactctcggtatcctcacctaaaaatccgcctctttcatattccggcagatcagtgtctgtaaaaataacaggtgttctgaccattgtacgttcgtttccatttgggaattttacttttgtaagtgcatcggaaccccatgcctgcgggtcatttaaaatctgattccaggtctggcagacagcatatggtaaatctgcctcatccattcttttgcacatttcctctaatgtgtactttccgatctctgcgtccagaatcttataaaattcctctaaatggctctggagatttttctgcggatagaatctttcatcatcgatcagatcttctctctcaatcactttcatgaaaagaggatagtggaaatcatatcttggcattgcgatctgaatccattttccatctccacatttatgtgcaacatttaatggatttgcagtcagcttccggctgattgggaactgtgtagaagaatctccatactggtttgcctgtaaaaataaagcaatatcccataatgccgtgtggaacagactgactgttacctgatctccttctccagtctcccttgctctgtaaagggctgccaaaataccggatgcaagatacattccaacctgatgatcaccaaatcccgcaatcgggctcattggcatggaatccacatcatacatggttcccataattccaccacgggcaaaatatgcggtaaagtcaaatcccggaagatccttgtccggtcccttttctccgtaaccgctgacataaccgaatacaagttttggatattttgcgtgaagtgtctcataatcaagattagatctcttcaagccgtttggacggatattggtaataaaaatatctgcctcagcgatcagcttctctaatgctcctcttccggcttcactttttgtatctaatgttacacatttttttcctgtgttttccacggtaaatgaagtatcctctgcatctccgaacggacgtccttcatttactgctgtaaaacggagcggatctccttttggagactctactttaatgacctccgcccctaaatctgcaagatatcttgcacaacatgggcctgcaataaatgtagcaagctctactacttttacgccttctaacggccgtcttaatcctgccataattctctccttataacaaatccttaaatgtctctatcatcgtgcgtgcctgttcaaaattctccatctgtctgtcgacttctacgacaatacaaggaagtcctgcagcatcacaggcttttttgatcagtggattgtcaaattcctcaggatcacagaattttgtaagcacaaggataactccttttgcatctgctgccttcgcttcatctacgatcatctgtacacgttttttgtctacatcatataataaagaacagttgtccattgcagagaatttcgctgccagcgcatccattgcgctgtcttcgttgtctgtgatgcagtctgttctataaagtctgctctgtgtgaaaatgtcatctgctgctatcatcagtccattttcatcaaagatctccaaaaatgccggtgcatctgctaaaatacctgatacatatactttggtcttttcaccctgtggtgtatccttttccagggatgcaagcagttcttttaccattgcagtatgttcctctttgaggataaatccggcactcttaaacacatcacttctgtcctgtgcagaaagttccggatgttttgctgccactttggaaaattcacgcataactgcattatgctcgttataaatcttaatagactcttttaatttttcctcgtcaaaggaaagtcctgttgccttgatcaggtcttcttttactctctcatagccagcttttgtaaactcttttccatatgccggtttccggttctgtggataagtcattggaataaacggaatagatggtactgcatacttccagttctcaccaagacattttaaggaatcacacagacttggaatgacgatcgcacttacaccgtcataggttcctctcattcccagttccaaaatactctgaagtacggaacagataaaagtcgggaaatatttttttgcctcatttaactggatgtctgcaccataagctgccattggaacaatgcccatagaatgaatcagctcttccggtgtataataagtggtaagaactatttttcttccctttgccagataatcagctttcacttttgcagggtttgtcgcaatttcatgaaattgtgcgagcaattcttttgtactcattctatttcgcctccttgttcgcttccataatctcagtcaatccctgaactctcgtgtcatactgtgcctcagagaagtttcttggatctgcctggtcaccgtcaaagcttacaaccgggatattgcactcactgccaatctgacggctcatctcatacatgaaaccactccagagtttgcaggaacggttcgtatgtactaaaagtccttctacatgattgtctttgcacagtttcacacgcttgtctcttgctttttcaagattgatggcgttcggtacctgcgcatatgcacggcacatatcatcaaaatcatcatagataaaaccgaaagcatctgcataaatggtagttaccatattgattccacggctctttaatccggtagatgtcactctaagccatggccagcaggcaattccttcgaacatgatcctgtatttttcttctacacggaatgtagattctcctttttgatgattttcttcgtattctttctctaaaagttccatcgcctctgcggcttcctttttgccacgtgcagtaaccataactgccatatggttcaaaagatcgaaaccattaaatggagatggcgtatagcatgcttttgcagttgcacgaagccatgctcttgagcttcttccggaaagttctctgacttcctcgtatttctcatcgctccatttttttcctgtaaattcttcgagtttgtggatgcaatccaaaaactgtgcctttacatatgcgatttctgcttttgatacttcataatccgggttaaatggaatgtcgatcatgaaaagcggaatgtttaattccctggaaagattttcataccatttaatcatacagttacagatgttattgcagcataaaaggaaatccggctgtggcatttcctgaccaccgttggaatcttttacttttgcataggcaagactgatacgcgcataagcgcagatatcgttcgaatatccgtcttcctcactgatctgacacatttcttccccgtgtccgcgggcagcgattgccgctgcctgattctccgggtatactacataaagtccgagtgtttccggtatctccaccggaaagttgcttgagcaccagcctacaagctctcctctttcttttgcttctgctgcgtctgaatatgctttcgcagcaatttgtcctaatttatattttgcagaattcgggtctaccggtctgcgtggttttttttgttcttctgccatatttcttctcccatatttttatttgtcaacttgttgacaagaaatggttaaaagaatttattttgatggggatggagtaggctcacatactgctgtataatatgcctttcttctcttaaattcttcatttgttcccagattcataagacgtccttcattctcaaagatgtcatctccatgaagttttttaccggagataatatcatgtgctttgtgttcatcttctggattaaatttgaatttgaatgcaccatccacaatttcaagtgttccttcaagtccgcaaagctcacatacacattttgttgttcccgggtaaatatagaagttatttccctggcaatgtgggcatgctccttcttttcctttccagtaggatttattattctctgcaaccggaatctgcatttttgcattatcttccattacttcttttgctgcttctacaaggttacgtccgatctgctgcatacgctcgatcttgtcatcctgcatgataacgtctttgcaccatgagaagaattcattatctactactttccatgccggactcattgcaagcattgcatgatctgtctctacacgtactgcccagtcagaaccaccgattccaacgaaagaaactggcttctgtctgaaatattttggatcaagaccttttcctgtcttctcaagcatctggaagtttgctccaagcatcattcctgcgtcatgtcctggtcccattctgtctgtaattgcatggaataaaccggatgcgccggattcaaaaataggatctacaaataaaacgccatctgcttctaccattttctcatagaatgctttgtaatcatccttctgtgtacagaccattccctttcccattacaagtgcacgtgaacatgctacacagccggaacagtatttgatatcccagtcaaataaatggataaattcaatctctgcccctgcattctttgcagcttccaatgcgactctgcacattgtatcgttgttaccgttttttgttcctaaagaaacacctaaaattttcattttactctccttctgccctcaggcggcgaaaaaatctttgttaattttttcacgttattgttgactttattttatcatataaagtagcatctgcctaattccaaaagtgttatatgtttccatacataaagttataagtgaatgtacagattcttttttcatcagttcaagaaatactgtgcttctttttctttcagacctttactatatcggtttacagtatccaaatggttgtgcagacagtctcttgctgccactccatcccctttttcgatcgcacagatgagattctcatgttcattcgtaatctcgatcaatctctttttcgatctgatttcaaaatttctccaccttctgatatgtatatacggctccgaaatcagttttgttacattcggtcttccgatcgcatctaaaagtgcttcatgaaaaatgttatccagtgcataaaacttctcatgataatctgtatcctctctcagttcctgctgcgctccgagtgcaacccgcattctctgcagtacctgcgttctgtcgctcatctgcatgatcctcgcaagtgcctcctgctccacagcctccctcagatataaaatatcctgaatatactccatgtcaataagacttacaaaggttcctctctgaggatatacttctacaagtctccgcccttttaacaatgcgagcgcatttctgactacatgtctcgatacatggtatattccgcacagctcattctcgcttaatttttctcccggcatatactcaagtctttctattttcagacacatatcctcatagatttcatcacttgtcatggaaggtatattctggatattcatgttcattcccctttactgtttcatgtaatacacaataacacattttagggtaataactcaagacttacagctagtctatattgtctcaggttcgaaatcgaatccgctccataccggaacacctgtatattcttttaactcttcctcgccatttaatgcacggactgcgcctgatgctaaagcttccatctcgaaatctccgccgtatacgatcatcggtgcgatccagcctgtatgttcttttactttttcgataaacatctcatcttttgagcagccaccggtcatgacaattgcatctacctgaccatttaatacacaggcataggagccaatgtattttccgagctgatatgcaaagttatcgaatacaagagatgcccatttgtctccctcttcaatctttttatcaatgatacgcatatcatctgtgccaagaagtgagatcaatcctcctgttttggagattttttctttcatctgctgtaatgtgtattttccggaataacacattttcactacaggcataagtggtacatatccggaacggtttggtgccattggtccatctccgttcaatacatcatttccatctacaatcttgccatgtttttgtgcagtgatcgaaagtccaccgccaacgtggcagacgatcaggtttgtctcctcgtatttctttccgagttcttttgccgcacgcatggcaacttccttctgatttaatacatggacatgggattcacggtaaattcccttgattcctgtgagtcttgccacatcttcgaattcgtctacatccggtggatttaccagataagcaggttttgaaacttcgtctgcaaatttgcggataatctgtgctcccaagattgcaggatgctccattaatcttccggaagtacagtcttcgatgattttatcattcaccgggaagattccgcccggtgtagattcaagtccgccggaatatgctgcaaaagcgtccatatctttgatatcaatgcctgctttttttaattcttccatgattgtttccactctgtatggaagctgttcatttactcttgcaaatgtttttaatttttccggatcatgtgttacatttgctttgaaaatgagttcttccccatcaaaaactgcaagttttgtagaggtagaacctgggcttaacgtaaaaattttgtatgccatcttgttttccttccttatatagtatatgaatgttgattaatttcctgctgcaagaacaagcattgcaatatctcctacgatctcctcaacagttgctcctctggaagaatctgcaaccggttttgcaaatccggaaagtgtatgtccatatgcagaaccatgtgcaaatctctgaacaagttttactgcgatatttgctgcattcagttctgggaaaattaaaacatttgcttttcctgcaacatcggatggacggtctaatttctttgctgctactgccggatcgattgcagtatctaactggaattctccgtcaatcttcagatcagggcgacgttctttggcaatctttaaggcctctaagattttgtctacgcttcctgccgtaccagaaccacaggttgagaaagataaaaatgctgttcttggttcccagcccataagtgcctttgtattgtccgcagatgcgattgcgatagaagcaagttcctcagctcccggttccggatttaatccacagtctgcgaatacgattctgtttccttccggtccttcaaatccaggtgtctcaacaatggcaagaatagatggaacatctacaccttcctgcattccgatgcagtccattgcgcacatcaatacatcacctgttgtattggtatgtccacagaaagtacagtccacatagcctgctgcttctaagatcattgcataatagattggttttttcattctgcggttgcaggccttctctgaaagcatacgaggttcttccagatatttctggattacttcctgtttctttacttcgtctgtaatatcaacaatttccattccctcaagggaaactcctgctttctttgcagtttcttcgatcactgccggatcgtttaccaataccggtgttccgattcctttttctaatacttctcttgctgcaagcagtgttttctctgcttcacattctggaagtgccacacgttttggggactgttttgctttttctgttaattcctcgataagtgtcattttttctctcctttagaataatgggctgccgcactaagacttatgttttgttctgtcttaatgcaacagccgcatttttaggggttagcgtgatacaaatgtgcctggtttaaattttggtccgatgtatggaacctgaatgtaagattcatattttccgcctgtatggataatatgatttcctacgttctcctcatcccatgcaagtggctcgaaccatccttcacggatgtaacgtcctgcgatctgtacacggagtttctcacctttatgccagaagcgggcagatggtacgattgcgatatcaaccggtacgatctcacctttggaaagttttaactctctctcatgttttaataccgggttgaagtctgttgaaagcttctcgtcaagttcacggcgtgaaacgcggcatttgccccatgcacctggatgtggctcgtcaagtgtgaaccatggaatccagttgccgtctgcatcagctttctgtacattgataaataaatccatatcatcatgtccatctgcttccacaaacatatgtactttcatgtatcctgtaagttctgtatcttctttaaactgaaggtcaaattctacctgtcctgtctttccatcataagatacagaagactctgttgctgcaggtgtctcgctcatctcataaacatcgccaccgacatgtttagatgcatcaaaatagtatttacggtattctgtacgctctaatgggaaggatgtctctgctcttcttgtgcagtaatcatcatcataagcatccataacatccacacgtacctttggagtcatctcccagccgttatggatatcttttaagtaacggtcatagaatctctttaagtcttccagattttctggtgtatatgtatccggccactcgaagtcacggtgaattcttaaccatttctgacggctcttgcataaacggaatgcttttacagaacccatcaaatggaaatgagacattcctgctgtctggtaaacagggattgttacttttgcaaagtttggaattttatctttccagtatccattcataaatggatatttctgtgccattgcaacctgatcatctacaccgccattaccggtaacctgtgcagcgataaatttgttgaaggaaagtgccgggataccgccttcgaagaaggactctctgtaaaggtctgtggtgcactcccatggtgccatacatgcaaggtgtggtggctgttctgctgcaattccccactgatgcattgcaacaccggagtttccggacataccaacttttccgttacaccatggctgaacagcaacccattctacgaaatcatatccgtcttcacggtcctgatgtgtaaacatatgtacgtcgccttctgaatgaccagctccgcggacatctacattggcaactgcatatccctgatgacaccagtatgccgggtctggagattcgaattttgccattttggatacagtctgtggcggcactcccatgatctgccattctgacataccatctccaggtctcttgccaaaccagctccaggatacgataaccggtacctgatgatttggtccggaatctgccgggcggtaaatatcaacataaatggtagctccatctctcatggtaactgccacatcctgatcacagatgattcctggtgcagccaggtaacttctctgattgaatgcagggcagaatccctgtcccatacgtgccattggatcttcagagtttgcaagatcaacttcttcctgatttgcaaccggtttacggcccacacgatatacggcatcaatttcttcaccctggaaaacttcttttttgatcatgtattttacaccaggttctggttcaaaaccgtcctttgccggatcgatctctacaacataatcgtctgtgttgtaagagcctgttggtgcagaagaagcaactggtgctgtctcttttttctcttcttttaccggttctgcctttggtgcagcaactggtgcttcgtcgtcatcatctaagaattcacaaacgaaatcagctgcttccccgattgtcttgttacgacggaatttcatgtaaggaacctcgatatcgagttcatcctctaagaatgttgtaatctgtgaaatatgaacagattttgcattcacgtcctctgtaaagcgtgtattctcgcttaattcagatggatcttttccccataattttgagcctctctcaatgatcagctcgacaattctgtctctctgtgacattgttttttatcctccttttatgttttaacacaatagtttataacttgctctgcataaagaaattatatataataagcattacagtaacaatgtatcctgttttaaagatccaccaaaaagaggttatttttttgtgttagaacacaacactttttacataggagaaaaagccaatgcaattaactaaaattatgacaagttttcataattgcagccgtaaatggatttgtcagttcgaccggaatcttgacatttattccttcgcctttttgtcaggaacaactgcttttgaatctaatattttatattttggaaaggtatctgatatccctgatacacttccggatatccaccttacccttgtgtgtattgcagacatcccgctttccgattcgttcgtcagcaaaaatctttccagcatgaaccttatcatacttgacgattcaaccgaacagatggatatccttcgtatccttacccagctgtttggcgatgctgcgagagtttccagcggccgcgcacatctgatcgatgccctgcattcgaaccgcggtttacagtctatcatcgacactgcctacctcattctcgaaaatccgattatcgtggtagattccagctataaactgcttgccatgtataatgatgatactgctttctgcggcagacaggatttagaggaacagcggacattaggctacatgttaaaatccaatattgacgccatgaaccgcgcgcatatttatgaacaggcgcgggccaaaggctacccttactataacaaagacaaagatgcagcttacggatggatcaccgcacttgtatacatccacggaatcgaagtcggtcagatcggtgtaatggactcaagacattcttttacagatgtggattttgaaattgtagactttctctgcaaaatcgtttccttagaattacagaaaagcgatttttacaggacaaaccaggggcttatgcacagttatctgctctcggatctcttagacaacgaagttcatgatggtgctgcgattgaacagcgtatggcaaatcttggctgggacatgaacaataatctttatattatgctcctgacggattctgcccggaacttttttgacggaaaagcgcagatcatcacaagacagttacacgatattatgccaaacagccgctgggtcatttatcacgggcatattgtttttcttatccgcgcagaaaatatttcgcttttttccgaaaatggcatgctgatccattatctgtcgatcaacaagcttcaggctgcaataagcaaccgttttgacaatatcattgacatgaagcagtattataagcaggcattaaaggcatttgaatttgggcggaagctttcaccggaaaaacagatttatttttactcggattatattttttatcacatgggagaaattgcagccgaacagcttgacatccacagtttttatcatcccggtgttattgccgtctctgaatatgataaaacgcatggcacgaattttttagaaacactccggttatatcttacttatattgacaatcccggaaaaattgcggaagaattatatattcacaaaaatactgttttttaccgcattaataagttaaaagaaaagttcaagctccagttagacaatggagacgaatgttttaaaatgcatatgacgataaaattaatggaactggactaaaaaatccagttccatttcttcttgttttatagttgtacaagatcttttgcaatttctgctgcaaggtcatatgcctgcgggcagtaacctactctgtctacaaactcatgatccattccctgatacagaatggttctcacatccacgccttctcgcaccagttttctggaaaatgcttctccctgcaatctcagataatcgtactcacaaagaacatttaaagtcttcggcagataagaaagattctccgcacaaagcggtgctgcaagcggatctttgacatgctcgtcttttcctgtgtataaaagcggcatctctgctgtcattgcctttaagcttaatgcagcgcccatggcgagcacatcatcctccggaatgtcatattcagacattttccatttgtaatcatcaagtttaaagttgtcaaccagcacacccggataaacaagtgcttcgtatctgatacgggattttttgattttcccttcatcaactgcctgtttttcaagcatacagcagccgattgcaagcgttcctccggcgctgtcgcctccgacagcgattttgtctttgtctgcgccaaagtcttttgcatgctcatacaaataaaccatggtgtcataacagtcataaagtcctgccgggaaataatgctccggtgcaagtctgtaatcaacacccacaactaccgcgccagacatttctgcaatcagtttgcagaagttttccactacttttgtgctgccggcaataaatgctccgccgtggataaacagcagcattggttttttatccattcctccggctggcgtgtatacataaatatcggtatctccgtttcttgtggaaatcacctttttttctgtaagcacttctgtctccgtcacatcaaagcttggtgctgccggaagtttgcggacaaggtcaaccgggatctccacatattctgcaagcggatttcccttttcctctgcggcttttctgtctgcatatactcttggatctaacacagttccttccattggatccgggattttctttacagacatttcacagtcatggattgtttttgtctccacatcgccggataactgatccagcaatatttcattctttctataatattctctcatttttccacctatttacttttcctgcacttctttagaataaatctctggaaaatatctcctacagctccaacataccatactcctgcaagcatcgctgctccgatctgcaacggaagtgtgccgatgttcccaataccgattggcgccataatggtaagtccgattgcccagccgcaaagccatgccggcacaaaaataaacttttcaaacacgctgcctatgataactgcaagtccgcccatgacaaaaagtgtaagatacaattctgcatccgggttaaagttcatcatctcctgaacttttatggcgatcaccgcccacacatctccacagagaaatccgagtgagattgccaccgcttttttgatatcattgcctgctgcaacatataagcccgcacatattaaagcaactgctccggtcgtcaccccgatataagggcttaaaaccgcccagatcggtgggagaaatgcgattgtaaatgccagtgtaaggacatttgccaagtctattttcttcttcatcttctctcttttctccaaccgttaaaattttcctacttttgtaagtttctttggaagcttcggaagttttcctttcacagcaacaattgcggattcctcacatgcagaaacacattttccacactgttcacacatatcctggtcgatcatatgaatgaattttgactttccgataatcgcatcctcatcacattcatcgatacagtctccacagccggtacatacatccggtaaaatgacatatacagcttctgctttataacatacacctgctgaacatgattttttcttaatgtgttccataaagtcatcctgatagagcgcgatcgcacttaacagtggacgtggcatgttctttccgaacggacagtatgctccaacttcaatcagttctccgacatcattgatcagatcaagatcggtctgctttgcttttccgcatgtcatctcctctgtaatctgtttaaactgcgaagtaccctctctgcaaagcacacatttgccgcaggaatcttcccatgacattgccatgagtttttttacagtatccacaatacaggattcttttccaaaaacagtaacagagctgcttgatgttccctctggtattacgcactctgcaagtgactgtggttttacaaattcaccttttaaaccgccaaaaagaaccgctttcgcatcagaagcagctacaatgtcgcttaactttgttccggctgcaacctgttttatttctgtttcttttccttcaagtccatccttgttcactgcaacaaagcaatcctcttttccggttgcttttgcataggctgcctccggttttacaacgtttacttccattccgtcataaactgccacataaccgtctgctatcatcggacgaggaagctttccttctaacacctgtgcaactgcatatggattaccgagtgtcgggctttttatcgcgtatttcacttcgccttctaagccctctactgtttcattttccggcagaaggtaaagtatctttgcatcccctgccagtgccttcatcccggctttcacttcttccaaatgatttttcataagatacatggaaaccggtgcaaatctgtcatctgcattacaactgcatacaaataatttttccattattgtgctcctccttcctctgatgcataatcactccagaacttctgaggtgcgatctgcagtctcaaatcacattgcagacatctctcagcttcgcatcctgcaccgtcacagcctaatcccaagtccataggctcaaaattgttaattctgtcacaaacttctgttacctgtggtgcgactctgtcggctctctgctccttcgttgcttttccaatacatggattggcattctggcaaggtgcaagctcttcgtcaatatttccgtctccgcctaagtatttatcaatctcacttacaacggttctcgcttctgcgatagaaagaatgacagaacgtgttcctgtcacgcagtctccggctgcataaattccttctacaggtgttgcccaggttgtatcgtctgctacaattctgcctctctctaatggaagtccaaatgcttctgatacttccggatgctgtccgactgcaaaaataatggtatctgccggaagaatttcatcggaattttcttctttctcgatcactgctttgccattttcaaaatagaagttctttacgccagtcacagaaagacctgtcactttgccattttcacttgtgatctcattaaatgtcttagagttgtaaattaaaattccatcctcttttgcccattccacttcttcatcggatgcggtcattttatctgctgcttccagacaggtcatgcgtacttccttcgcgccaagacgaagtgcactttccgcacagtcaatagcaacgtttccaccaccaaggacaactactttttctccaacaggcattggatgtccttcattgatcgcgcgtaaaaactctgcattcagatatacatccggcaaatcatttccagctaatggaagtttatttcctgcatgcgttccgattgctgcaaaaactgcatcatatccctgctcttttaatgccgtcgcagattctacgctgctgttgcatacgatttttacaccgatgctctcaatttcttttatttcacggtcaagcacttctcttggaagtctgtaagacggaataccataacgcatctgtccgcctgctttttccagtttttcaaaaatagtaacttcatgaccgagttttcttaaataataagctgcggtaagaccagcaggaccggaaccaatgattgcaacttttttgccggtatccggtttctggaaggatttttctttccagcttccatcatcctgacttgctgcaaatctctttaagttacggatagataccggattatcaagtccgtttctcttacactgtagttcacagttatgtacacagatgtaacctaatgtctccgggaaaggagctttctctctcaccgttgctgctgccgctgcataattgccttctctgataaaacggatatatttcggtacattaatatgtgccggacatccttccatacatggaaccaatgtattctcacgggataagccctctttaaatacgccgatcttgtcacggatagaaccggttggacagacttccacacaggcaccacagaaacggcagcctgcttcttctaaactgcctccattaatgacaacctgcattcttccatccacttttttgaaggtaagtgctccgactccgcgaagttcaccacacgcacgcacgcagcgtccgcataaaatacaacgatacatctcatgtaacatgagtggattttcttcatttgccggcacacggatcttctgttcacgcagatcacgtccggtatctcctacatactgggaaatagatgccaactgacattttccatactttggacatccggtacattcacttggatgtgttttaaacatcagatctacagacaatttgcggactttttctgcaagctcgtctttcgtatgaattaccattccctcttctactttttttgaacaggaagtgaccactccctctactccatcctgttttacaacacataaacggcagccaccgttctcgtgaagattctcatgatgacataaatgtggaatatagattccgttatcaagtgcagcttcgagcactgttttattttcatctgccacgatttcatgatcatcgattactaaatgaacctgagccatttttctctcctcaatctctcttaagtgtaacagagcaacccttgtttctttgtagccgggttgctcaaaagttatgtttttatattattttccgtttttatttactcttcgtcacagtatgctgctgcgccttctcctgcgaaacgtcctgtgttcaggcaatatcccattgtatttcctggaagaaggaacatgtagctgtctccgtaaatagtacaggtatctgttccacatgcaaaaagtcctgggattttcttccactcgtcatttaatacttctgcattgtcgttgatcttaattccaccaagtgttccgtatccggatggacggaatgctccggcatagaaaggagcttttctgattggtttcatgaaacgacgatctttgaagaactgctcatcataagaatcacacatatcgttgtattcatcaatggtatcctctaatgcttccggatcaatgcctaacatatttgcaagttcttcgatagaatctgctttgtaaacatcaggattcttagctgcgatagaatcatccacgcactgttcaaaatcatcgatattatctggatgatgaacaaagtttgtaacatcaagtcctctctttttgtatcctttgataatagaagaatctaaaatagagaaaccgattctttccggctggattgcaattgcatttccggtaaaagttgtattctgcatttcctcttcattgatgaaacgacggccttctttatttaccataaggtttggctgcataaatgtagccgggatacagtctggtcccatatcagagtttggaaggatgtaaatcatctcgatattcatatctgttgttgctgcaccggcttccattgccatatggattccgtcacccttaagacctggaattgcaaagttgaacatatcttttccccaggtatatcccatacgctctttgatcacctgtgggttatctcctgcaccaccagttccgataatgactgcttttgcacttacttcgatctcttcacctgctgcatcttttgccataactccggcaacttttccgtctttcatgatgattttttcaacggttgtgctgttgtaatactcaacgccaagttcttttcctttttccatcatggctttgttcatgattgctccgccgtttcttccgattccgccgttaacagctacgatatgccatgttgcttctgattttgggaaatatttatatgcacctgcaaattctactcccatatcctcaagccattcgattgtatctttagaattttcaaaatattttttaacaagatttgcatcaactctccagtgtgtgtaatccataaacattttgaaagctttctctacagaaatatcaaccatctgagcctgctgctgtcttgttccgataccgagtggtcccatacccatattggcagctccaccaacaatatctgctttgtttaaaagaataacgcttgccccgtcttctgctgcctgcacgcttgctgcaagtccggaaggacctccaccaacaactactacatccgcttcaagtttcttcattgtaaatacctccacctttttattttgttaattttttaacatttcaaggttcaatgacctatgtatttgatgtccttattatacaataggagccttttttccgtccaatagcgaaaaggcttgtttattaataactaaaagttataggttttttcgtcatcttatgttataattaccttacgcacatatttttgttagaaactgcgtctacatatgaagggggaaaaataatgcaatataaaataagttttcagcagatcgattattttctgactgtagctgacgtacttagttttacggaagcagccagaatcctttacatttcacagcctgccttaagcaagcagatcaatgtgatagaaaccgaacttggttttccactttttgtcagaaataagcgtcatgttgtgcttaccccggaaggaatttccctccacagagactggaaaagtttaagccagaatatggaatcttccatttataatgcaaaacttttgcggaaccacgcatccggtgaactttatattggctgttcggatacttttgattacagtgatgtgctgccaaaacttgtccggaattttatgagtgattatcctcagattaatgttgacgcctccagccattcctttaaaacactcagggaatctcttcttgctgataaaatggatatcatattcaccccgtattttgagttagacggtcttacggatgtctcctggatgaagttaaaagacattccattaagcattattgttccgacctgtaatccactctctgaaaaagattctatttcgcttcgcgatctgaaaaatgaatcttttattttaatttccccaaaggattcccaaagcggaactgaacgaacacaggctttatgccgccgttgtggtttcaatttaaagaaagtacgctatgtgccaaatgtttcttccatgcagcttgcggtgcagaatggtctcggcgttgcgatctgcaattcaaaaatgtttgaacatgattccgaaatgtgcaaaatttatcctctggacattacgcaggatgactcttttcttgtcgcggtctggaaaaaggacagacataatgtagcagtcgatctgttcacgacacttttgcagaatcaatttacccatatgatacattgaaaatgaggagacttccatgatcgttcagattggtaccgatattgtagaaatagaaaaattaaagtattccgtcacgaaagagcctttcgcatcagacccttttatccggcacacttttaccgaaaaagaaatccggcttgcacttttacggtctgatccgctgtctttttttgccacaagatttgccggaaaggaagccgtctttaaagcactgaatattaccggagaagatgtgcggctatctgaaatcgaaatactttcgcaggaaaatggccgtccttacgtcagtctttatggcagcgcaaaagaaaccgcaaaagcacttggcataaacaatatgcatctctcactctcttatgaggatcattatgcgattgcttttgcagttgcggaagattaaaatgattctttgcttttaggcaatctgccggcaaacttaacggacagattttttgacaccctaagggctaatatatacagaaaaggattttatgaacatgcagaaaaaaaagatagattatcagaaaatcatggaaacaagaaatgcctcaaatgcttttgccaatctgattggtcttaagatcaccgaaatatcggatggtcactgcacctgtgaaatggatattacagacgatatgaaaaatccaatccagtccgtacatggcggcgtgctttttacgattgccgatgtgaccggtggcggtgccgctgcctcccacggttttgacatcacaactgtcgattcttcctttcactatctgcgtcccggaatcggcacaacaaagctgactgccactgcacgggaattaaaggccggacgcaacctcttagtatatgatgtctccgtcgctgaccagaacaatactgttcttgctgagggaatctttacttatatgaagctaaaggaaatcagtctgtagcttcttttttatgtatctctctggaaatttcttccggggataatctcagtaatgcacacaatcttagaaattcctccgcaagcagcggttctttataatccgggcatagtttttcttctgcgatccctgtcttttctgaaagctcagaagctgtgatctgattttccctcatatatgtaaggatgtattctgttactctggacttttccatgtgcgccgctccttgtcttgttttttcgaaactctatttatgctatgacgattgtgaagaattaacaaaatttactttacattattatgagtttcataaatctctgcgagtttgatgtatatttttgcttattcatgtcaattatattcttatattttaagactttcaatcacctttttctttgattttcagaataaattgacggtcgaaaatatgtgagatatgatagttgtgattacgaaactgccgaatcacgacttcattttcaaactatagaaacaggggattttttatgcgaaatgaattaattccaaaggtattaaaagaatatagaaagcggaatcactacactgtaaaggatgttgcagtcaaattaaaggaacacgaaatggagatcgcgccaaagacgatctacggctgggaaagtggtcaggcgcagccaacggctgacacacttcttcttttgtgtgagatttacaaaatcccggatattttaagctcatttggttacgatcagccggatgatccggcggcaacgctgacctaccatgagcgggaactcatccatgcttaccggagtcatcccgatttacaacatgcagtagatattctgctcgactgcgaataaaatgaaaaaaaggtttttcttcgaaagttttcctgttctgattctttcgtggaaaaacctttttttatcctgcttttacaggttgcaacttttccttaagaagtataaaatagaagatactctgcggtttttgggtactttaaacattgccgcaggatattacgagggagatttatttatgaatacatttcaatttatcggtcagtatatcaaacggcataaagtccaatacatactcggcattatcacactttttgtcgtggactttgccaatattttcattccaaagcttaccggtgtcatcaccgacggtctcactgcgcacagcctcgactggaacggtgtgaaattaaacctgctctatctgtttctgctcggtcttttactcgcagtcggacgttttttctggcgttacttcctctttggtgcttcccgctctatcgagaaggaactgcgcaatgatatgtttgcccacctcgaaaaaatggatgtggaatattacaacgagcacaagaccggtgatttgatgacacgttttacgagtgacttaaacgcgatccgtatggcgatcggacctgccgtcatctgcgtgtttgacgcttctgtcatgacgatcatggtcattttccagatgatgtactatgtcagtgtgaagttgacactcattgcagtcattccaatgctgtttattttgtttggtgagatttattatggaaaaatcatccgtccacgctttaccgcaagacaggaagccgtgtctgacctgactgactatgtgcaggaaagtttttccggtatccgcgtcattaaggcttttgtccgcgaaaaagcacagcgttatcactttttaaaagaaaacgaaaacacgatggaaaagaacttaagcattgcaaagatccagtccattgtcattccactgttggatgtcatcatcggactttcttcactgctcaccttaatttatggcggttatctcgcactgatcggtgatatcacgttaggacgttttgtggctttcaaccagtacatcaacatgcttgtctggccaatgttagcctgcggggattccgtcaatatgttttcgcagggtgctgcctcgatccggagaatccaggaaatcctcaaggaacagcctgagattgcagacaccgacaaaacaaaagaagtggaggagatcaacggcgagattgaatttaatcacctcacgttcatccaccgcggtcacagcgaaccgactttatctgatattacgctacacgtgccagccggaacaaccctcgccattatcggtcgtaccggaaatggaaaatccacgcttgtaaacctgcttttacacctttacaacacgaagccgggcatgctttttatcgacggaaaagatatcaataccattccgttaaaaacactgcgtgaaaatatcggttatgttccgcaggataacttccttttctctgacacgttaaaatcaaacatcgcattcggagcggaaagcgaagatatggaagcgatccagtctgccacccgcgctgcctgtatccatgaaaatatcgtgcagtttccggacggatacgagacaattgtaggagaacgtggtgttaccctgtccggcggacagaaacagcgaagctcgattgcaagggcactgatgaaaaatgctccgatcctgatcttagatgatgcactctccgctgtcgacacggacactgaggaacatattttagctaatttaaagaaaaacagacagggaaaaacaacgatcctcattgcgcaccgtatctctaccattcaaaatgcagatatcatcatggtgttagaagacggcactgccgctgagattggaacgcatgattctctcatggcaaaacacggcatttattacgatatgtttgagaaacagcagttagaggcgatccacggcgaagcaaaaaaagctcttgtggaacaggatattccaactaccgaaaataaaaatggaaaggaggacgcataatatgaaacgtctgttaacatatttaaaaccacataaatgggtcatgactgccgcaacggttctcgtcctctttatcattgtagtagaactttaccgtccaatcgtcattggtgacgcgatcgacgattatatcaacggttattatgctccttatattgaaacgactgccgatgcaccgggcgcagttccttaccatgacacgtatttgacaagagatttcgaaaaagaaagcggacagacttacgaccagattcttctatacaataatgaatattacatggctgaaaatctttcatctgaggaatgtgttgcattaaaaaatgcagattccgccactctttcatcttatgtaaaccaagatgccacacttctcacccgcgaggacttaaaggcattaaggcactacgattttgccggaattttaaaggctgctgccctctatctgctcctgctgctcaccggatttgtcttaaacgcattagacacctggattttgcagaaaatgggacagcaaatcatttaccagatgcgtgaggaagtctttacccacattcacagcctatcgttgaactttttcaataatacaccggtcggaaaactcgtcacccgtgtttccaacgacaccgaggctgtcaatgagctgttttcgacgattttggtaaagctctttaaaaacattgtaaaaatcatcggctatgcagtcgtgatgctctcgatcaacgtgaaaatggctcttgtttcctttgcactgctgccacttgtcacgatcctgactttttatttccgggttatgtcaagaaaagcttacgagctcacaagaaaccgcattacagatttaaacacctttttatccgaacacctctccggcatgaaactgatccagatttttgcaagagaagaagaaaagtatacacagtttgaaaagaaatccgaagacctgtacaaagcaaactggcgtgaagtcttgactttcgccattttccgtccgtccatttatctggtatcggtgcttgccatgatgctcgttatcggaaccggaagcgccggggttttaaaccagacactttccctcggaacactgtttatttttatcacttacatttcatccttttttgatccgatccaggaacttgcagagcagttcggtacgttgcagtcctcgctcgcttctgccggaaagattttctctattttagacgagaaatcggacatcgtaaaaccgacgcatcctgtcgacgtgaagatcaatggacgtatcgagttccgtcatgtatggtttgcttatgagaaggacgactacattttaaaggatatcagcttcgtgattgaacccggagagaaggttgcctttgtcggtgccaccggagctggaaagtcttctattttgaatctgattggacgctactttgatatccagaaaggcgagattttaatcgacggtgtcaatatcaaggatatcgacacggatgtgctgcgtgccgccattggtcaggtccagcaggatgtatttatttttaccggggatattaagagcaatatttcgttagacaatgaatcgatctctattgaagatgtgaagcgtgccgcagagatcgtacacgcggattcctttattgaaaaaatgccgggcggctatgatgcaccggtaacggaacgcggaagtacgctgtccgccggacagagacagttactctcttttgcgagaactttagcatacaatccaacaattcttgtcttagatgaggcaactgccaatatcgacactgagacggaagcactgattacaaatgcgttagaaaaacttatggaaggacgcactacgatcatggttgcgcaccggctttccacgatccagcatgcagacaagatcatcgtcatgcatcaggggcagatcaaagaatccggcacccatcaggagctgctcgcccagaacggactgtaccggaagttgtatgatctgcagcttgtggaagcgtagtggctaaaattttgtaactacagttcctatatccgtctgaaactcaatccacctatcgcttccatgtggaatcacgtacaacaatttccggttccacgcggatgtgaagttcctcctccgtgagtgcttcgccacggatcagccggagcagaagttctgccgccattctgccaagtttgtcctgcggatgtgaaattgtcgtgattggaatatgattatcttttgcgagaagcgaattatcaaaccctgtgaccgaaacgtcacggggtacttttttgccaaattcgcgtaatgtccggatgacttcaactgcaatctgatcattgtagcagaccacagcatccatcggtatgtctgcacaaatcgcgttgctgatcgtctcccgcggtttcacctccttgtcttccgtgtaaaaccatgtaaccgaatccggatcgtataacatccctgcctcctgcagtgccttgacatatcccttgtgcctggcctgtccctgcatatcatctgccttaaaaataccatggatattcttatgtcctaactcgatcagatattttgtgatcagatatccgcccttcatatcgtccatcagcacatatggcttcttcttcatctgctcaaaatatccctgaataaacacatacggaatcccatattcatccatctggtcataaaggcttgtatgtctgcaggaaatctgcgttttgcttggctcaatgataagtccgtcaatatccttcgacagcagttcctccatacagcgtgcctccgcagctctcgaatttcttgttgttttgagcataatactgtaaccatttgccgtaagcacctgctcaatcccctgaatcagcctcggaaaaatatagtctgacagataggtagtcaccaccgcaatattcttggaagttcttgtgtggatcgtgcgctccgatacaaacgttcctctcccatgctctgcatagagaaatccttcctccgccagttccccgatcgccttgcgcaccgtctgtcggctgatgtgatactgcccggcaagcgtattttctgaaggaattttctcccctgcattccactccttatgaataatttttaattttatatcctctttcaattgtaaaaactttggttctttcatccccgctccttatatccattccttttccataagcatggcacaacttgtatgttttgtaaagtagaaatatacaactttattttttcattaaatgcttaattttcgccattttcttcttgtatatattcaattcaaaaacaacttgtatacctatatatacaagttgtacacttaaatcacaaaataaacattaacaatttatcaaccgggggttgaaaggagaagaaaaatgaaattacaaaaaaattacaaattttggttctgcacaggttcacaggatttatatggggatgaatgccttgcacatgttgcagcacactcaaaagaaattgtagccgctttaaatgcatccggcgttttgccatacgaagttgtatggaaaccaacactgatcacaaacgaactgatccgcaaaacattcaacgaagcaaacattgacgaggaatgtgccggtgtcatcacctggatgcacaccttctctcctgcaaaatcctggatcttaggattacaggaattaagaaaaccattacttcatttacatacacagtacaatgtcgagattccatatgatacgatcgacatggatttcatgaacgaaaaccaggctgcccacggcgaccgcgaatatggtcatatcgtaacacgtatgagaatcccaagaaaagtagttgtcggacactggtctgaaaaagaagttcaggaaaaaatcgcagcatggcagcgcacagcgataggtatcatcgaaagcagccatatccgcgtcatgcgtgttgctgacaacatgagaaacgtagccgttaccgagggtgataaagtagaggctcagttaaaattcggctgggaagtggatgcttatccggtaaatgagattgcagaatctgtcgctgctgtatccgaatctgatacaaacgaattagtagacgaatactatgataaatacgaaattttactggaaggcagagatcctgctgaattcaaacgccacgtagcagttcaggctcagattgaattaggtttcgaacgtttcttagaggaaaagaactatcaggcgatcgttacacactttggcgatctcggtgcattaaaacagcttccgggtcttgcaatccagagattaatggaaaaaggatacggcttcggtgcagagggtgactggaaagttgccgctatggtccgcttaatgaagattatgactgccggaatgaaagatgcaaaaggaacctctatgttagaggactacacctacaatctcgtaccgggaaaagaaggaatcttagaagctcatatgcttgagatctgcccttctatcgcagacggtccgatcagcattaaatgccagccgctttccatgggagacagagaagatcctgcaagattagtatttacttccaaagaaggtcacggtattgctacttccttaattgatcttggcaaccgtttccgtcttatcatcaatgacgtggattgcaagaaaacagaaaaacctatgccaaaattacctactgcaacaaacttctggcttccacagccggatcttagaactggtgcagaagcatggattcttgccggcggtgcacaccacactgcatttacttatgacctgaccgcagatcaaatgggtgactgggcagaagctatgggtatcgaggctgtttatatcgacaaagatactaaaatccgtgactttaagcgtgatcttgcacttggcgagattgtataccgctaatctgctgaattttctgagcagatatgcactacataatttaggagcgtataacaatgttagaagaattaaaaaaacaggtttatgaagccaatatggagcttccccgccgtggacttatcacctacacctggggaaatgtcagcggtatcgaccgcgagaccggatattttgttatcaaaccaagtggtgttgattatgataaattaactccggatgacatggttgtcatggatctgaatggaaataagattgaaggaaactacaaaccaagttccgatactccaacacatctggaattatataaaaaatatccagagatcggcggtgtcgtccatacgcattccccggaagccacttcctgggcacaggcaggacgtgatattcctctttatggcacaacacacgcagactatttttacggaccgatcccttgcgcaagaaacctgacacctgaagagattgactccgcttatgaaaaaaataccggagttgtcatcattgaaacatttgagacacgcggaatcaacccgatgcatacaccgggtgttttatgtacaaaccacggtccttttgcatggggcaaagatgccgccgaagcggttcacaatgcagttgtcttagaagaagttgcaaaaatggcaacgaaaaccgagctgatcaatccaaaagtaaaacctgcaccggattgtatccgcgataaacatttcttccgtaaacacggtgctaacgcttattacggacagtaaaaaggagaataagctatgacaaactataaagaatatattgagagtggcaaagctgtccttggcatcgaattcggttccacaagaatcaaaggggtattgatcggaccggacaatgaaccaatcgcacagggcaaccacgactgggaaaaccagcttgtagacggcatctggacttacaacttagatgcgatatgggacggtttaagagactgttacagcaatcttttaaaagatgtaaaagaaaaatatgactgtaccattacaaacctcgcatctcttggcttttctgccatgatgcacggttatatggcacttgataaagaaggaacacttctcgttccattccgtacctggcggaatacgattactggagaggcatctgaggaacttacccgtctgttccactatcacattccacagcgctggagcattgcccacctttatcaggcaatgttaaaaaaagagcctcaccttgcgaaaatcgattccctgctcaccttagccggctacatcaactggcagatgacaggtgaaaaagtcattggaatcggagaagcctccggtatgtttccaattgacattcagacaaaagattacaaccagaacatgatcgatcagtttgatgaaaaagctgcttccatgggttatgcttttcatttaagagatctgcttccgaaagttgcgcttgctggtgaggctgctggtcatcttaccgaagaaggagcaaaaaaattagatgtttccggcagcttaaaggctggtgttccgatcgcacctgctgaaggtgatgccggtaccggaatgactgcaaccaacagcgttgctgtccgtaccggtaatgtttctgccggaacttccgtatttggaatggttgttttagagcaggatttaaaagaagtgcatgacgagatcgaccttgtgaccacaccaaccggaaatctggttgccatggcacactgcaacaactgtacttccgacttaaatgcctgggtaaatctgttccatgaattttccaaggctgtcggcattgacctttccatgaacgatctttacggcacactttaccacaaagcaatggaaggcgacgcagactgtggcggtctgttagcctataactatttttccggcgaacatattaccggctttgaagaaggccgtccgctgttcgtaagaactcctgacagtgcttttacccttgcaaactttatgcgtaccaacctgtatgcctcccttgccgttttaaaaacaggtctggatattctggtcaaagaagaaggggtaaaaattgacgaaatcttcggacacggcggtctctttaaaacaaaaggcgtaggtcagaacattctcgctgctgccttaaatacacctgtttctgtcatggaaactgccggagaaggtggtgcctggggaatggcgcttctcgcctcttatatggtaaataaaaaagacggtgagactttagattcttatcttgtcgatcatgtattcaagggcaacaccggaagtaaagctgctcctgatccaaaagatgtcgcaggatttgaagcatttatgaaacgctataccgagggactttcaattgaacgcgctgcggtagaacatatgtaagatagccaataaaattacataaatcattgattttctccctataaaaaattggggctgtgaaaaaagaatagtcccgaaaaaaagaaagaccaagagtttataatgaactcaaggtctttctttctgttataattaatttgtgaaaaaaattaataacataatctattctaacccaaaacaggcagttttgccaatactaattcaagattatttggacatctgtgatccagtgctgacttttgatagatttatgggagaaatcgaactggagaaatatctgaaaaatattcctcaacattatacaggaagactcagatatgacccggtcagcatgctgaaaacagttttgtttggatttatggcgaatggctatatatcattgcgtgaactggaggatcagtgtaaagtcaatctccgcttcatgtatcttatggatcatcaagcaccttcttaccgtactttcggctacttcatcaacgaagtacttgctgattccattgaagaaatatttcaagatataaacaaaaaaatcttcgagacagagcatgtagatcttcaacatctatacattgatggatccaagtttgaagcaaatgcgaataaatactcctgggtatggaaaaaagcaaccgaaaaatccagataccgtctctttggtaagataactacactctttgaggaaatcaatgaggaactttcatgtacaggtatgaaactttgtatcaatagtgagtacgcaccagagtatctgaaggaagctgctgaacagtatgcagaagtctggcagattaatgaagcaatgtttgttcatggcaggggacatcgcaaaactacacaacaacgtcattatgagaaactcaaagagtatgctgctaagttggaagaatacgtggaaaaaatcaaaatctgtggagaagatcgcaacagttactcgaaaacagaccattcagccacttttatgcgaatcaagacagactacatgggcaatgaccagttgcttccagcttataatgtacaggtcggtgttgcagatgaatatattgctgttgttgatgtaaatcagtatcgctcagatatggattgttttattccattaatgaacaagttttatactacatatggcttctatccgaagtacccagtagcagatgctggatatggttcttacaacaattacatcttctgtgagcagcatggaatggaaaaatatatgaaatttaccatgttcaagaaagagactacagacaagaagtatcatgaagatccatttcgtgcagtaaattttccaatcggggaaggcggaatcatgcgttgtccaaacgggaaaagcttttatcttcagtatcgaaaaaacgtaaaagggaacaagtatgggcgtcaggaagaagtgtatcagtgtgaagattgctccggctgtccatatgcagaacaatgtaaaaagacagataaaaaccgtactgtacggatcaaccgcgaacttacagcgatgcatcaggaagtgatagaaaatttcgaaagcatccagggagcgcttctaaggatgaacagatccattcaggcagaaggtacctttggtatcatgaaaaacgaccggtggtacaaaagaattgtccgaagaggaataaaatctgtattgcttgaagtatttctcgtttctatcgga
